United States Patent Application Publication US 2009/0018031 A1 - sequence listing, part 8

SEQ ID NO: 3890 - DNA, 6000 bp, Homo sapiens
ataacccagccaccctgggactagatggagaaggaactggtattggttaacagacttagggagtagttcccactgtttccatactgcaaaggtggaaactgagacttattcaaggttgttcaggtgggaagtcataaaaggagaattcaaaatcacatccatttggtgcccaatttatacactttgtactatcctggctgggaaatacctgtttcaaatatagaaggtgtagagcttaggtgacaagcattctgatgtcttcctcaattaaggctctagtggccttttcattgcttttccttctccccacattcccaccccagggaccattcttacattaagcagctgccctagatttcttggggacactagacctctttcctagcgatttctagcacccccctcccaccatttctggcttatagaaggtacttgccctcctctctgactttccacttgcctgcagaaaaactgattggctttgcttttctcaagcagggcagggcagtataactggtatagagacagacttcctaaggatacaattagttgatgcttcccaacatggaaaggcatggatctttctgtctgtaaccacactttgcagtctaggtctgctcctatggaaccctggagcataggggaaactgcccccataacaggatggaaatagtaagtgtaacgaacgacagtgcctttccacacttcccttcctcctctgaatgaattctccacccaactaaaatatgtctccaaagctatttgagaaatgtgaagcttggctagcccataggacctatgggcttctataccaaagctgctggtatagtataggtatggaaaaccatggatttcaaatctataaatgccctatgctgataccttacaactgtacccccatgaaactgatataaccagtgtccttgttttatagggaaagttctaatatagtgccaaatgtagcttagccttcctgccattctcccagggagttcaaattggattcctcgccttcattatctctggagggtggaggggaagtattgcccacacagtatcccaggagtcatgaaaccagtgttttattaaatgcaacatcatcattaatgctgaactttatttccaagtccactggaggcagaagagaaaacaattcaggtaaccagcttcgcagttttactgtattcctctgtccagtgctttcccgtttctgggttttgtgatctaggtttggattagggattcatagtgggaagctccatgttcctgaaacctggtaattattttgaattaaggataagagtttcacttccctaataaaatgtcaacaacaataccttacccttcatgctttctgctctgtcttgagcatttttcatgcagtaactagtgtaataatcatgaaattctaggcgttaagtcttatcctaacaggtaaggaaccaggtctgctaagattgacctgtgctacctcatgtgtgctatctgtctgggggtgaggagtgatatcacagtctagtaaaggtcacttgaacaggccattctccctgtgatttctatttttttatgtacatcataaaagatggcaggatgctatgagactattggctatgaagctctagggtcctgagtctggtatttctagggtagggctttctgagttatggcgtcttcacctcataaacaggaataacacctctgcttcagattgcacgggaagtaaggagatggtaacgtgaagagacggcagaacatgctataattttaacagccaacaatagatggctttagaaagcttagattagataattccagacattcttatgagccatacttgcagcctcccaggaacattgcctgtttctctcctgtagaaagctggaaaggtatttagtttgtgttgagtggctctttgaccaagtatgcttgattcagctgttagcttcttttgaattctactgtgtttgtttgttttcaccagcaaaggtagtagagtgcagtggggcccttacgtgatccagacttgagctctgctgtttactagccatatgttcttgggcaatttatataacgtcttcctcccaggatggatgtgaggcctgaagaaggctggtgcatgttagcctctgatgaaggagagctgttgctattattaaagacttagcatattcatattgtgtgactgctttgaggggcttcttctatcacaagttagccagttttctttaagcaataccaaaaaagtgattttattttaaggcaatttcaatgactttatacaagttccttaagatctgagggcatcactttactcattaattaaaataaaatattctgtccacttcatggaattgttgggaacattaaatgaggtaatttaaagcacagaaaccacaggagcttaacatggagtaattgtacattaaaatactgtgcacaattttcattttaaaccgcatattttaaaatagtttttcctttgaggatcctcaacagattagaataacttttgaagctgggaccaggcaaggaagcaatcctatctagccttgtctctgtgaggcacctgctctgaaccaggcccactacaaacatttgtctggcttggggaaacagtatgaatgaaggcatgcctatcatgtgtctaaatatttagaagtgataaatcaggccagcaaactgttaagccaagtacgttgcatcctctgatgatgagttacttgcataatgaacaggatggccaggttcgaattgaggactcatggacgacttggaattctgtgccaaaatgtgactggtcaggaagtgtgggcccctacaccccttttctccccaccgctggctccatcccataaagagaggggccttgcgtgcttctacatggacaccctaacctccgagctcaagctctgttcatatcttccaacaaatagcagccttttcactcccacccccaccgaacatccaagagtatacaggtggttgtctagttcttcttgggaagccagacctggaaagaggccacacagaccttggaagtaagataagagttcagagctgtctaggcagaatgttctggagtctgacatctcggagcgtggtctagaagtgagggggtctgtaggctctgggtatatatatccccttcacttgggagtcttcttgtcctataaagaagggaacagttgacagagtgggaccctttaaaagtgtgggaccctttaaaagtgtggggcccaaacttcaaaggcccctcttgcctgtgtctaaggctagtgttgctctgaaccctatggctccaaggagaacaacctgtgagtaatttgtaacctgtgtgtgagctgatgacattttttacagcttttcatatttatactcttgtgtttctccaagcacccttttcaacacagtttaaagtcccaattcctactcccagcgttataagtaggatgtactttattgcctaagatttgactccatgggagctctgactgattctttctgttgaccactgaggctactaagtggggagaagttgtagccagcttggtccctgaccaaggggagataccaactctgaacattgtttctgccaagctgggagtggcacagtttcttctacagactcttgctcttctccacctccagccctgggtctacatattcccctggtgtcctcaagtccagagtctctccttggatcttgcacagatgggaagatgtgggagaactgaggtccagcagttttgtgtgcagactttgacccagtcaccccattgtcagtgccatgctttgttctgccttctgcaacccctggtactttcaaattctgagtggcttcaggttcctgcagatatgttggctcacttttctagaatatcccctctataggagtgtaggctgtggctgccaggaaaccctacttcatgtattttttatgttttaaaaaaattttgaggccaggcacagtggttcacgcctgtgatcccaacactttgggaagctgaggcaggcggatcacctgaggtcaggagttcaagaccagcctgaccaccatggataaaccctgactctgctaaaaatacaaaattagccaggcatggtggtgcacgcctgtaatcccagctactcaggaggctgaggcaggagaattgcttgaacccgggaggcagaggttgcagtgagccgagatcatgccattgcactccagcctgggtaacaagagcaaaactctgtcttaaaaaaaaaaaaatgaaatctcttgtctgctcatgtgtctacagttagttttttccccttgtgatttaatatcttttgcttttctttttactgtctttgtctttattttgtggaatttcaggaggaaaacacagtggctaattcactatgtttaactgaggataaaaataggaataatagaatagtgggtactgatgttcatcgagggtttcctctatatcagaatggcctcaaattccttcttccatggatcatctcttccttttccgagatttcttctgagaaccagggatctgccatgctgccatgtcagctttaagccaccgtagaaaagccctgcttttcagagggcagttattcctatctgtttcccttgtgatttgtatgtgttcaggtttagtaaacatttattaagcacctactgcatatgaggcagcatgcagtgctttcactaacttgacttttaatccttgtcgcagccctggaggaggtgggtatggagcaaactcaggtgcctggatactgagacttcttcaaggctgaatagccagagcctaaaattgtgcccattttcataaccctagtggtggcaggatctccagtcattttggaaatgtgatttgtgctttttttttttttttcctcattaagacttctctggaggggtagggtggggagagcggggtagcggagggagggagggggagtggtggggagctggagagattaagtttttgtgttgtgtgtccctgtgtgcgagcgtcattttaaggtggctcgggagcggcccggaggagcgagggaccgaaaagggagccatgctgcgctgaggggaggctgcacagctgcagccaccgccaccgccaccgccgcagggtggggtgggaggggcgggagccaccgccaccgcggcctccagagtgggcgccttttgccgtggacgctgaccgtccgggacgagggtttcatcaccttaaatggttttgaaccaatgaagctgtattcccttaaaaagacggacagcccatcgtgtgaactatagatttatagtgtacagatttatagtgtgtacagatttatagtgggttcatagtggcgtcatgcacggagactcctgcgagttcccctaagttcttagaggactgctttgccttttgatctgagagttgcaaagttccataaagtatggcccttgtggataagcacaaagtcaagagacagcaattggacagaatttgtgaaggtatccgcccccagatcatgaacggccccctgcactcctgccccctggtggcgctgctggacggccgcgactgcactgtggagatgcccatcctgaaagacctggccactgtggccttctgtgacgcgcagtccacgcaggaaatccacgagaaggttctaacgaagccatgggtaccatgatgtaccacaccatcatcctcaccagggaggacctagaaaagtttaaggccccgagagtgatcgtgcagataggcagtggctacgataacgtggacatcaaggctgccagcgagctcggaattgctgtgtgcaatatcccgtctgcagccgtggaagagacaccggactctaccatctgccacatcctcaatctgtaccagaggaacacatggctgtaccaagcactgcggtaaggcacacgggttcagagcatggagcagaaccgcgagttggcctcgggatcggccagcatccgtggggaaatgctgggcctcatcggctttgatcgcagggggt

SEQ ID NO: 3891 - DNA, 6000 bp, Homo sapiens
tttattttgtcaaggacttcctcaattattctgtcttggagagatccaagccaggaaagagaaacctcagttctcctcctggtactttctcaagtggaacagcatctgagggcaaactgtagaataagatgatgatcttatcaggagaatgagaaggaagaggaagaggaggaggaaaagaataaggaagaggaagaagaaggagaatatacagaccttagctacccaaatactaatactgtcactttgctctgttataatcactactcagaactgggatatactttaaaatatacagcctatacatatttttaatagaaattcagataaattgaaatctgaaaaagtaaaatctaggttgcaatttgccatgctgaaaacgttttccagtccaattgtctacaccagaggttgctacacttctttcctaaaggggcagataaaacactttaggctttgcaagccataagctctgttacagctattcagctcttaacctttgtaaaaacaaaagcaaccgtagacaacagggaaatgaatgagtgtggttgtgttccaattaaactttatttacaaaagatgtggtcctttggtcctctggccataatttgccaactcctggtctgcacaatgccttttgtctttttatattatgaaagaaagatacatttacaatatgcaaaaagacatgatttatagaaaagctacacattcactgtgaaaaaattcatgcagtataaaaaaggtaggttacctgaaatctcaccaccctgagaaagtcactgttactattttgacaaacatcattgcagatacacttacagaagagattcgtgtgtatgtatgcttttttatacatgaatggaagcgtctccacatgatggtttataatctgctatctatgttcaagaatgcattgagggcatcttttcatgtgaacatatttagatctatatctttttttcagagtgctttagagggaggtatcttatctcttgtgatgggcatttgggttgcatcgctgatatcctctaaatctctactttctaagagaccactgcttgaactcctccaatgacaggaaattcattaactcttgagcccatatgttttatttctagacaacagtatctggggacttccactccctagagctagagggcctattgcagtaataagccagagagctcatattgagttagtaatcaactaacttgcatgggtgcctccattttgggtcactcccacccaggcctctgaaggtttccacccatgtaagtgtggaactatgctaaattgccttctgatctgtagccacagttttggtcatagctcctgcctatggcaatacacgtttcaacaggttacttggggatttccaagactgtgggtgcttctccctgacctaacttctacatggaaatatggcagtctccgactgagcagaaaaaccagtttggaagacacttattcccaggtgacctactcaaaaggagggagctctccctgccttccagggcaggtccagacaaagagtgaagccatgtgcaataggaccaataaaatccacagggagcaaagctgatatcccaaaaatgttgttctgaagtgagatctccatctctaaaaaaataaaataaaaaattgttctgaagtctgtggagacctgatcaccgagagactgactgatttgcctcactttttcatttcttcaccatctctttctgactcatcctttagctacagtgttgttattgaatattaaatagaaattcacagtagattgacatatgaattgcaattcgttaaaaaaaaacaactgtcctgaattataaaaccacttctcttgcttgtctcgtgagggattaaatggccaagaaagccactttttaaaactaaaatctaatttccatagaattgggactttagagccattctcttacaatccctttattttaaagacaagcagagacccagcaaagttaagtgactgtctcaaatttacacagcttgttaacggcaaagccaggacttaatcccaaagaccttatctcataaagcataaatttcactccactccactgacactctttcataggaaactgatttatttgttttgaatgccactgggtgagggggtagaaaatagttcattaactattttatagcaagaacataaaaaaaaggaaaaaaaaaagttaaaagaaggctagagaaagaaaaaaaaaaataagaaaccaaacaggctcatggaatttggcccaacagcatagggaactctgtagacaatgtagatccacccagttatcacaaatatgagcaaaggagctgaaatatttattcctccacactggctaaaggctagggatggaggtggaggacattaattctacacatttccagctgccctgtgcccaggcaaagcaaatcctgcagctggagctggtactctgagaatatgatgtgggtgctggcaggagggaatgaaagcacgcctggaaccagtgtgcacgaaactggaaaaggactggagggggtatggccaagcactggcagcaagtgctggaattaggcatgtactttaatataaactagagtagaagattgatgcttgcttttcaaacccatgattacatgcttggagttactaactgccagggtaatatatgtacaaaataacaaaagtgagtcaataagaaatataaataaaaaataggaattacagttgtatgaaaatggaatgtgaatcctttaagtttgggaaacatcagcagagtagaaaggacactggatcaagggcatcgataaaagcacaaagtattgggtcagccagccaaggtttgaatcctggctctgccagttttgctctgtaagacctaaccttcctgtgactacgtccttaggttgttaggaggattaaaaggtttaatatatgtaaagcacttaaagcaacatctgctacgcagaaagtgctggttaagtattagctcttatcattcctgccttgctattaggttgatgcaaaagtaattgcggtaataacttctgtactaacctaatactatctcgatcagtgcttctcaaactatctgtgatattttattttcaatctgttgcaggctgatgcctttccacataaaagaaaaatgaaatagacataaaatacaaagctgcattttaaacgatttaacagacataaaattactctgtcaaattgctgtaagtttctacatgctcatcttcaatttctatgctcatccctttgtagatgggtaacggtttgcagactgtcactattccatgaaccacactttgaacagcactcaactagaaaaaccttcgacaagccgcttaagttactggtggcaatatgtggtgttccagcttccaggttttttcaagagactaatgagagaaaagtaagagtaagtacatgaaagcacttattaaactataaagtgtcccaggaaggaaaattagtagcatagcttagaggagtctattctgtggtctgtggccaaaaaatacaaactccagtatgccaccctctcagtccctgtggtgtcaagctgttctgtttcaggtgtatcatttgaactgttagtacttgtgaatcagtcaagcatttcctaatgctgaacagaacaggaaataaagacccctctggcagtctgtggcttgcatcccacaaaccaccgccatccgcagcttgctaagaccacactcctggggcaaggcatgcattcatacacctactctacctgtgacacctcttctacatgtgcaaatgatttcactaaacctgaaacttgcttaggggtcagaaggaaagcaagagggaatataatgccctgactgcagtccctagttcccagattccccagggcccacttgtcctcagttggtgaaactcaatacacagacatccctcaccaatgctttcagactccatttcaagtgtggactctgcccacactggttctaagtgacctactttggcctcacctcttttctctccaccctgtcaaacaagaaagcggctacctaggaatactctagaagtccgctgagtggttttctgaacatccagcttctttactctttctggactccaagaaggcaagccccttgtctgattcatctttgtacctctcccatcacctttagcatcgcagttggtacacagcgggtgcttggtaatgtctgtcgaatggccaaaggaatagtacaaaatctgtggaagcggaaatggctcctccatttacccgaccttgaacccttccagaaaagaccaaccaaatcccattaattcattaggcagaactctgccaggtactggacattcggaaacaaatttcagggggtcggggcagatggacgggaagctcatggtgggtggatgtactacaaattctataatccgcagttatacctccactttctgggaaacttctctccgtggccccagggccctttaaatgttactatgcgtgttttcctccatagtttctggaacagaaccaaactttcgtgtaggggtttggcagcgctcatcctcacagccctggggaccgctggcacaggggcaagcgaggcgttcgcacgcgaaggaaacttgcgaggagtcagggcggccccgcgcgggggcgggtcgtagagtgggggccctcaagtcctagaacttcaggtcctccatgagaattagaggaagggggatggccaaagacgaccagacgtccaccgagcttccacaggccaggcctcgcccctcctcctgcggggccacaacgcgggctccccggcccgggacagcacagccagggcgtccgggcgggaggcagggcccggcgcggaggaaggagcccggggccgccgccgccccgcccaccccagcgaggcggagccggcgcccggaggagcaagaggaggaggaggaggagaggtcggagccgtctccaggagcccttagagaccgagtcccggcggcgacggcggggcagcgcaccggcaggcgggtgagtaccaagcggcgggcgcgggtggtgagtcgggtccccgcggggtcggggcgcggcgcggggcgtcggccagcgagttcgggggccgcctccgagtcccgggtgctgggaagcgagatggagggagggagcggaggaaggaaggaaggagggaagagtgtcctgctggagggcggggactggtctgggcgctgggcgccggagaccggggggagggggaggaaggggccaagggacaccgagacccagaggcagaaacggcgcgcgcgccctcgacgggcggccgcccgaggttgcgggaagccgcccccacggctgtggctggggctagggctgggggtggaaggaaaggtctccccttgagctcgcttgcctcctcgccagcctgcggccgtgcgccccgcgccgggttgggaggcccccagtgttcccagccgtggcttgtggtggtgtcaggcgttggaggagggctggcatgtgggggcgacagggacgccacgcccctctgcctactttctacctcccgggaccagccggcgggagcgcagccttggaatccgctgggcgctgggggtctagcagggaaatagcgggtcgcagaggggagagcccatatgacgcaccccgcgagggacccccgagtggggacccgaggctgcttttctgcagactgtatttgcaagtggtaagggggaggttgaggcttagtcttgggtgatttttttttttttaattattgccccgacagttatcccgtggggcagggtgaattctgtttttcattttaattagggcatatcaattaaagctaactttaaaacgctgtcacttagcacctcccgtcactcactcgtccctcgctttgtgtgtcctgtaaacttggcttaaatcattcataactcacgataaggaagccgtgattcttgttcacgtcgccgcagtggagtgaaactttgcccaactgggactgagtggaggcatt

SEQ ID NO: 3892 - DNA, 6000 bp, Homo sapiens
ctagtgttgacaagagggcactccagaatccacaaacatttatagtagttagacttctagagccaattgaggaatgaggtttgttttctagacacgtcctagtgttgacaaaatggcatacttgtcttgagttgaaaagttctcaggatatataaggacattttagggagggggagggtctcccagagagtaacagaatgatatagaatcagaatctatgttggaaaaggaattatagagttaggtttcttttactttgtaatttttgtgggcatgtagtaggtgtatatatttatgggtacatgaaatattttgatacaggcatacaatgtgtgaaaagcacatcagggtaaatagggtatacatgacctcaagcatttattgtttgttttacaaaaaatccaattatactcttattttaaaatgtataataaattattgttggctataatcacccttttgtgctatcaaatactagattttattcactttatctaacttatatttctgtacccattaaccatccccagtccccaccccactacccttcccagcctctggtaaccatcattctactatctccatgagttcaactgtttcaatttttactgccaaataagtgagaacatgtgaggtttgtgtttctgtgtctggctttttcacttaacataatgacatccagttctatccatgttgttgcaaatgagatgatctcattcttttttatggcggaacggtactccattgtttatttgtaccacattttctttactcattcattcatctgttgatagacacttaggttgcttttaaatcttggctattgtgaatagtgctgcagtaaacaagggagtgctgatacctcgatatactggtttcttttcttttgggtctatagctagcagtgggattcctgggacatactgaagctctatttttagttttttctgaggaacctccaagttggtctccatagtggtggtactaatttacattctcaccaacagtgtacaagagttcccttttctccacatcctcaccagcatttgttattgtctatcttttgcataaaagccactttaattggggagagatgatatctcattgtagttttgatttgcatttctcctgatgatcggtgatgttgaataccttttcatatacctgtttgccatttgtaagtcttcttttgaaaaatgtttactcagcttttttgcccatttttaaagcgggttattagatttttttcctatatagttgagctccttatatattctggttataaatcctttatcagatggatagtttgcaaatatttcttcccattctgtgagttgtctcttcactttgctgattatttcctttgtaatgcaggtttttatttttattttttgagacagggcttctctgttgcccatgctggagtgcagtggcatgatcacagctcactgcagccttgacctctgcaggttcccaagtagctgggaccacaggtacatgccaccatgtccagctttttgtatttttgtcaagatggggttttgactttgccatgttgcccaggctgttatacaactcctgggttcgagaaatctacctgcttcagcctcccaaagtgctgggattacaagcgtaagccaccgtgcctggccctgtgcaggtttttaacttgatgtaatcccattcgttcatttttgctttggttgcctgtgcttgtagggcattattcaaaaaatctttacccaatccaatgtcctggaaagtttctgcactgttttcttttctttttttgagagatgggtctcactctgtcaccccggctggagtgcaatggcgtgatctccgcttactgcaatctctgcctcccggattcaagtgattctcctgcctcagcttcccaagtagctgcgactacaggcatgtgccactacgcccagctaatttttgtattcttagtagagacaggatttcactatatgttggccaggctggcctgaaactcctgacctcaggtgatccacctgcctcggcctcccaaagtgctgggattacaggtgtaagccaccatgccccaactccaatgttttcttatagacgtttcatagtttgaggtcttagatttaagtctttaacccattttgatttgattttggtatacgaggagagagacatctagcttcattcttctaatacggatattcagttttcccagcaccatttattggagggactgtcctttctccaatgtatgttcttggcaccttcgtaaaaaacgagttcactgtaggtgaatgaatttgtttctgggttctctattctgttctactggtctatgttttttttttttttatgccagtaccatgctgttttggttactatagctctgttgtataatttgaggtcaggtaacatgattcctccatttttattcttttggctcagggtaactttggtgactctgggtcttttatggttctgtataagttttaggattgtttttaatacttctgtgaagaatgtcattggtattttgatagagattgcactgaatctgtagattgctttgggtattagagacattttaactatattgaatcttccaatacatgaacatggagtatcttcccattttttttgtgtcctcttcaatttcttgcatcagtgttttatggttttctttgtacagatctttaacttccttggttaattcctaagtattttatttgtagctattgtatatatttttttctccaaacttcaatttccttagccattataaaaacagaataagctcattctttgagaaagaagtcagaattgtgaaatccccctttgaagagattcagcttttagttaaagtacaaagtacagcatgtgactcttatttattcaaattctgaatttagacctagtgaactaaagaacttagggtactaattaattgaatacggtgaagatctcaggtaaatttaaattgacagtgctctgctgacaaaacataaagtgacagattacttggtggtcttttcttggcatttattgctaaaagaatcctcttggtgacaacaggccagtcttcaaccaactgaacagtgagcatctatgtctgtacagttggtaacatgtttgaaatgtcttagatcattgtggaaggtcaaagaacatctaaacaaaagtttaagagatacagatagttcataaactatatttactggtaatcacttcagatgcaactgaacttaaagttatctcaatggttttgtttttttttttttgagacggagtctcactctgtcgccaggctggagtgcagtggtgccatctcggctcactgcaacctctgcctcccaggttcaagcgaatctcctgcatcaagcctcctgggcagctgggactcctgggtggcgcgcaccaccacgcccagctaatttttgtattttttagtagagacggtttccccacgttggccaggatggtctcgatctcttgacctcgtgatctgctcgcctcagcctgctaaagtgctgggattacaggcgtgagccaccataccaggcctcaatgttttatttttcttttgtatcctaaatagaatctttaaacacacgctacaaaaaaataacacctggtgtttgagacagcactccagtctgtggtttcccaatgcagcagttaataaaaaagcaacaattttttttttttctgaaactgtttcggcctaaaacactgcttattcctcaacagtctccctcacagaagtaattattggaccatatattccctaaaatctcttccagcattaacataccacggttctaagagttcagtgatatattttacaactactgtaaaacagatcattctttgaatagatacttgtgtttaatcttacaaatctgtaaagtatgaatgacgttttagcattatacagtcaacaaagcaccaaaggtgaaataattacaataccttttgggaaaagacaatatttattgagatagctttcacattctttttacatataatgtcatttcattccgaaaaacaactctacgaagctgtataatttactttgaaataaggaaataaagcctcagtaacttaagtggcttgcccaagaataccgtaagtagcagagccagaattcaaaccctggttttaaccccaatcattacatccgtatgaattaagtaaaatgctaaacttacgatgtacatttttgcgaactgatataaactgttgagtaaataaattagattttgttgaccagtgcaattacacatgcttccctaataaaaaatttgaaatccattaatgataaaattattaacattaatggaaaacatcagcgcattcggagattgactacccgaaaagaaataggaaacatctgcccttagtgctgtgacataacacacatatttccgtggatgaaagaaagacctactggctgagcctattttgtttggttagaccctaccctctctcctaaaaactcctttggtactcaatttcaagcaggaggtaataaattacaacggaaatactaaagagcaaactttccggaaacacaaaaataagttttattttaaaaagtacaataagcattaattctccagagtaaatgggtaaccgagcagacaggtgtaatcttcagccagcaccttggcttcttcacaatctccttcagaaaaaccgattcaagagctaagaagccagtaaagtcaaacctcgagaagatcccttctccagcgaatcagcgcccctgctccccgcccgcccggctccgctgggtacgcgacagcgacctccgcgcctgctctccgcctcgggtcagcggggctgggggttgggggtggaactgaaaatgcctgttggccaaactcgggtcacagagagacacgcctgtacggggcgggggtgtgcgggtgactcacgccgggtgcacagtagctcctacgcctcacccagtatctcccctcacttccctcaacccttcccacaaactgggaggaaaactgagacctcctggtcacccgccgccgggccttttagaaactcccacaagctctgccttccctccctggtcctcttcagaccccctcttagttcttcgcggctaacggtaagctctctccttacctctccctaatcggcccctctggagaggaaaagaaaacttaagagtcgggtcgcgctagcctccagcagccgccgcgcccaccgactgctccgccccttctcctccccctcctccaggctcgcgctcggggccgggtgtggagctggaacagagggctggcaaggcgcgcatgcgcaccgagggtggagccgctgagcacagaaccggaaacttagagacaaagttcggagccccgcccccgccgcgcgccgctgagttgtctggccccgccgacccacggcccacgacccaccgacccacgaatcggcccggccgtcgcgtgcaccatgtctggctcctccagcgtcgccgctatgaagaaagtggttcaacagctccggctggaggccggactcaaccgcgtaaaagtgagcgggggcgggcggccgaggcgggaggaaggcggcggcggcgggtgggatccggcggcccagctggcgggggcgggcgggacacgcgccggccctcgcttcccctggagaggacgcgcgctcagcggcggcgatcggggagcggccagctttagagcaggcgccgcgtgggtctacgctgtgttttagggggacgattagttcgcccttccgccccaggactttccgaggcgggctggcccctgggttgaaccgtggccgacattccggtcctcctccgtctctacctcccttggcagccttctcggctggtctcaccaacagctgcgcctccgcgcgctgtccgcacccttcctttcccactttgccagcctcctgtttctcatcggacagggtattttccgacttttgattcagagcagacttttctcccatttgatctttcccaaa

SEQ ID NO: 3893 - DNA, 6000 bp, Homo sapiens
tattaaaaatcataaggaagagaaaatgtatttactattaattaagtggaagtgaatcatcacaaaggcctttatcctcctcatcttcatgttgagtaggctgaggagaagaaggtggaagaggagaggttggtcttactgtctcaggagtggcaggggcggaagagatggaggaagtggaagggaggcaggagaggcaggcatactcagtgtaacttttattgaaaaaatctgcatgtgagtggacctgtgcagtttgaacctgtgttgtttaggggtcaaatgtattaccagaactctttcagcattattaggctacctccctaatgaatgagcaaagaatcattagctagctgtgattgatatggttgggatgttcatttcctccaaatctcatgttgaaaaatgcgaatcccagtgttggaggtggggcctggtgggaagtgattggatcatgggggtggatccctcctgaatggtttagcatccccttggtgatgagtgagttcttgctcagttcacttgagatctgggtgtttaaaagagcctgccctcctccccaccacgtgtgggttcctcactggccatgtgacctgcctgctcctgctttgccttgcaccatgaacaaaagctccctgaggcctcactagaagctgagtagagatgccagagccatgcttcctgtacagcctgcagaaccatgaaccaattaagcctcttttctttataaattacccagcctcaggtattcctttatagtaatgcaagaacagactaacacagtgactatgaccctaagagtagcctagaggggctaaggtgtgagaaggaaggaataaagcccaatgtggtaaaaggacactaaacatcattcttgcatttcccctggaagtatggacaaggaggcacagcaatggcccactgtttctggtattctgctcaggggccaggcatagggagaaatggaccatgtttgtctaaagatctttattagtctgctcaagctgccacaacaaagtaccacagactgggtggcttaaacaacagaaatttattttttcatagttctggaggctggatgaccaagatcaaggtgacagaaaatttggtttctggtgaggactctcttcctggcttacagagagtcactttgtcagtatgttctggcaaggcctttcctctgcctttccactgccctgcagaggttgggggttgtggtggggaagatagagaaagagtaagagtgacagagagacacatatatgtctctggtgtctcttcctcttcttataaggacacccaaactatcagctcagggtcctaccctcaggacttcatttaacctcagttacctccataaagaccttatttccaaatacagttacctttggggctagggcttcaatagatgaattttggggggacacagttcagtccacaataggattgtcattttattctggggagaatctccagctagtagtacagagttaatcttggcagtgatgagacttttagcaagaactggatttgccatttaaggcctttctacttttagctgacaaagtttccagcttcatggggcacaaaatattatccaaaacctattttctacctagtgtttaagtaattcacgtatcttacacatcctgctggtgtaagatacccaagcacctttcacctcaggtgagttgagttctcctcctctctgcacccactatactctgtggatagagctcttataactgcattcataatgtagttctacaatgacctatttatctatctcctgctttaaatggtggacttcttgagggcggggcctatgtctgttcttattcatgtttatatccctatgtcctgctcagtgcccataacccatcagctgatacatgttcaatggatgaaaaaatatggcctcctaaaactatcgatataccatgacgctaatgaagcttaagtgtcagggcccctcatttgcatgagaacctacctagtgattttaaattcataattgggtattattttacttaaagagacccttcctcctcccccctccaaaaaaaaaaaaaaaacccaaccaccaactatataaattttaggctccacaaaacctgggcacgcccctgggttgctgagatggagtgtgactctatttaatttatgttccctgtttgccattggaggagaaggaagaaccccaagtacatttctcctttcctgagattatttttgagagatataatcttgtcacttaaccatcatctgatcaaaggaaatgaaaatgctggagcagtgtacctggcagcatggaatacattaacttccaaaaattatactaatcaaagacaaacaagatgcccaggtgaaattccaggtgatgtttctttattcataatgtttacggtcagggggaaatatggccactgaagtcagccctcacaccccgcatccctttaggagctcagtcatttgcttggacacccagctttggagggcagtagtcatttgctcctcagagcctacagtgttagggactgatctttaagccatcctgttaccctcattcttcatacctatccaatgacaagtctagccaacttgacctctcataatgtctcacattagcccacttctctcttctccactgtcactgcccccgactcttgcctcatttttgcaaccagcactaactggttttcctccttccattcttgccccacttcagtgtatgctccacatgatagccagaatgacctttgcaacaatcccagctggctgggtgtcttccctcggtagctccctgttatactcacaatgaagttcaaattcccttaaataacacacgagaccttcagacccaacttctgtttattttttcttcctcatctccgcctacctgcttgctggcacttcaggactcatcattctgagttatttgttcctcctcgaaggtgccatgctctctttgtgatctggacgttggcacatgtagaccctctgccttgaggtttcttctacatccctggtttgtctcttccactttgagtttagattagtgctgtccagtagaaatataatgtgctgtccagtagaaatataatgtgagccacatatttatttaattgtagattttgtagtagccacattttttgaaagtagaagtaaaaagtacatgagcactaacaaaacaatcatgaaatcttatgggatgcaatgacaaaagtagaagtagtcctaccaaaactgtaaggttgaatttaaaggaaaaatgcttcacactgcttcagttttatatttaaattaattaatattaaacatttggttccccagccatactagtcacatttcacatctttaatcaccccattctgaatggcacaggtttagacttcagtttctctgacatcccatctgcagtaggtgccctccatatgttactacaggaatcagggcttaaccctcttgcagtaccagttacactgtgatatagctgtctgcttacttgtctctgttcttcatcagactcagcttcttgacagtaacgcctttgtcttattcatctctgtatcatcagcacccaacaattctggcctaaaataattgcttggtttgtttgaacgaggttgaatgcctgaaaaacaacaatcttctatgggcctatgaggcattacaaaatcaggtccctcacttgctcactctgacctcatcttctaccacactccccccctttgttcattctgctccagccacactggcctccttcccattctgtgaataacctaagtatgagtgaagcttagggcctttgcattatgttctctgtgcctggaaaacccttctcttgagggccaattggcttcgcttcttcccttactgcatttaggtgtcttattaaatctgccttccctgaccaacttctttccaacatagaccccattccaccagttaatttcctaagtttatttttcatcacaatgtccatcaccatttggcatgttaattatttagttagtctgtcctgactgtaatgcaagtttcatgatagcaagcatggggggctttttctggggtgatcagtgatgcattcacctaagtaactttttttttttaagagttggggtctcacaggccgggtgtggtggctcacgcctgtaatcctagcactttgggaggccgaggcggatggatcacaaggtcaggagatcgagaccatcctggctgactcggtgaaaccccatctctactaaaaatacaaaaaattagccgggtgtggtggtgggcgcctgtggtcccagctacttgggaggctgaggcaggagaatggtgtgaacccgggaggtggagcttgcagtgagccgagatcgtgccactgcactctagcctgggcaacagagtgagactccgtctcaaaaaaaaaaaaaaaaaagagttggggtctcactctgttgcccaggatggagtgcagtggtggtgccatcatggctgacagcatcttcaatctctggggcttaggtgatcctcctacctcagcctcccaaataggaatataggcataagccaccaagctaggcctatactcccaacttagaatagtttctggcacctaacaggtgcttgataaatatttattgacagcaggaatgttaagactatcacagggaaggttagggaatgggaaaaggcaataaggtactcagaagtagagttccagaaatttcaatgtttctctcatttcaagtttcacaatgtccaaatggcttggaaagccacacaatgaccagattttcattgatttatgtgtaaaacttgaggcaggagtaaaaagatagtcatgagttttaggagcttaaggctttatgagtatgtccaattctctaccccccaaaacagggaattcctggttctctaatggcagaagggttggatgggtggaatgtggctgttggaagcttctgtggcagttggtagagaccaccagttggaccaatggaagggtctccagcaggacccattgagcagaaggaggccaggtgggaaagctcctgggaagagcagccagactggacactgggctgcttgagtcctgagtcacagtgagtcatagcagaaaatatagctgctgggaggcagaggttggggtctgagtctgcatactgaccactttggaacatttattcatgatatggggcaagctacttaatcaatgctttgtcctagcgtgtaaaatagagataatttgtattccacagggttgtgaagatgatgtgacataatatacgtgaaaatgctctgtgaactggaaagtgtttgacacatacaagttattagctctggaggcattttcccatgaattctcttgtctacctaccctacaccttcgatcactgaatttattgtatataactcagggctcttgtaaacttttattttgttatataaaactcaggctcgtttctcccgaatgtccctcaaggttcagaaaaacaaatctcaatctggccttggagaacttaaggagccacatcctgacatttcaaggaatactgttttccaattatttcatatgtgaatgtcttatctccccagatagacagtaagctgcttgttgttaagagcacagacttcagtactgggtttatttatttatttatttatttatttttgagacaggatctcactgttttgccctggctgtagtacagtggtgctaatcatggctcatcgtggcctcaacctcctgggctaaatcgatcctcctgcctcagccacctgagtagctggaactacaggcacatgccactgtgcccagcctcagtattgggtttaaagttagttttgcttacttactagctgtgtaggactttgagtacgctgcttactctctttaagccttagttttctcatccacaatattgacattataataataatttataaaaggctgttgtgagaatttcaaaagataatctatctaaagttcttaacccagtacctggt

SEQ ID NO: 3894 - DNA, 6000 bp, Homo sapiens
tatcaaaagtacaaaaattagcccggcgtggtggcacatgcctgtaacccagctagttgggaggctcgggcagaagaatcacttgaacccggaaggcagaggttgcagtgaaccaaatggcgccactgcactccagcctgcctgagtgacagaactagactctatccaacaaaaaaaaaaaaaaaaaaaaaagaaaaagaaaaaagcaccaggacacctggattcaaattctgattctctagattcaaatacacttatcagttctgtgatcttggggaagccacttaaccttctgcatataatatttttttctataaaaggaaagaatcattcttaggattgttgtcaaggattaaataagtaatgtgtgtgttagcttctatgggaggtctgacacctggtgggtgtctaataccggttggatgcatctgttggaacatcagctgccttatcccatcgcctataaagtgagaagtgacatgtctcagtttttaatgactttcctcccctcttatgttttattgatgagaaattccacctccctcttcacccctcatcaaattctataacttaggcttatgtagtgaccctgtttcctggcccacaggtgaatattgaccacttcactaaggacatcacaatgaagaacctggtggaaccttccctgagcagctttgacatggcccagaaaagaatccatgccctgatggaaaaggattctctgcctcgctttgtgcgctctgagttttatcaggagttaatcaagtagtaatttagccaggctatgaaatcatcctgtgagttatttcctccataataaccctgcatttcccattaatctacatatcttcccacagcagctttgctcagtgatacccacatgggaaaaatcccaggggatgttgcttactctttttgcccacactgctttggatacttatctactgtccgaaggccttctttccccactcaattcttcctgccctgttattaattaagatatcttcagcttgtagtcagacacaatcagaatcacagaaaaatcctgcctaaggcaaagaaatataagacaagactatgatatcaatgaatgtgggttaagtaatagatttccagctaaattggtctaaaaaagaatattaagtgtggacagacctatttcaaaggagcttaattgatctcacttgttttagttctgatccagggagatcacccctctaattatttctgaacttggttaataaaagtttataagatttttatgaagcagccactgtatgatattttaagcaaatatgttatttaaaatattgatccttcccttggaccaccttcatgttagttgggtattataaataagagatacaaccatgaatatattatgtttatacaaaatcaatctgaacacaattcataaagatttctcttttataccttcctcactggccccctccacctgcccatagtcaccaaattctgttttaaatcaatgacctaagatcaacaatgaagtattttataaatgtatttatgctgctagactgtgggtcaaatgtttccattttcaaattatttagaattcttatgagtttaaaatttgtaaatttctaaatccaatcatgtaaaatgaaactgttgctccattggagtagtctcccacctaaatatcaagatggctatatgctaaaaagagaaaatatggtcaagtctaaaatggctaattgtcctatgatgctattatcatagactaatgacatttatcttcaaaacaccaaattgtctttagaaaaattaatgtgattacaggtagaggccttctaggtgagacacttttaaggtacactgcattttgcaaaaaaaaaaaaaaaaagtaatcttttagcaaccccagtattccttcactatttcgcttcctgcattagcaaattttacttacagtcaaaagtgcagatttatactcctgacgtgtctcattcacagctaaataataggccataggacttttggtaggtttaaacttttaattctgtatttcatgattataagtcttgctagaattttttctaatctttagtagatttgattaaataatgattcacagaatttagtaacagaatcaaactaagccatgtatgagggtaatcgagatgaggatattaactcaaaagaaatagggtgatttttaaaggattaataaaattctgaaatgttaagtagaagattacattgtctagtcttgtatttcctccttctgttgctctctttcattcacacactctcagtttctcatatttgtagctcatttatttggttatttcctaagaatattgaaagtgaagcaactatgtgactgtattcttcaggtaaacactgactgcgcttgttggattttccctatttttgtgacttcaagaataatatgccctgctgaatacatgccatttcacattctgaaactgggtagagtggttgggtgttctgccaacaattgctagtggtgtgaattcattcatatttgccagtattgctcacttcaaagaaactccttcatcaagcagtccagagctaggccagatcaatgctacaatcatgaagttctcattgcatgcaattgtgtaggattgacaaggaactcagataaaaatttccagggtgcacttccagaaccagcttcaacatatgtctacattgcccccaagttaataaagtgccaaccctttactctctcatacagccagaaatgttagaaatccaaaatcttggtgcattattttttcataaacgctaaaacatttgaagaaacaatttaattatttaaaattcaagtattttattcacattatttgcaatatccaaatgtttaaaaattcccagataattaactagctattacagatctcacctagagggttgatgttatgaagactccagtggactgtactcacaaattgactggacaccctatgaaagtgggtagacctctcagcggaaaataagaagggcttttacctacagggcaggacagggtcccatgagagcagttctgtggagatataaaaagaatggaagaaggaatgccttatagtgatattgtgacattatatctatatatctacatatatctatctatctatatctacatctatataatcttacatttaaaattgtattcctacacatattagaaactcttctaataaatgaagtaaaaaaattaaaaagaatacaaatattccagccccaaatgagaaatcaaacatattaaaattgttcaagaaaatttctttgaacacttctgaaagtttttggaaacttagaaaagagggaaaaaaatccagtgttactagtaatttccatggtaatacagataaaatacattcttttaattctgggaaattagaaaaagtggggtgatctttccaggaaaaacatgtgtaacatctgcttatcactccagctccctcctcctcctcctctccacgttcccttgagtaaatgtctgggaaagcatgaagcttgatgcaagaaccctgttgtactggcgttttcctcccctgtgaaaacgtaactactgttgggagtgaattgaggatgtagaaaggtggtggaaccaaattgtggtcaatggaaataggagaatatggttctcactcttgagaaaaaaacctaagattagcccaggtagttgcctgtaacttcagtttttctgcctgggtttgatatagtttagggttggggttagattaagatctaaattacatcaggacaaagagacagactattaactccacagttaattaaggacgtatgttccatgtttatttgttaaagcagtgtgaatagccttcaagcatgtgaataatcttccatcttccccgccacacatacacacacacactttttgtttctttcaggtagacaccttttaaaatgcagaactaactgaggcatttcagtaactttgctttcaaatcaataaagtcaaatgtatggaaacattttgtgccctactctccataccccgtgtactcaaattctctactgtatgaattatgctttaagtagaattcagtgccaaggagaacttggtgaaataaattattttaattttttttttatcctttacaaagccatggattttatttggttgatgtgtgctctgtacacaagccatttcaataggatggagctgttaattattttccaaagagtaatagacatgcaaaagtttcaataaaaactgggccattaacaaataaattaataaactaataagcattcccttctaggtttttgccaaactgcctatccaataacaaatttgagaatcgttgtaaaagctagttatatttcagagaaatgattttcattattgaaactgttctccctagcaggccattttccctttttcctgggagtttagcaagtttaggagagaatagtcatgaaaagaaagggaagaaaggggagaagggaagaggttaaaaagtaagtgctcagacctatgaacgtaatccctttgctacaaatatttaagagcagctcagcttggttgaaactgagttttgtcatcttccatatttgcaggaaggtattttctgacttgcaatgcagctagatgtaaaattttattttatcatcctagaaagccttgactagaaaaatgaataaatattgagggtttcctgtccatatctggcttgcatgtgccagaaagcagagaatagaaaatgtaatctccaacatccaagcatcgaaacccaaggggtaggcaattctatgtaggttttggacatgaagtttggtgcatcttggtttatgctggctcaactgctattaaacctctctggcttatagtctcttcattctattagacaagcacgtatcgaacacttgcttcgcacaaggctctttagttaacaatttagcagctactgtttgtgttaaacacacttttcaccaaataggttctgaggcaaacgagagcaatgactatttaaagaaaggctttcccagcatcacttacacatcccaaaactaaaaagatcaactcttccaactgagaaaagactcctggctttgaatggaaacttacagcagagagtcacaggccacggcaacaacaacgacaacaacaaacatttggaatattattctcaactcacgttttaataatacatcttattatttttctagtagagaaactacaaatcagcctcttcaacatttatatacagtttaataagcctcttgcaagttacttgttctctcacctgaggtatttttttcctccccaccttgcccctgttcctcccttcctcttctccctttgcaagaggaaatatttaacatatttgggtccaacttcaataatgtaataattaatacattaaaagcatttaacttcctttctagaaaaatgcacaggctaaggcatagacaaaacaaagagaaatgctgagaaatttgccactggagacaagcaatctgaataaatatttgccaaaagttctttttatgtcatatagtgtcaggatttgaaggagctatttttttttaatgttgcaactagcaactcatcttcggaagacacagccaggagaatgaagtagaagtgaaaggtttataaatccatttgtaagcatttatcccatatattttaaattcaagaaaaattgtgtttatctttagaattttgtattcaatactttatgtactatgtgactcatgcttctggataaataaagcaccaaatatgtatctgtaaccacaatcacacatattatattaaatatatatctatataacagcctcatatgagtcctccttgactcccaagtattttctatatgaaatattcttccttaagataggcttgttctttcaccatgcttcttacaccaggtgcgctcttgatcaattgggaggatgcttactaataaaggacaactataatacagcctgacatgcaaaactcagggaaatacaaagtgccccatt

SEQ ID NO: 3895 - DNA, 6000 bp, Homo sapiens
tgcctggccctgaaattctttatattgttgtggcagaattggaagatagcttgacaaagatgccctttcctaatccccaggacctttgaatataatgagatatcattcctaggattttgttgtttgatacagttgaccttacgacagggaatgtagacctgatgtatcacatgaatccttaaaaacaaagagctctctctggctgaaaggggaattaagaggaagccagaaaggtcagggtatgagaaggatttgacatgcctttgctgactttgaagataaggggaccacatgaggaagaattgcaggcagcctctgggagcagagggtggccccactgccagccagcaaagaaatgggggtttccatcccacagtggcaagaaactaaattctgctggcagcctgaacaagcttggaagcagagtccccgcaaaagcctccatataagagctcagattagccagcaccttcattttggcattcacatgagcagaaaacccaactgagcctgcctggacttctctctaaactgtgagattaaaaaaaaatgagtgttttgccaggtgtggtgggtcacacctgtaatcccagtgactcgagaagctaaggtaaggggattgcttgaggccaggagttcaagaccagcccagacaacataatagagtgttttaagctgctaaatttgtggtaatcattatgcagtgacagaaaactaataaaagttcatatgccaccaacttgatattcatcctagtttttcttcagtttttggaggttttttcttttttgagttaacttttctcaaatttgtaaaatatgtacttagtttcaaagccatacagcaaggaaccttcctagaaaccttgctttctttttcattccttctgtttgttcctttcccttattggaaaccttctttttattgtttttggtttgtttttccacttttaagtataagcaaatacctatatatttattttctttccttttctcacataaaagataacataggctgggcgtggtggctcacacctgtaatcccagcactttgggaggccaaggagggtggatcatttgaagtcaggagttcaagaccagcctggccaacatggtgaaaccccgtctctactaaaaataaaaaattagcctggtggtagtggggcgcgcctgtaatcccagcgactcgggtgactgaggcaggggaatcgcttgagtctgggagacagaggttgcagtgatctgagatcgcgtcactgtactccagtctgggcaacaaagtgagaccatgtctcaaaaaaaaaaaaaagataatgtatagcaaatattcctgcaccttgcttttttccacttaacaatacgtctttgaggccactacatgttagtgtatagagattttcttcattcatttgtagcactgaatcctaacttattcctctaatcccctactgacagacatttgggcatttttaatcttctgtaattacaaatgtatcccaaatatataatgttgctttttattggcaacagaagataaatgtgtacttgaggatttttttaatagatcaaaagataaatgtacttgaggatacttttttcccccgatacaaaatatgtggaattttttccaacatcaatcaattctctgacaccaattgggtatccaacaattcaattcaattccgacactaactgcctgagatagttcagactccacagattaagggctcagtcccatacactgtccccacttcaggcaccacatgaatgtccagggcctccagtacttctgaccgacttggcttcagatcaggagttcccatggctaataatttcctataacagctcacagagctcaagaaagcactttacttactttgattactggtttatgacaaaggatgcaattcaagagaagccagatggaagagatgtgtaggacaaggcagtggtacgatctcagctcactgcaacctccacctccccggttcaagcaattcttgtgcctcagcctcccatgtagctaggactacaagtatgtgccaccatgctcggctaatatttgtatttttagtagagacacggttttgccatgttggccaggctggtcttgaactcctgacctcaagtgatccacccgccttggcctcccaaagtgcttgggttacaggagtgagccaccgcatccagcccaataatgctcatttcaatatatcagccctagtggatgacatcatgaagtggtcagacacttgaagttatagacaggatcactgcaagtatgacacagatatataaatgtagaccaagtcacctaacttgtactagtaaatctgataccatgagtggcattgttaatagtgaggtgatttccaaaatactgaacaactcttggtgaggtttgagtaaatcaaggtgcaatcttccttcaattcacatagtacttgcattcctagacaaattgctgtacaacaaaaccatgcaaaaaaacccctcatggatatatgtaaaatagtttggtttcagacttagaaaagtatagacagtttttactgtcatgtgtgaaaggaactgttctttttgtgtaggactatttcatgtactgcaagatgtctggtatcctgggccgcacccaataaatgcctggggtgtcctctaatcattgtgacaaacccaaaatgcctttcaaaatgtcgtattaagaatcactgagtgagatgctttctgttccaagtaacagaaataaacccatactgattcaataaaaatatatgtatattgattggctcttgtttctgatcagtccagaggcacatcagtttcagggaagtttccatctgaggtcaaatggttttaccattctatcagtggaggcatactgtaaacaaataaatagaaaaattgatgcatattttataaatttggacacattttatgtagaaaaacaacagagctgtgaaagagtacatagattagagaatttcttttagattggtcaggggctgagtgcagtggctcacatctgtaattccagcactttgggaggccaaggtgagaggatagcttgagcccaggagttaaagacaagcctgggcaacatagcaagatcccatcagggaagacttctctaaggaagtgacatttaaggtgagatgtgaagggcaggaagggcttggcctgtaaagagtggaggaaataacattccatgtggaacaaatagcatatttcacagttttgctttcaccagttttatgtggactgctagactgaaatgatattttacataaaatatgttttatatataaattattcaacacacatgtgaggttcagttggacaaggcctctcattatcttactttataagtctttgtggatgtctctaaaacagaatggtttattaaactaatttgggaaaggagaattagtgtgtatctttctctttttctaaaaaaatataaatacattcttgcacaaaatcagtcacgtttttcacaattgtcacctatacaatgatatacggtgaaataattactttaataataatttgtctgttttctctgcatctgattgaattctgctcatagctcaatattagctccagaagggaaaaaaatcttaagagagcaattgaaaatgcatttgttggcagcaatttccatccctgaatgcacagtaagttctgagcttatgagctcagaaaaaagaaaaatctttgtgataaataatgcatttgataatgagcagcaggagaaaaaaagtgttttctgttgaagagttcaaaatgaaatagagtaagtatgggaaaaggttgctcagtatgaaggacatctttcgcatcatggatgggtatggagccacaacagccgtaactgtttattttttattctcattctcaccatgccagtctgtggcatatattttcagacctttcgtgaataccaattttcaaaagggtttagttctcagattctatgtcactggatgatttacttacatgacctcatttaaccttttcaactctacagataggaaagtatgagtatccccattttatatatgaataagctgagaggaaggttaactcactccctcaggctcatagagcttagccgacatctgagtcagtgtaaattaaataaatatcagggatttcaaaataagtgtctaaaatactattaagaacagaaagctttaagctccttcaagtgtctggcttgccgcgtgacctagactcttaagtggagcgtcagcttccagtttttgaccaaataaagcatttatcccataggaatattaaggcacccatttacttttttctccccattatcccatttgtccccagagcaatgtgggtgtttggcaggtgccagacagtaaattactgttctaaattgtgcctcagtggcccaataatattaaggaagcatctcccacagtgtcaatctgtagacaagggaataattaatgtatttatcaaagcagatggatttcagaggaatgtgaatcctgctctaagcacagcatcagggtttgtttttttttttctggagtttagtgaactgggctttgtaacttcttacctgattattttgctgccctgtttgtccttccttctttccctttttagcagttctactctgtgcttcaacttttcatccccttattaagactgctgcatagaaaacgtaggagtctggagacaggcaggcaaagtggggagtgaggaagggaaaacaaacattctgagaaggaactgttccgtcccccgagctgacagcgcccgctctttgttttgtgatgactgctccctggccttttggttccgagggagtgcagggcagcagtgtgaagacctgtttacgtccactccccactccccggggctggcttcgggacgaattcactgtggtattaacagagcccgggacagagcctggcagaaggcagatggatgctcgtgcccgtcggctggatgaatgaaaggtgagcagcaaaggcgataccaggatcgtccacggcgggactggaggaggagaatgggactgtgcggagcctgcgggaagaatctgaaagtgtctgtgtgatggagagagacatggaaaaggcgacgtcccagcggctggaactggggcggaggaacgggaacagggaaggcctgagttaggcaccacaaaggttttcaggagaaaagtggggcgagccgagagggtaagggcgagacaaagagcagcagccgaggctgttcgtgggaagaaatgggaaagaagcagccgggagggcgggcggacggacgcgaaggaaggggcgcgggtggggaggggcgccgggagctgggcggggcggggcagtgcggggcgcggggaggcggctcggggctccgggggccggaggggcccggccgggcgtggggggggcggggcggggcgcgggcgccgcaaagttacttggcctgcgcccgcccgggtccgcgtgctggtggctggcccgcgggaggagcgaagcggggctcggtgggctgaaacccgaaacctccagtcccggagcgcggcggggaggaaggaagcggcggcggcggtggccgaggcggggaggcggctgggccggggcctgagctgccgcggcggccgctcctcggtgagcacccggcgtggggcgcgggcgcgggcccgggcggagagggcggtccggatggagccaggctaaactcattgtgcgaggctgagggctcagggcgcgggccgggaagggtccccgcccccacggcgctccctttctccccgcgcccctctcggaggtcagggctgtcctccgcccgcactgcgccttgctttggagagctggagctctttgtgggaagatgttgggggcgcgcccctcccctgcggcctggggcttctgagaggcccaccccattctgctgggtgcagcccgccccgtttctccggcgccgcccgaagcccctaaacagtccgctggatgggagggcgtaggtgcgtgcc

SEQ ID NO: 3896 - DNA, 6000 bp, Homo sapiens
gaggcaggagaatcgcttgaacccgggaagcagacgttgtggtgagccaagatcacaccattgcactccagcctgggcaacaagagtgaaactctgtctcaaaaaaaaagaaaaacatatatatatatatatatatatatatatatatatataaatataaatcttgaagacaaaaatttaccagatttgggccaaggtagaaggaaaccaagactcaaaggtataagaagacagggagtggaagtgctcagtgtgtcagagacagaggtggaagaggggatggggggaaatgagggttaaactataatgggaacttctgcctctgtccacttggggaaaactgagatcagacttaccccgctatcaaaaacaactgggaaacgagatgatctatgaggcaatgattttcagtgtggaaagcagacagcacaagatatgatgcctgaaggaagggaaatgaactgagtaaatcttattgttgtcttggttttctgtacttaaaaggtagctacagtgcagaaggagatccaaagaagagtacagaaatcacgctgagatgaggaaatggagaccagagtttgggggaggctgagaaaccagaatttgtggcacagagtaccatacagtaggttgctgcccagcaatgaagagatccagattgaaaacagaaatcatcacagctgaatctgaaaactagaactattttagtcaaaaacaagttatagttacaaggtactgaaaaaaaatcgtgattctgcaagtaattccaaaagaggaattttttaaatgttttgagcaacgtacagtgtcattggaatagggtagattaggtacatacttggaagaaacgaaggaagaaaggaagcaagcatcacaggccggatggacagatactatgtctcattgtttcttttcttaatagtttttaggaaaactttccaaacccaaataaaccaccaagtcctggttgcttttctttgtctttggataatgtctttcacaaaaacgaagcccacccttgattatcttcacttacagggtaatgcctgtgggtccaatggaggctctggctgaatactaagctgtatgtgcataacacaaagctccatgggtctgagcaaagaatgtacaggcagctgtaagctgaacaattctcggagctcacaggggattcggatacatctgagttccaacccaccaaaggggaagagttcactgaacacacaggcattcaactgcgaccccagaagagtcacaccctagtaggaaggctaaactagtcctagaataaactaatcctataataatggctacgagcctttaagacaaccatcaaaaggatcgaacatctgtaaataaccaccttccaaaacaaagtccctattctttaaaagaacacagcatctactagaaatacaaaaattagctgggtgtggtggtgcacttatggcacaatatcaaatggtctatcatatctgtgattggagtcccagaaggagaagagcaagataatgggtgaaaaatttttaatttgatatattttgataaaaattgtaaacctacagatccaagaaatccaatgaacaccaagcagcataaacacaaagaaaaccacatcaaggcacatcataatcacactgttgaaaaccagtgatagaaaacttgacaatcagccatagaaaaagagacgcattacatatccaggaaaaggataaagatctgcagatttcttttttttttttttctttttcttttcctttttttttttttttttttttttttttgagacagagtctcactcttgttgcccaggctggagtgcagtggtgtgatctcagctcactgcaacctctgcctcttgggttcaagtgattctcctgcctcagcctcccgagtagctgggattacaggcgcccacaaacacgctcagctaattttttgtattttttagtaaagatgtggtttcaccatgttggccaggctggtctcgaactcctgacctcaggtgatccacccacctcggcctcccaaagtgctgggattaccggcgtgagccactgtgcctagcctggagatttcttcagagaaagtatgcaagcacagtgaatgatatctttaaacttcttcaagatgtcaatctaaaaaaaaaatcctccaaaaacaaaggcaaaatacttatattcagaaaaacaaaaacagacaatcaccagccaatctgtattaccaaaagaaggttaaaaaatgttctacaggcagaaggaaatgatatcagatagaaatctggatcttcacaaataaatgaagagcatcagaaatgataaaagatttttcaaaatcatttctaaatgtttcaaaagaaaattgacagcttaaagtaaaataatgttctgtggggttattacctatgtaaaagggagatataacaaaaataatacaaaggatggaagagggggaatggaagcacacactataaagaatctaatagtgaagaagaagtggcatgatgttatttgaaggtagtcgacggtaaattaaagatgcattttataaaccctagaacaaagaaagaggaggaaaatgaaggtcaatacttgagataaaatggaatactaaagtatactcaggcaggaaaaaaggaatgaagaataggacaaacagaaaacaaatagcaagttggtagttttaaacccaaccacatgataattacataagaagtaaatgaactaaacattccaattaaaagtagagatggggtttcaccatgttgaccaggatagtctcgatctcttgacctcatgatcctcccgcctcgacctcccaaggttttccttctttatccctagtcatattctttgttctgaagtcttctttgtttttatctatataaccactgcggattttttactattagttgtcaagctgacagatcgtcaagctgaattttaaaagcagatccagctctgtgctgcctacgaagatggagaatcccacttttaagaacaaagatacaggccgggcgtggtgactcacgactgtaatcgcagcactttgggaggccgaggtgggaggatcacccgaggtcaggagtctgagaccagcctggacaacaagttgaaatccggtctctactaaaaaggcaaaaattagctgggtgtggtggtggacgcctgtaatcccagctgctcaggaggctgaggcaggagaatcacttgaacctgggaggcggaggttgcagtaagctgagatggcaccattgcactccagcctgggcgacaagagcgagagtctgtctcaaaaaaaaaaaaaaaaaaaaaagatacagatagatttaaaaattaaaaggatataaacacatatcatgcaaacactaatagtaagaaatctgcagtggttatatagatataaacaaagaagacttcagaacaaaggatatgactaggaataaagaagaaaaaccttgggaggccgaggagggcagctcatgaggtcaagagatcgagactatcctggccaacacggtgaaaccccatctctaccaaaaatacaaaaattagctgggcatggtggcgtacgcctgtagtcccagctactctggaggctgaggcaggagaatcgcttgaacccaggaggaggaggttgtagtgagccgagatcgcgccactgcactccagcctgggcgacagagcgagactccctcccactccgcaaaaaaaataaataaataagaagaaagaaaactgatacccagggtcctggtgccagactttacactactgcagctatcctgggtgatgtccagagatgaacggaatcagaattacctggagggtttggggaatcacaggttgctgggccccacccccagagtttctgattccttaggtctgggtggggcctgggagtctgcatctctaaaagattcccaggtgacacgctgattctactggtcttgggatccactctggaaccacttgttgactgacctcttcctcctgtttaaaactgacatgatcctatcttgaatgatagtgtaacaattagaaagataaaataaggaaatgatgcgcttgaaagtgtagacactgatttcccttgtgattgattaattgagattgggatttgggataaaaggaaacctaggattctgccttagccaaccagtcgggggcgggaggtgggcaggaaatgcaggagaaataagattttggggtgaaaacaatgagctagggtttggatttgcttgaattttcaatgcagtactcatatatctttctcacttttaaaagtctgtgaggtggacatggactggcttcgtcggtttgccaaggtttaattttgtgccttaaatgggcacttgagagctttgtaaaaaccgatgtgtttgctggccccgtgtttacgggcctttgtgatctccgcgttcgcatccaatctggcccttgggctccgagaaggtacacgtgtgtgtagggcaaggtccaaccagtggggccagggatctgagcaacaagcgcgccctgtgtcctttgtggcagggaccgcttgtggacggcggatgaggatgaggcgcccagatcttcccgaaatatttcctaatcgttcatcatgatgttatgttgttgttttcacaaagggaattaatattggcctccttttctacaaatcttgccaacactgcgtgaaatgttttcgttgcttctctattcccaaggtttcgtattattttaccaagtcggaaaatggacggcgcttaaactgttttttccctgaaaggaagagggctgtaatcactaaagtgttttaaaatctccagcgcaaaagcctgcggtgccacagggacgaggcctggagagcagtcgctcctagaaccggggcgcgaagggcacccccgcctccagcacgcgccctccgccctcccggcctcgctccccccggagtgggggcctcgccggcccctggtccccgtcactcagcaacgtcgggtcagccttcgccgggttagtggcgacgcggccgcgcgaattcgcacaggtattccgcgtttctccgccgttccccgccttggccggaggcttccgaggcgtcccttggtgcagggtgggaagcggcccgcgccccaacggcccaggcgctggagctcaccccgagcgagggcggtacctgaggcttcggggagcccgcgctgaccgcggccccgtccccagacccctccagcaaccccggccccgccccagacccctccggtgatttcccccccggccccgccccgcagatccctccagtgatctcccccccgccgcgccccccagacccccccccagtgatttaccccccggccccgccccacagacccctccagtggtcccccggccacgcgggctccgggggggcggggcgggggcgcggccctttgctgggacagggggcgtgggcccgagtagcgggcggggggcgcgggcccgggctggggcgggggcgggggcggggagcgcgggagccccggtgacgcagcagtgacgtcggtggcagcgggcgggatttcccgggcgagaccccgcggcggagtgggcgcggccagcgtggaacgggggcgagggtcgcagagtcgccggctctcccttccccagtctgggcccccacggcacagggggccgagcagaagcccccagcgtccagggccgggggagggtccgcctgcgcccccaggcccgcgtggtcgggccctgcagggcgggaggcgcggcgcggggcggggccggtgacgggacgcggagaccccgcgggcggcgggaggggcacgaggcgcgcgtttgcacccgagcccggcccgcgccccgatgcggagcgatgccgctcggcctggccgccccccgcgagcaccgcgctgcagacgaagcccgcgcgtgatcccgctccgggtaagtgggcgcccggccggagccccgggtgtccgcggggagagcccagcccggtgcagccagacgcggaagggaaactcgg

SEQ ID NO: 3897 - DNA, 6000 bp, Homo sapiens
aggacaaaaatcacctgttatatttctttatgatctttgtagaaacctaagaaggcttcatgcacaataaatccatgactaagtttttgttaaatgaaaaaaggagggaaaaagcaggtctatatcaatagatttggggttcctatatccataatgatttgcaaaaatagacactatttcctgtatttccacaaaatcttaaaaactgactatttttcccaaggtaacgctactgaagctaaaaaaaatcttgaaatgtctttgtttgggctggaattcattaccttgatgaggtaacaggtcttttatctgctatttagaagttctgcctggcatgtaaaatggatgtattattaccatttaatttgtttgacaaaaatattaataaaatacaaggcttacaagaaaaatagtaaaatgttttggatataatgattgagaaccacatattcacacggtttttaaagaaaggaccccccccccacaaaaaaactactccacaatatctatactttcttttttattcttgtttacaacataaaggactccattatctagaaagaaagcacaaaagagaacatgttgaatcttatgatgggtttttggagacgacctagtctaattcactaagtttatatttgaaaaatacaagtcgtagaaacgttaaggtgatagacataattttgtttccaatatacagtaacacaaattctgagtagtctaatgaggactaacaaataacagtagaaaaattgtgaaatatgctatttcttgaaccttccttcttcatgtttgcttggcaacagtaattagacacgaacaatcttgagtcataactgcccagagagcacggtgagaggtaggtgtgtggaaggatggcagatgagggagaaaatagaatgagaggcaccttgatgggagaactctagcttttttaaactcatactgttgctaggaggcatttgtgcataatttttcacagggctttacagtcagacacaggcatatttgagtcaagactctgatatttagaaggtgtgcgatcatggccaagtttcctaactaggacattggtgtcttacataccttatagggaagttttgtcagctatggtaagactatttttaatatggttagagacagcaggaattcaatacatgatgtttttattactagtaattttcctaatgggtttcagcatttcttccctttgtgtctgaatagaaactccttcacccttcatatagtagatatcctgctagtccttgaagagcccggtttgaatgtcaatctctccttcagtagttcatacactgtcattcagtttttcacttacatgcagctatttgtctcaagatcttatctacctaagttggatttcttgtagaatagtgaaaagaacccagaagtcttggatttgagctctgccagccactctttcatgaaagtggaaccattatgaatataatggaatcagggatgtattatgagaacttacacaattgttgagaaggttattttccagaagaaggaattcacagatctgaggaaagtcactattgggtttcctgaggtccttgtgtgtatgggcaagtcagaacttccaggggaatctgggaggcctgccacatccaggagggggaccctgaaagaaagctggaagaatactcggtgaaaagcttttgtctttgcctggctactgcctctttggatccatgttaaggcccttgtgatgggtgtgtggctactgttgatcagctgtgctggaaatttggaagatctgggtgtgaagtgggggagggccaggacatgctagaaccctccaggtgtctgcatgtgttgtcacagcaaactacaaagaccttgagagaggaatagatactgtttcactctgtttcccaaatcttgcaagaattcgtctttgggccaaccgtacttacatgcatacacttacatgcatacgggcaagaggatcctgagaaacattgttccagctaatgcagtcgatagagtacaaaccaccactgccacttcttggctatgttggttgtattgggaagttgacccaacctttctgatcctctccttcctcattgttgtattgatgtaaatgagataactattataactatagggtcattagtaagaattaaataagataatgcaaaaaaatccattacaaaatacatagctggatgcagtggctcatgcctgtaatcccagcattttgggaggccaaggtgggcgaatgacctgggatcacgagttcgagaccagcctggccaacatctctactaaaaatacaaaaattggccaggcatggtggcacgtgcctgtaatcccagctattcaggaggctgaggcaggagaatcacttgaacctgggaggcagaggttgcagtgagcagagactgcaccactgccctccagcctgggtgacagagcaagacttcatctcaaaaaaaaatacaattgcaaaatacaaaagaacctatcagattactgttactagatacatccattcatttcattaatgtatgtttattgtgcatctactatgcaccagcaactatactatgcctaggatctgaggcagtgacaatatccttgctatcttcaagctgaatcaggcataattagatattcaagtggagatgtaaagtgagcatttgacagactggatttcaggggatagatcctggttaaaaatatacacttggaagttattagtgtttaataatgaaatactaaaatgtatgagcctgaattgggtcactttaggtacagtgcatgtaaattgagaggagaagaggcttaatgactaagatccaagatgcttcagaatttgggggtcaaaaagacaaagaggaacaagcaatgagagtgagaaaaagcagccagtaatgcagaaagagaaataatagagagtggtgtccgggttaatttatgctgaaaagtcaattcatatgacaattgagaattgaccatcagcttagcaccatggaggtcatttgccaaagtggaacaggttcaacatggaatggaaagattttggcataaagggaagaaggaaaatagggtggcaataagtggaaagggtgtcaagagatattatatatatgtatgtttatgtgtgtgtataatttatatatataaattaaatagagccaattatatatatgataaatagagctatatatatatataggctctctatatatagagcttgggtacagcttcctatgaggatggaaactttacccagagatgcaaaggaggaggaagactgcttccttcaggcggttctctcttaagaggaaaatggtcaaactgagtgagcatacccagttgtatttgcaaatttattaatccaagtcatgcaagtcacatcaacttctcaggagcagactgaacaagagggaagagagaggggttaaaggagggataagtagatttcagcgagagcaaaaacgttaaagaaatatttcgagaagtcgaaaacgaagagaattttgctgaagaagattctaagttccagaggctacagtggaaagatgtggggagttggagtgggagacaggtcagactagagtgtgtgtagtttgggacaatgatatttctcctgtagtacttggaacaggggctaggttagataaatatttgttccttgagagaaacctgacaagacctgcatggggctggggtaatacattggtccacatggacccctgtttgagtagaagtgttatctccaataaggtctagtctgcttagaccaaggggtcaggaaaggctgaccttgattatcttctccttctgtccctccctctcctccacacctggcccagtagaggaaggaaaactagatttacagctgatcttgattatcttctccttctctccctccctctcctccacagctggcccaggagaggaaggaaaactagatttacagcggcccagcccttccccctgaaagccagaggcacaggttgctttactaccaccgagacaaaagtgatctgtctcctttatgtcattctaatccttacagaagaatttgtggcagcagtacgaagactatagctaggaggatcagcacctcagaagctctttgaaaattgctagaggatgagggcagtgggcaagaggaaagttcctctgagcaccttctgttaaaaggagaagccaggccttggggatgttccttcagtttcacaagtggcaagattttcacctccggttggcagctttcaaatcgtttcccatttctccaacttaggaagaagctgtgaaaaccgcaggcaaacggggatgaatgattcatttggtcctggccatttccttcattcctagggtgtctcaatatctctctactctgttatttaagcataataataataataataataataataataataataataataataataataaatcatctgcttccctgggactttcagcggagtcgttaggcacgtgatgaaaccttggtttgcacggggctccatccatccattcatccgtgcatccgtccgtccatctgtccatccattcactagaccacccacccacctaccacccacccacccatcgcacagccttcctccctttccggcttacactgggcgttaaactccggtctctccaggcctccggcgcacgtacacacgcgcgggcgagcgggcggggtgtgcgggagcgcgggctggccgcgccgggggcaggactacagcctcccgaggggcgcgagggcgggaggccggggaggcccgggaggcccgggcggtgtggcggcggccgagccgagcccatccgagccggcaccttcggacgcccctgtcccacgtgactgtcccctcctccctcctcccagtcgcgcgcacgggccgggcgtctcgactcccgcgcgcgctcggctggtcccagtccccgggagaagaagcggaggagggagagagccagcgaggcggcccaggggagcgggcgcgagtggcggctgccggagccgcctgtgcacgggcggcggcgaggcgagggtggcggtcgcctgagcagctagagccggggcggcgcggaatccgcatccgccgcgagtgtgatgaagctaccctgcctcgctgctccgcttgccgccagctgacaccgcctgcacccagcccgcccgggaggggagacgccgcggggccgtgaccttggcggaggaggtaaatagggaaggcgggcggggaggaggcagcgccacccagagccctcccggcccccggcccgcacccagccctcgctctgcgcagcgggagcgtccgcgggcgcagggcggccgcccccgggagccccgcgccggggctgggctacgggcgccgcgcgcaccccgcggtccacggtgctgaaactgctgcccggctccggcggccgccgcggcgcggggcacaggctcgcctgccatttgctgctgccgtgagagcgagcaaggggagcaggggcttgcctgttttctcctctttggctggttgctctggaggcttctgcagttaggcttttacccacggtgacccgggtaaaatggcctgaaggcttgacctcccactagttcttgttgccgggacatattctggtgtcttcttgcaaaaattaggcaggattacctccggacttccgaagcgaagtggggagaaaggagagcagccggtggctggcagcgcaggcaggtgaaagtaggcgaagcatatactccggctctgtgtgggagacccgggggaatagagaggaagcccgtgcgctggagaatgacaccgggaatgggcctctctgatgggctgcaggtggggacactagacagatacctaggagaaagtgtgctaacccgccccccactcccccaccgcatcccccaggtgttgcctttccaccctttggggaaaacatcaccaagttcagatgcaagtattgggagagaagagaactctgtactaggaaaatgctacccacgagttt

SEQ ID NO: 3898 - DNA, 6000 bp, Homo sapiens
cccaaagcctggctccttccctcatttaatagttttgagccttttttcctcatgtgtaagacatatgtgtaataatcagaggaccacgaagaaagggatatgagaagtgttgctgtgcattatgtatcagattcttttaatgtccttcaggagatgtaagtaaataatggaatttctttaaactattttctaagctcttgggcatatgctatttgaatacaactttgctcaggcactgatctgtaggttatgggctcaatagggttgcagatggctgtcatttgtcagaattctaaccagagccttgaagttaatgctaccatgccatcattcttctcttgtgccaagaccctcaattcaagccaatacagttgtctctgatgtgttaatgttcatcagaataccactgtgtgccttctgctcccaatgcatatttatttgcttccatctctggcaactttttccattgtgtcttttagaactaccttttctttcatagaatctcggctctgtcttgaacatctttacagtatcctacctctatttcttgttttaacagaaacctacttttctcacaggaacattgcctctcatttagggtctcccaggctgagtataataatgctgtcactctgcaggaaacacaagaggtgattatgacttgctaaaagctcaggtggtcactagcattttttagcaatgaagtattttaaaattaagatatacaatcttagatattaatttaatgctattacacaatgaagaaaccacagtatagtataaacataacttttatatgcactgggaaagtaaaaattccttgtgatttgctttattgtgatagtagttttattagggtggtctggaaccaaacgtgaaatatctttgaggaatgcctgtatccctttaaacctcccctacatgtatccctcaactcaatgttcccttacctgtatttcaaagttcagggaacatatattacttttataaattcttacaaattttataaaaatgtctgattctggaacagattgatagaagctctgaaaattaaatgttcttagctttaataatcttcttgagcatcagcaaagaagacggagagggaggggttaggaaaggaggaaacagaaagagaaatggtggtgaaaagctgaggatggggagagttttaagaaggaagtagccatcactggcatattccacagagaacctaagcaggatacggactgcaaaacatcttggtagatacaaggccacggctgaccccattttacatgggaaaatatttgattagtttgtgtctcctctaccagtccttctagaatagctcctgaaacctacaggaatagaggagatcatgctttttgatggcaaatatgattagctctcttaagatgaaagaagcttcatctggcttcttgctcttgagaacgtgccctaagacgtggtggctcaagcctgtaatcccagcactttgggaggccgaggcgggcggatcacgaggtcaggagatcaagaccatcctggcaaacacggtgaaaccccgtctctactaaaaagtacaaaaaattagctgggcgtggtggcgggtgcctgagtcccagctactcggggggaggctgaggcaggagaactgcgtgaacccgggaggcggagcttgcagtgaaccgagatagcgccactgcactccagcctggaggacagagcaagactccgtctaaaaaaaaaaaagaaagaaaaaaataaaaaagaagaaagaagagaatgtgccctaagaaagtttgggaaacaattctactacaatgaagaccattgtctcatttgatagagagtcctgagagctgctatctacataaataaccccactggttaatgtgtgacaccaagtttttgtggattttgccccacaacaattttacttgaaacatgttgactccctcccccacatattgtgtttttcatctctagaagtctcatttggatctttaaaaaatgctctcatttttatctacctcatgttcacgttttcctctccctcttgaatatatacatcatagctttaatagctagtagtttaatagttatttttaggttttttcttctaatttcatcatttcataatttctaaattagtttctattgtttgattcttctcttggttgttgatcatacattactgggagtttttgattgggtgccagacttttattttatgttgttgcatgctagatttttgtcatattcctttaaatgtttttgggctttgctctagcgcgcagttaagttacatgaaatcagtttgatccttctgaggcttgcttttaagttttattgggcaaattgagtgcaatatttagtctagggctaatttggcgatacccttctgaggactctacccaaagccctgggtattgggacatctttccattctgactggtgggaaaacaaaacattcctagccttgtgtaaggtcaggaaattgtttggtctactgattttttgcttggcctggggcatttttctcttagccatgactagatagtcatagtgcagcggtcaagattggaggggacccctctacatgctctccgtgcagctccctcctctttagtattctttcccacacattctagcttccttggcttccctattctctgaactctgtctcttcaacccagcaataccgtcagtctctgttagggtcacaccatctctgctgcagcatgggaattcatctaggcagtaagtagaattcaccccatttgtttccatttttgcaggggtcaagtctcatgctgcctgttgttcaatgtctgaaaaccactttttttttcatatgttttgtttggtcttctagttgtttaaggtggggctgtaaaccagtctttcttaatccattttggctggaagtgaaggttccccacacgttgatttctgattgagggctaaaagtaatatgtttctccacaagtattcttagaatttattgtttcttaaacatataaactctatgccatgaaaataacttgttttctacctctttccagatctaaacctcccacagtggaataatttttctccttattataagtgatttttttttaaatgaggtagttttcaggaagatctgcaggaaagtagattgaaagagtaagaattcagttatgataacccttggcttcttgaaagaaatatctctaactagttttcactgcagagtagttttttcctgcaagatctacattggtcataaaatgagttgatgaacaaatgcaggcctttcatatgtcgcttagtttatcctgatattgccctcccatgttattgtaatctattaaacacagacaactcatccagccaaatgtggaatcattttcattttatgtgttcactgactatgaaagtactgaaacacactgtatattacaaaccagcagctttctaatcaccattgtaccactgtcactgttatttgtacaagtgattctgcttctggttaactttagggtaagaagcaacagaatgagagattttaaagcagtaatctctgtccaactgcaaacactgcagatgtgtgttttgaaactggaataaacatctctaaagtttgaaatctaaagaattatccatgtaaaacttaaaaaaaatcgaaccattttagaaacatatttaatggaattcaaaccttctgctctggctatttttatacagaaatttcagagtaaaaaatttactaataatatagttttgaaaaaatctaaggcaagaaagagattggaatttcactgaggaatcatgacaaagaaatcttatattgtccagacacaaaaccgtccttcatttatttgtcaaatgcgtattgagggtccactatgtgttaggcacagtggtaagactgggaaaccaaaaccaaccaaccaaccaatcaaccaaccaaccaaccaaccaaccaaccaaccaaccaaccttactttctcaaagagaagtgactgtttttaattttattgtattttgaggtatttatttaatgctaaacagtataccttattttttccttgatttatagaaccatgtaggtgctacagttggaatgtcacctccaaaaatcatgctgaaatttagttgccagtgtaatagtattgagaggtggagtctttaagaggtgatgagattatgaggattctgctctcatgaatggtttaatgccattgctgggggaatgggttatttattttgggagtggtcttgataaaaggctgaagtttggccccatttctttctctctgtctcctgtgttctcttgccatgagatgacttccttcatgagatcatgcagcataaggcctttgccaggtggccttgctattggcaccatgcttttgcacttcccagcctctagaaccatgagccaaacaaacttctattctttataaattacccagtctatcgtattctgttatagcaaaagaaaatggactaagacagtgggacagagggtaatttatcatatgacaaatattgatcttcaaggttctgttttcatctaccactaccatactaaacttgactcctttttgactccctaaaaagacacattttttttccattagccatgcttgttaaaaatttagggctacttttagggttcaaataaaagatggattatataacaactttttttttaagatactaggtttccttgcctattgtttggcatggttctgctgggaaatacggtttctctactggccttagctttcttgtatcctgatatcatctctgatcacccagttttgacctacaatccgtttttccaactttttgtctgcttttccagtttgagccctagctcagttaaattcttttggctcttggatctcctgcatcacttcccagtcaatgatttcctcactcctggcacagaattttccttggatgactgttctgttagtgtgaatcattcccccaccccagccaccaccagtctttggcacaaccatgaggaaatgtagctgtatgcctggagggatctacagccagaccaggtaaatgcctatagcctctttcttccaaaaggagtttggtacttacttttatattgttcatgctcttattttgcaatactacttataaaaagctttgggttatgtatctattagatttatccaagtcctcacaactaggctctgaagagtgcagaatggaacgtcaactcattatccacaatatcatagtttattttggtcagtttagctctaccactttccagccatcagatgccattcaaaagtcaatcttactttgaattcattattttaacattacatctgtttaagtatttgattagttagaacagtgaaaatattcaccagtgtagatatcttactcgttttttaagacctcctaactaataaaatcaatctggagaattaaatcatcaaggacctcatgaggataaatttgcagtgactagtgattattaacactagtcacctgggacaggtgattgactttagttatctaagtaaagaatgtgggacagagaatgacagacataggcacatatcacttgccatgaataacaaagatttgatccctgaccttctagagtgaaatgactctgttgtaatcgtaggttttatcttaaaaatgtatttcagccttatgtaacactctgaaatatatacatgttagtgtcaaatatgtcttaaattatttacaatttagtacaattatcactccaggaaaatgctgcacatttatcctttgatttttttttttgtagccctggcatatcatcaagtatccccaagaaaattagaatcccagtttaagaagctttggcaagcacttgagaacactgattatgaaattagcctgacctaaaagggcattctacataatctctttacattttagtttctttttgtataaaatggagattctggtgaatgaaaatgagatcatatatatcaagcacattaagaacctgttaca

SEQ ID NO: 3899 - DNA, 6000 bp, Homo sapiens
aataaaaatacataaataagtttttttgtgtttaaaaaatactaagggatcatagagtataattactttatgctgtataattatgaaaactttaatgtatgaaaacattataagtgttatacacacttgaaacaatatggaaacattataagtgttatataattgtatatttgactcactttctaaaatgcagagaggttgtatgtgagtttgcttcctgactcttaaaagcctttgcaagttttgccatactacagtgaactatgacatgaataatcaaagtcatattcgagaggcactaaaaattcaatttggactattctgtgacattgctacttggttatctttaaggatttagatttgatagagttacttctactgttaaccatctctttgcttttgttctgcacctaagcaatacatgatactttatcaagaactgcccattcaaagagttgtaattttagattattcttagtttaccttcaacaattttaaagaaagtttaaataaatttaattcatcgttgacagtggtggaggtttgtgtgcactaaaaggggatcaggaggtattttatttttgttttgttttgttttgttttttgagacggagtctcactctgttgcccagtgccctggctggagtgcagtggcactatctcggctcactgcaacctctgacccccaggttcaagcaattctcctgcctcagcctcccgagtagatgggattataggcgcctgccaccgtgcccagctaatttttgtatttttggtagagacggggtttcactatcttggccaggatggtcttgaactcctgaccttgggatccacctgccttagcctcccaaagtgctgggattacaggcgtgagccaccacacactgcaggaggtgtttttttaaaccacgtactgttaatgagaaaacaaggttatgagtatttatgatggacaaaattactagaagttatagacagctttgtataaaattagtgttcttttgcttacactttgtgatctgacagaagcattgataaaagacctataagacccaactatataaaattctcaagatgcagagattaatgagagttataggaacaatctatgggaaagaaaaactttgagttgtttaagactcagtggaacaataattatgaagaatatcgttttaaatttgcttacttttgagtatcataatggtaacgacataaaaatttcctaaatctttatatacaattatgcatatattaattaacacgtgtggtgcacagaaaaagtcatgttaccagttgaactagtggatgctttttttaaaaagtattaattaccaaatgacagctattaataattcgtgattatatacttctaaattataccattaaacacaatatgccttaattatatttacattatactttaaactgtcattacttttggagactgcatctctacattttggatagggtttggccttcttggacaaaatttgctaagcctatagagcagggagaatagctaaaaccttactggctttgccaaatgctttcatatgtttttgctcttacggaaaatgagttttgatttcttttcagcctacatgcatggcaaggcaaaaattgaaaacaaagctagcaactttcaacaagttctagttaagtttggcattcatatattgctctgatctgctctagagctttaatgtagtttattttctagagtaggaaaaactagtttcagcaccaagcatcatcaacaagtaatgatgaagaaaatggaactgagttaggtttaggatataatctagctaattttatttctatttctgaattagaaatgagagtcattccacgtgttttttgtttcttttgaaacaattttgaaacaattttcttttgaaaacaaattttgtttcttttgaaacaaaattagagtttcacaaactctaatcacaggcaaaaatacactccccataatagatacaaccgtccctccttaatagttttctataactgtgttgctcaaacttaatggcagtttttggcctactctcaagcctcaatacctcttcccttcaacccctgacccttttagaagtgtcttagctatagccattggccagagtagggcagtgaaagtgatactgtgttctattggcttacactaatcacaatattctgcacctatgtccattttcatactatttcagattctttgttactcaaactgctgttattcttatgtatattttaacaagtgcctgatcacttccctataaacaaagatacttagatgataaatctcagtttaaaaattagcataacgtctgtaccagaaatatatgaacccactgaataaaataatcttcagtttcttaaggttactaaaattaaaaacatgagtttctacagttggaaaaaacatgtatggttaaaatgtttgaagcccatcaatctctctaaccacataagctaatgagttccttctgttttctttgaatgaaatcaccatgagtggttatatgttgatttaacataaaacaaatggaaatgggtgtttcctttgtcctttgtagaatttattttaaaaaacaattagcaactattatgaataagtcaatgattttgccattacttaaataacaatatagattgagtaattaaattgattggattgcagggaatgcgtaacatactccaactctccttaacttgcacacatctgtagatattattaagcttctcatttcatttttttctaccataacacctgtattgttataaattatgttatgaattgtcagagagtgccaggtaaattatgttttttgaatgtagatatactctatggtgtgtgccttttaagtgttcctttgtaatggcaggtttgtggctaacagcttaatcttgaatctagcaatataattaaacactatttcaattcttctttgtggatatacaaagaaggttgaagtattacctctaaagaataaagaaataattaaaaatctttaatatttaaaacattgtcttacacaagcagtattcttaaatgtaattttaaaacatagcaagtctattatatttttaggagaaaagtgtggaactctttgaactctatagaatacacatcctattgaaataagatttgaaacttctatggggcatttttctagtttgtataattttaattcacttttgataaattcttcccccttccaagcatcctccttttttgtgatattgtctctttaagaatacagtgaagagtgattcacttatgtcctgagcatcaaagaatgtcaaatatatcatgcagatagataatgggtttttccagagattatttctgagagagttaaataaataagtaaatgagccaacatatggccagcttaattcaggcaaaaatgtctattgattacttactaagctcactaaataaaaacttcagcctaagttttgcttcccaaaagaaaataggattagactgatgcatgcactcattggggcttttgtgaatggtgcccagatgagtgaaaaccttcaaagatgaacaaagaagggctaaaatattttggtaaatgcaagttactatcagtttgacttattctcttttgcaatcctgaatgaaataattttatattcctaagaagatcataaaattacctctgaggtctgagaattagataattctgccttcttttcaacgacttgaagtagcctgatttaattttgctaggtagatctgttgtatgtatgtattttgacatatgtaaaaacttaggtacgttataaggttttgcaccagctctgcataagtgtactttatccagactagtttatatcctgcgtggttaatatttgaattatgttatgtaagaaattccagatgtaagtgtgtatgtagtttaaagcaccaatgctctaagttgctccttttatcttttgaaatagtgagaatattaaaacatcaatacatcaggtagaagaaattagattatcaaaggttcttttttaatctgagaattacaatgaaaccaccaaaagaacatgttctagttatttggacacacgtacatttaacctatgatttcctacaagtcaagaacaaacttgaccagtagttggattggatttactttagtactacacctatctggctttctgacaaaatactgataggtatttaggatcttcatgtattttgaacaatctgctgttgacatattaataacattgtttggaatgattcctgaagtatgatgcttgcaacattcctgcagcaccaaaaagtacctattgtttctgaaagcaaagcagcttaagttttatcctactttctaggttttaaatattggagaatcatttttttcttgaaaaaaaggtaaatatgcttatttaattgatggctgcattcattagtagaatcagtggtttacaaatacatctgaaaacatagctgcttccagctcagaaattttgcaataaaaaaaaaatccatgtttgaattttgtggcatgcacaggacacttaactggcttttaaacgtttttccagcgtgattcgccctgtcctgctctgttcctttcagcttaggtccatcgtaggctctgcctggctgtttgctgacattgccaaccgagaggggcaaggaagtgtgttcagaggacaagagcaaaggcagtttcaatgtaaggaaatgagggaaacagacctaacagctctgtgactatacttgagagtaaagagccttgtagtctcctttccttcctttgcttatcctggtgagtttaatcaaaaacaaacaaaacgctcttgtgaaatatagtcaataaagtcaaagtttagctggctctacgtaactacaaagaaaaaaatcatcgcaatttaaaaaaatgtaactttcattaacgagcgcgccggaaatctcaggtatcaaagacgcattaaccctggagcgtcccccgcgcgccgcagccggacggaggcagccgcggcgaacagacgttctttctcctccatgcagttacacaaaaggagggctacggaaactaaaagtttcggggcctctggctcggtgcgtggagaaaagagaaaacctggagacggggtgggtgaaagacgcatcccgggcgcctctccgaagtccaggccgggagcaagctcctgggcctagaggggagggggccccgagccgctggtcatccccctgcgctcagcctcggagcgccgcgcttcgcggcgctctcccaaatactcttcacccactccagaaataaaataaatgtttttaaagtgcatgtgtgtggacaggatggagagcgcgcgccggcggagcgcgcggaggacccagcgcgcagtgagtggagtttgggggtgggctaggggttagcggttgaatgggtgtgttaatggggggagctggaggcagagctcggggacctgggggtagggggagcgcgaaccgactgggaggggagagaaggggaggggcgcgagctggcgcaggccgcctccggggcgcgttccacggccgtgcgcgcgcgtccctcgccgccaccgccgcccggacagccctgcggccgccccgccggcggagccggggccggcctggtcctcgggcggctgcttggccaccgccaccgccgtccgaagggctcgagcccgtaagtatcccctttcgctcctcctccccgccgcttgggcgcacagccgcagcagctgctcaaatggagtggaaaacggccattgggcgacaatgagttatagattatctgctccacgttttgtacttagctgcctgtaatcttcttttgagtttgcccgagccccttgctggaaaactcaggagggagagatttgtcctttgacgctgtacacgctagtatgtttatatgattagcccaactggcggggagggcggatttgggggaaggaggaggaggaggctggaggtgactccagttcagacctcgcggagagtctgtgtcagga

SEQ ID NO: 3900 - DNA, 6000 bp, Homo sapiens
aggcagtgcaaggagtgcttctccctgctgtgcacaggacacacaggcagtgccattgtgggcagagctggctccagagccagtcggcctgtgttcgtgtatcagctttgccgctagtagctgtgtgaccttgaacaagttacttaacctttctggccctcggttatttgaaatggagataatgaccgtacttaggtcataagttggttgtgaggattaatgtaattaatttgatacttggaaacagctggtggcatggaaggtgttggccttgatttaagggaacgctgagattgggtgacttgctcctggtctcatcacacccggtttagaggtgaggctgggcctagaacctggtctctcccccactgagcgagttccttttctgagctgcagcaagtacttttctccccaggcattaaggggaagacacagaagagctgggggaactggagggggttgagttctgagatggggtgctccagaaaaccattgcacctgtatgggcctgggcagaatggctccgcctccgcccagctgctggtaaaagaggatcctggctaggcggcttccctgttggcctgtcagccaaggtctttacacatcctgctccctgggatgctcactgtctctgctctatgctcctgacccctcccttcaggctcctgtgtcttctcaggacaccccctgctccccttccctgtgggcctttccttcctagatgcccaggccctgctccttgtcctccagggccatgcccactggctctgccagcagccataggcaggccccactccttccccgctgcatcttcctgcccagaacttgccagacttgacttctctctgctgctgctaggggtggggggaaggggagggacgggcttgggggaggggagagaagtctttgtccaggaggatggtggggggggttgggagggggggggttagagcaggcgaacaacagtttccatggaaacaagagccagtcactaggcacaggagctgagaacctatctctagaatctgggaatggggagggagagaagggtggattttcccatctgatgttggagttttcagctcctctgttgaattcttgtctgctctcagggctcagtttcccactctcagcatgtcccaggtgcacagaggtccttagtctggaccgcagggctcaaggtgggagtcctctgccccattcctgggggctccccagcttctctctcatactcttccataacccagacaaatctaagtggaagcctggtcccatccccagggagggaaactgatctcagtgcctgagagggacaaaagcaccagtgggaaggagggaggagggaggctcccagccctcccgctgtcctgcaggcccatctgcttgtgcacatttaccctcttgggggccaggacacccccaggtgtgcttggtagtgtgacatcgaaggctcccgggatccgggccttacaaccaagtgtcccagcaggcctgtgcttatgaaacccaaatggggtagggaaggtgctggggactccgaggaacttgcaggggagcagtgcgtggagctgtggcgagagcggctcagtgagccaaacagggtgcccatgaagggctggggaccataggtctcagagaagatggcacacgagaggaagtggggatgcctgggaggtttggggagtattacgagggtcacgggaggccatgggagctatcactgggttgtggggggtctcagttcccctcctgtcctcaggtacttggtactcacctgcctttcctcttgtccaggtgagcactgtgaggtgagtgctcgctcaggccgttgcaccccgggtgtctgcaagaatgggggcacctgtgtcaacctgctggtgggcggtttcaagtgcgattgcccatctggagacttcgagaagccctactgccaggtgaccacgcgcagcttccccgcccactccttcatcacctttcgcggcctgcgccagcgtttccacttcaccctggccctctcgtgagtggctgggcactgggggtggggagtgggcctggtgggcatctgaggtgcctcctgttctgtggttgaagtaagaggtcaggcagtgaaagcgtggagcaggctgccggcagagccaggtctgctcttggagttgcctgtggttctgccagcagatctccctcccctgcgctggttaggtggcgggggtgctggcatccaggtgggtaccccattccctgcccccatccccaactcctgttcaggtttgccacaaaggagcgcgacgggttgctgttgtacaatgggcgtttcaatgagaagcatgactttgtggccctcgaggtgatccaggagcaggtccagctcaccttctctgcaggtgatcacagttgccccccatccttgcccatcttccaaaggccccaagtcttccagcccctgaccccaagccacatactctatcagccaaatctgggcccagccccagccactggcaccccaaaccctgccattcctagccctcgtcaggcattccagctcacctggtcctttccccaggggagtcaaccaccacggtgtccccattcgtgcccggaggagtcagtgatggccagtggcatacggtgcagctgaaatactacaataaggtgggtgtggagggcacagagggttgggggttctgttcttgcctcaggtgcttacccagccctgagtggcattgcctccaggcttgggtgggctggtcagggcatttctggctgagaggaagggagcggctgggaaggtgccaccttgctgggcattcccaccccactgggcactgctcgatgctctctgttccactaggcagccgcaaacttggacactgaggaaggtagttacatgcataaaccacgtgagcacacgtgtgtgtatatgcatgtgtgtacgtgtgtctgggcatgtgggtgcacacagaggcacccagtgtgtgctggccatgaacctagtgggctctgtactcagtgtcccccttctctgctctttcctgtccacagccactgttgggtcagacagggctcccacagggcccatcagagcagaaggtggctgtggtgaccgtggatggctgtgacacaggagtggccttgcgcttcggatctgtcctgggcaactactcctgtgctgcccagggcacccagggtggcagcaagaagtgagcaggggaaagggccagggatggggtgaagtgagggcagggccaggcagggagggaaggtggagagggtgggcttttggggtctctctccctttgcctctcttagcccctgctcagccctggggatggggtcaagactggggaatcagagcaaggccctgtggggcagtctggggagggggctgagtgttcgacaagaacagttccaggtaggggtgacgcccttcctgagcactgctctgcagggcctcttggacacctgcctacgccgttcgtgtctctggcctggcggcagagcgagcggaggaccagaagctcccagccctcccttgtgccgccaccatctttgctcccccaggtctctggatctgacggggcccctgctactaggcggggtgcctgacctgcccgagagcttcccagtccgaatgcggcagttcgtgggctgcatgcggaacctgcaggtggacagccggcacatagacatggctgacttcattgccaacaatggcaccgtgcctggtatgggggcccggggtggagccaggctgggatcccagtgctgagaggaggggctgtgcctggtgtgaggatgccagaatggagggtctcagaggcctctctaactgctgccacaggctttctctttagagccccagctcaggtccactgagctgccttctctccattccaggctgccctgccaagaagaacgtgtgtgacagcaacacttgccacaatgggggcacttgcgtgaaccagtgggacgcgttcagctgcgagtgccccctgggctttgggggcaagagctgcgcccagggtaggaggggcggctgttagaggccacagcctgggtgccatcaacagtctgggaactggcagggttggggcaggcactgggcagggctctgctgagcggggctgtgggtggaaaagcgtgtctgggcagagccctgaaagggcaacacaggagacaaaggggccagtcagaggcaggcctgggcacagcgtggggcggtcccagggcaggtacgcactttggagggcggggctgatgaggggagtgggctctgcctcccgtgcagccgccaccgctgagcatcacagccccagggccctctgaggctccacccgtcacagtctgccttttcctgcctccccagaaatggccaatccacagcacttcctgggcagcagcctggtggcctggcatggcctctcgctgcccatctcccaaccctggtacctcagcctcatgttccgcacgcgccaggccgacggtgtcctgctgcaggccatcaccagggggcgcagcaccatcaccctacaggtgatgcatggaagggcggctggccctggcctggccatagggccctggtagcctctaggcggctggacagaagtggctgggcaggtcctgggcaggggtggggacatatagaggccgctggatccgttgggaaggtcaatgctgccacctgttgggcctgagggaaataaatacgctttcctctctatggcctcagctgggcagcgggatgggtttgatggtccagaaaggggaactgtgagctggagaacagtgattaaggccgtctgctgaccctgttttctttcctcctggtgtcagctacgagagggccacgtgatgctgagcgtggagggcacagggcttcaggcctcctctctccgtctggagccaggccgggccaatgacggtgactggcaccatgcacagctggcactgggagccagcggggggcccggccatgccattctgtccttcgattatgggcagcagagagcagagggcaacctgggcccccggctgcatggtctgcacctgagcaacataacagtgggcggaatacctgggccagccggcggtgtggcccgtggctttcggggctgtttgcaggtgagtgtcctgccctgccctcccatcccctcccccaccacctgcagccccgctccactgagggcaacactgctcctgtccctcccagggtgtgcgggtgagcgatacgccggagggggttaacagcctggatcccagccatggggagagcatcaacgtggagcaaggctgtagcctgcctgacccttgtgactcaaacccgtgtcctgctaacagctattgcagcaacgactgggacagctattcctgcagctgtgatccaggtatgctaaggatccagggcaacgggcaggttatcaggtgcctggggccacatgctggctctgctgtgtgacctggggcatggggcatcacaccacctctctgagtcttagttgcctacacaacaaagccatagccagctgataggatgctatgtggaaagaaacagatgaagggtttgatggaagatggtgccaggggagggtgggggaatgagcctctctggtccttctggtcccaggttactatggtgacaactgtactaatgtgtgtgacctgaacccgtgtgagcaccagtctgtgtgtacccgcaagcccagtgccccccatggctatacctgcgagtgtcccccaaattaccttgggccatactgtgagaccaggtaagcagaccagggcatgtggcagcaggtcccagtggctgctgcttctctctggtgtgtccctcagagccccgaaagcctggctgatccacagccagggtcagaagggccacatagggctcacctaggttaggtgggagtggcagggggagctcatgcctacctgggtccctctctgcaggattgaccagccttgtccccgtggctggtggggacatcccacatgtggcccatgcaa

SEQ ID NO: 3901 - DNA, 6000 bp, Homo sapiens
gcttttctaaggaactgccatttccatagcctgtggaataagtatccaggattgattttccatgtggactgtctcgcatactccctgagagagagacagcaggtaactcactctgcttcctccaagttacaccatcacctccaccccaatcatatcatagatttcctggactcatcctctcccttcctcccaagcagggcataaaaaaccagaacacaaatgttttcttttcaaataaggtgtagacaggcaaggaactgaaacgcgggcccagccaagcctgaggagacataaggtaggaaagacaaaatatgtaaggagtcaatgaggcattaagactcaagctgagtccatggaaaacagcagctctcccatgggtgggagagttatgtctatggctacatcagaaccgtgtgctgggcccgtgcgagtcctcagatatttgggactctggctgtggctgctgatgtctttgccacacccggcccagtctgtgctgttgatcctctatacaggttgtcaatcctctacataggttgccaatcctctacctaggttgccatggaggacagatgctatatattcagtggcagagacatccactagcatgagagaaagcatcttttcctttgcacaaacactttgagggtggcaaagtgaagacggagtcccaggcctcctccttgggaaagactagaggcttggggtttcactggaacactaaactcacctgccacaaaggaacagtgttctttacatagatgatagattgtggccccttacatctatcatctttcgtaaggtgctgtcaaagtgcctaattcttggctctatcaggttttactgttccttccctatctgatcttagggcagtgggtgaataggctgagaaggcccttagagctaggggagctggctcagaatatcaagcagacaggagggtaagagggaatggggacagagaaggaacactctgataacccagaaattaaaaagaaaaagagggagaaaagaaagaaggaaacagggcaggaggagagaggaaagaaggaagagaggcaggaagaaggaaggaaaagaagaggcggagggagggaggaaggaaggaaggaaggaaggaagaaatggagggagggagggaaggaaggagaggcattaaagcaatgatctttgaccaaggccaagcttcagtgccaagaactcaacttagatgactaggtatgggcagatttatttattcattaatccatcaatttgttttaacaaatactataatacaggtgtggcgtataagcacaagataaggcatgatgaatgacactgctccattttcctgatgttagtacctgttccctgctgtgtaagactattcatggccaagttggaatgctataagataagggctctccccagatctgactgtgtgtgttgccctttcttccagaccccagtccggtgccctcctcctccagcacctaccacgccatcatcggtgggatcgtggctttcattgtcttcctgctgctcatcatgctcatcttccttggccactacttgatccggcacaaaggtcagaggcacaaagagagcatcagcagaacttgggaggggcagggagaccaatcagaggcaggcacgaggagaagcagacagtggaaagggccttcagagacttgtcagccctttggagtgtttagggaattaaaaatggagccaaccctatcattgccaaccctgtgataactgagcaccaccaaccccgcagtaaagcctgatcacttggggatcgtccaagtgaaatcaaaccttcccactcagtcagcggttgctcccatgctgctctacctccaggtctcctgctgcaagacagagagctcctgaaactgcatctccatctcattgcttcctgcgctttcttcctttctgtctgtttaacctcattttctttctcctttgatctcattgcctttctttcctctcccccttttctaccttctctcttatatccatgccttctctctaccctcttctcacattccttcctctcagacttcctgctctgctattaattctagccagcggcctgactccataggctggtcatacataagccagatctcaattgctttgctcatgaagctgacatagcagatcccccgtcaccaagttgcgtgcacacgcatgcatacacacacacacgcatgcgtgcaagcacacacacacacacacacacacacacacacacacacttctctttcttgctttgtattatagatgagattctacttaggggtaggattcattattcatgaagggtgtggtcaggtgaggcatgttggaagcaaaatgcgaattaggtaaggtggagtagaagagagctattggcaagagaaaaattacttgagcagtgtgtgagtgggtgggtgagaaagtgggcagggtggactcagaggttgggaagctgctcctgagaggagaagcctctgtctctacacaggaacctacctgacacatgaggcaaaaggctccgacgatgctccagacgcggacacggccatcatcaatgcagaaggcgggcagtcaggaggggacgacaagaaggaatatttcatctagaggcgcctgcccacttcctgcgccccccaggggccctgtggggactgctggggccgtcaccaacccggacttgtacagagcaaccgcagggccgcccctcccgcttgctccccagcccacccacccccctgtacagaatgtctgctttgggtgcggttttgtactcggtttggaatggggagggaggagggcggggggaggggagggttgccctcagccctttccgtggcttctctgcatttgggttattattatttttgtaacaatcccaaatcaaatctgtctccaggctggagaggcaggagccctggggtgagaaaagcaaaaaacaaacaaaaaacaaaaccctggagtgttaggaggagagtgaaggtagaggggtgaggaagggtaaggggcagggctggtttcagctgggggctctcaccagccctcctttcagcctctacaacagagcagcttcccagacttctccaggaacccagaaacgggatggttgtcggcaaaggttgggagtggcttttcctctggtagccacacacctgagcactacggacagggaggcaggtgccaccttgacacctctcttccatagcaatgggaaagtgatgagtgcgggagtcctgaggagatgtggcctgcagacaacatgcagccatgcagggacccaggactgtaacctggggaggacgcgggtccctgcaaggaagagtagatttggagaggaaggatggaggtggactctcaccccattccccccggaaatgaacaaagccgggccctttccataggaactgcccttggagatagcagagtgtggctgcccctccttgctccagcagcagtgggagaggcactgctctggggcctgaactgcctctgcttccccccctgaggggcccctcactcttacccaagactctggattgttgcacggcaaccactcctcccatggcattgctcagcaactacttctcccttcccggccaccctgtgcccccttcctggtcccaacgccagcccttcatccttcctccctcagcagccaggcagacataacaacaaaactactaaaaggagcttcactgcagtgagctgtttcctgcccaaactaagggaataatgtgaactgtgtgcatgtgtgtggtgtgtatgcatgtgtgcatgtgtgtgtgtgtgtgtgcatgtgtgtgagtgagtgagaggcagagcgaggaactgaggaggagggctaagagccaggggtcctgggcaagtggacagggctgtgggacatgttggggaggctttgggaatggggtattcctagtcagggttcacacctcacctgggatgttgttccatgctggtatttcctctgccacccccaatgcccatcggtcttggagaaaggagtccccgggtgtgtgtttgcccagctgtccattctatctctcccttaaacacagagcattcagcccttccctggatttccctcctctgagccatggagtcagtgccacagcctttgctatgcacctctcaggcctctccttggcgttgaccctggaaagacctaccaccacctattttttcccatagtctgtacccagtgagttgaaggctgggtccccacccttccttttgatttcctgtcttccttctcgtggccccagctggttgctgtggagatgaggttcctggtcctccctgtcctggctggactgccccgcctcagatccaggatgcccttggcatcgctcccaccctcccccagcttttcctccctggtctgacaatgggcatgcaaaaaggggcagctgcaatctagcaggcctgcccacccccttcagttcaggtaatacagttgtgaatcttccagccgctggttagggccttgggcaccacaggcagcccctcacctaagccggggcctactcctcttacaacagcaagagagccctggggccccaggcctgttgagcttcttgtctcccagcacccgcttttgggaaaatgacttttcctcttcaagctgaaccactctgtccatattacacagaagccatatttgtacgggggggtgggagggagaggggctgttgtgctgtgtgtgtctgtccaggggtgggggggtgggggaagggagcagggaggggaccgtgtatctttataatctttctaactctcctgtgctaatctcagaggggtcaccctcaatatatctggattatccgtgtcattcagctgcctcctttctggtcctcttgctgctgctgggatgtgtgtatgtgagggtcttcttcccataccccttgcacctggtgcctggtgcctcaaaaggtggtgtgtcccttgccaggccactctcaagaatatctatgtacagcaacaatataactctacaagggagagaagtgtgttcacttccttttgctaagcccttcctttccagagagtgtcttggggggcatctgactgcttccccccaccctctgccaggcattgctggagaatgttaagacggcgatggagatgccatcaaccccaccctgcagagcatcaccagacaccaccagaccaaattcactttccagccccttcatgttgaacctgaaacttgagctagtgtcttgggagaaaagggggaaatctctacgaggtacccatccttctgcaccttaggtctgaggtgcttggccccctaggaagccctacatgaatgggacagaaggtccttaacaacactggagatgaagcagccgatgctgttttggacaaatgaaacagcgtcccctaaccagccctttctatctcattgttctgacttggacacgccatggctcaccgctcccaaagtccccactatgtctccctagctgaggaaataaaagcagagaggggtgatgaaacagtgacgatcctggggaaacagctgaggaggggagggagggggaagaagccactaaaaaagtgaaatgtgcttgggagaatcggcctgcctgcagggtagatgccctttctctctgctggccagctctgcccctcagtgagaaactttacatattgctaagatgcctggccaatgaaacagttccagagactttatgtcccccagtagaaatatgaatagaaatcaccctgtgggcaatggtcccattttaaaatatgctgtcccattgtcccctagagcctactttaacttgtcagaccatgtattccacttcatatgcaagaggcatgcactgagcccataggtggctaggcaaacacccaatagctccctgaaatggcttcattatgcagcctcgacagccaccccaaccctcccactctcacactgaaacacccagacctagagatagctagacacacccagacacccgccaagcccctcacatacag

SEQ ID NO: 3902 - DNA, 6000 bp, Homo sapiens
cagatgttagcattttacaatttaaggaacttaaaatagccttcaaactttttgccagtttctctgatatccaatctattcttttactctgcctcccaagctttctttctagaatgctaacctgatcggcttaagtacttgaactacctcttctcctccattaactacagagtaaattctggtcttcagagtaacaagaaacaccctttagttctcagcatattcgtgcaccttcatttatctctccttctctctcaaagctgcagtaggggtgaaaacgtgtgatacattttctcttccatcataagggtcgcaaccaaaactcctatagtaaaagacaggttaataagagcaaaacctaacaaatttatttaatcaaagttttacatgacatgggagtcttcagaaatgaagacccaaagacccaggggaaactgtctgttttttttgctgaggttcgatgaagaatggatagcatgtagccatgtagattagacaaaaggatatgatctagtggtaaaggactcagggggaaacacagcaaggcctgtctattcagattcttcttgatctctctctctctatgtatagcattctttcctcctgagtatggggcaggactcttcttcaatgagggtcttcaagggagaagggagaaagtggcctttttagattttatggcttgcttcggggaagaggagttctagtttctatgacccatcttggggaagaggaattctggtttctgtgacttgctttcatgaagaaagaggagtaagaggcaggagggcaggagatggtcagaaagagacttggctgcttctgagggcttccgctctcctttagttccaagtacttcttagcataccaaagcactatactttggcatatggttttctgagctctaacactgcaatcatgctaaactcctctatgaccttcaaacattccacttgcttttattctttatggttgtgatggcatagaggtcaatagcaaagaccctggagtcccactgtctgagctggcataacattactaccacttaatcaatgtgtaagctcaggtaagtacttaagtcctctatgcttcatctgtaaaatgagaatcattgaagaacattctctcaggatggatcatgaggaataagtgaattaactggcatatagtgcttaaaccagtgccttgctcagttagtgacagataaaatcatctgttattactgtgcccactattgtgatgctcttctcttctttgtacaacgactacatctctatttatcattttagggtctccttgtgaaaaaccactccagattcaaaagattgagtttaatctctatcctctgtgctttcctggagttttgtaaagtaaatcttcacttgacatcatggataggttcttggaaactacaacttcaagtgaaaggacataactaaaccaatttttttctcatcaacgttataatgaaatggcattgatgaaatgatggcattcaaggacctgctgtaccttgtttcacttaaagtcactgtttccaataatctattgatgacattgaggacttactatataataataaatatatatataatcgacgaaacaggaatcaaactgctaactctgctaactggtctccctgcttccacactctgcccactcatctcagtctttctttcacaagagtcagaatgatcagatgagacccctcctctgcttctgtttcttccatggatttccactgcactctgataaagtccagcctcttgaccacagcctacaaatccttgcacgatctatcgtttacttttccatctccttttatgctactttcatcttgttctcaattctctagctatgctggccccttcttgttctttcccatttttttttaatttttaaaatttgtatatatttatgggttataagtgaaatctttttagatgcataggttgtatagtgataaaatcagggcttttagggtattcatcacctgaatgatgtacattgtaccccttaagtaatttctcaccatccgctgacttcttgccccctgggtattcatcacctgaatgatgtgcattgtaccccttaagtaatttctcaccatccgctgacttcttgccccctgggtattcatcacctgaatgatgtgcattgtaccccttaagtaatttctcaccatccgctgacttcttgccccctcatccttctgaggctccattgtccatcattccacactctacatctatgtgtacacattatttagctcctacttataagtgataacatgcaatatttgtctttctgtgtctgtcttgttttacttatgataatggcccccagttctatctaggctgctgcaaaaggcatgatttcattcttttttatggctatgttctttcccaatttagataaagaacactcgcacttgctcttacttctatttggaatactaattcctaggcttcttgcattgctttctccttctcacccatcaaatctcattttagataccacctcttcaaagagggctttcctgaccaccttggctgaattagcccttcaccatctgattactctctagcacatcacctgcccattttattcatggtacaggtcaaaatctggaatcacctgatttgtttattttctgactccttctactgagatgaaaactctactagagcggagattttatctgcttgtatcaggtactgcttcaaacagcacctgatacagagtaggtggtcaaaagatatttcttaaacaaatgaacaaataaaaagtagatcttttgagagtaaagctcttccacactaccagagtcattcaggaatgacaaatcatagaataacagaatttgatgctttgtgcatatcagagaaagaaggtggaaggttgtcaaggtatcatgatgtaccagtcctcgcctcctcaaacacaatctgcaagtcccacagtgaaaaagtaagttaactcatgtgaagcgttttacaaacacttttttaaaagtcttaaaactcctaagaaagcaagatttaatagtcaaagaagtgagtaaacatgaaatgcctgaacagagtaatgagctaagcacaaagttagagacatgttagttaatatgtcttgaaagcagcagctcctgctttcaaggagcaagaacaaattgggcaagtgaacactccttgaataaaatgtgtaaaattaattttgggttatgttctatactgtgtataatagaatgataaaaattatttgactagcactttgtagtttagaaatatctctatttacacagtttaccttatttgataagactgttgagtgatgggatagcatggtggacaatccacataactgagtatcgagacacctgtatctggacccagctctgttagtaagaagctgtaacctcagcaagtcactttctctttctgggtctctatttcctttttggtgaaatgagagtgttaggctagattgcctttgaagtcccattttgtctttaaagtcccatctattgcagtgatttatatttaactcatgacaaatcaggcttctcttattctaagtgcaagacataaaacttttattgtggaatttcaggcatcagtaaatctttttgggtactcacttatgttcctgaaatcaatctatttgagtgatcactcttttaggtgcccaggtaaacaaagaaggccatggtctttctttgagtgaccttctttcccttttaattagtctgacctctttaatgtcagttctgactgattcatttccctggtccatcttccttggtctgagggccttcctagtttcatattgcacttcagttccttccacaccaccatcaaggatggctgtcaacattcatttgttctatgttataattcaaggaaaagttgcccagtagctaatccaataaatgccctcttatgggcggctagagactttttcctataatttaaatgcatcttctgtagattatggtccctccaccactttacatttgtctgctgtctccttgctctgctagtcatggaacgtgttggtagtgggggcagtgtgggatgttcaagggcacgtattgggtagggccacatatgggcattgctttgtgccattctttctatatttttggtattttgcatctcactggaacccaactatttttcatctcttccacctaaactatttgatgcctctgtttcttatatataaagtatagctcactgtagcctatgatcaggaacctatctgctttctaaatgaaagctgttttggtcagatctagcaattaattcccttcttccacttatagctttcctctgtaactctggtgtaggtatttggtttatggctataagatgtgaaacacctgaatgattctgtccatgcaggcatttcagttcatgatattgtatgtaaaagatactgattgtctaggtgttcagaaacacctatagggcttaatattcttacaatcagtttgaaggctggtgatacgcaaagcaaactacatatttttctgcctgctctctctctttctctctacatctctctttctttatcttttgaaatatcagtttggagacttagaattacataagacataaacccatttgatataagaattgctgtgtatatttgctcatctactccctcctttggtcctcgagctgccggtttagactttttacaggacgcaggcatgtgaaggagaaactgtcagtgctaggctgaattctgttgttaccaagatttctagaaaagtattcctcagtcaggttgattacagatatagcaaatctatttttcctagggtagtttctgtatgctgccgggcttataactgtctgtcatccagctatttctctccaccttcttgtttgcataacaaccaaggcaacttccgcaaatcactgcgtggagacgatgatcctgccagctcccttttggaaatcgtgaggatcagatcttggaccatgtataatatgatgcttctaatccaaaagaggaaaggcattgggagtcagctcctaagtaagctccagaattcctgctggtacttttccttccaggaagcaacttccttgatattttttttttacaggcatatgaataaaaactatattttgcagcattgtacactttttttccttttctagaaattctaaacctctgacattggtggagacattgagtacattttttcccatatccctacttttcagaaggattttctctgctcgttcacttaacattgctgatgcgtcagtcttttcttcctcatctctttcaggggctggagaggcagagggagacagaggagctggtactgcagagcggtcgtctgattggctggacggtcgtagctgggctataaaagagacccctacaggcttagcaggaagacgctcagaggattctgacaatatctttaccggagaagaggcaaagtacgctcaaagccgaagccacagctcctcctgccgcatttctttcctgcttgcgaattccaagctgttaaataagatgtgcaaagggcttgcaggtctgccggcttcttgcttgaggaggtaagattgctttcagccattaaccatattaaacttttggctagactttctcagttatttacatgttgtacttactaacctagttctgtgcaattagaaacagtgtggtcaggagagcacgactttctaactttcctccaagactagctagatattgtgacttaagacatgtgctccccaaatttcagcccttatgtgttgttttgtgtgacctcagttttgagaactgttctattctttaagccaggtctaagaaagctagttttaattaagaagcgagatgaggtttgaggctatgtacagtgatctgtaatatctccatctgtgattactactgctatttgagcatccctggagtacatagaagcctggctctgggctttctgattgtatgctacaacttgtttcaggaaaggta

SEQ ID NO: 3903 - DNA, 6000 bp, Homo sapiens
ccagaaagccagatgaaaagctatgcagtacttcaatgtatggggcagtgaaaattcagatcaggatgcttactgttggaccagaaggaacataaggagatgttttgaaggaagtaagaaacaggaggtagtatcagtaactcattggatatagaggagtagagtagaacctgctgaactttaaatagagatttggaagttctctgaagaaggcagagaaaagcagagagcagggaactgagtcttaatccctggctcaaccatagtagccagggaacaaacacagacaagagaaaaaaagaaaataaacaaaagaggtaggaatagtcagggaggtaataggaagagcatcaaaacaaagcatggttggtgctgtgatcccaaggaagcagagtttgaagaagctggggcaggggagcactgagtgggtcagtgagataagtgccacaaagggctggaagaaaatgctaagtgtgattggtgacctcattgagctcctgattttgaagtctaattatccttgttagttaccagcagagggcaatctaaacatatactatttctgcttaaagaaggggctctttggcaatagattattctgttccatttcaggtgtttaacggagaaactctgggaaaccagattgcaccaagagtaagacattaggaatggaacagttggtgtacagcggagagagcagggaatccaaaataagatctgagtttcagtactgactttatcactcatgcaacctttagcatatccttaatgtgtgtggtttttttgtttgtttgtttttttgaaacagtatctcgctccgttgcccaggttggctcaatgcagcagcacgatcatgactcactgcagcttcaacctcctgggttcaagcactcctcccacctcagcctcccaagtagttggcactacacgcctgcacccctctgcccagctaattttttattttttatagagacagggtcttactatgttgcccaggctagtctcaaactcctagcctgaagaagtcttccctccttggcctcccaaagtgctgggattacaggcaagagccaccacactcagccacctgattttattgttggtatttatagtggtaaatggtttatgttgggctgaaatgtgcttcactgtaatttcactataactttaacaatttgatcctatttgggctctctcacataacttataatgagtctcctccctcttctgcattgtatgttgtcaactctttgaagagaaataactgttatgcctctccttaggtcttctcttctgctggctaactcttttggtttctcatgtatgcctcaagtggtgttttatcttatcctcatcatccttatcacaatttcttatatttgttttttgggggttggttgtttttttttggagacatggtctcagtctgtcacctaggctggagtgcagtggtgtgatcataccttactgcagccttgaactcctgggctgaaatgatcctccttcctcagcttcctgagtagctggggctacaggtttgcactatcatacctggctttttttttttttttttttttttaagacagggtctcactgtgatgctcagactggtctcaaactgccgggctaaggcgatcctcttatgtcagcctcccaaggagctgggattacaggaaccagccagtttcttaagtttgtttaatgcttttttcatccatgttctcacttgatatgcatactgtctccatgaggtgaaagtggtattcagtgaaatcggtgttaccattcctgccttacagagatggaaacgggcactcaaagggttaaatagatgcatcataaaatcaaagtcaggtggccaggtgcagtgactcacacctgtaaacctaacactttgggaggccaaggcgggcagattacctgaggtcaggagtttgagaccagcctggccaacatggtgaaagcccatctctactaaaaatacaaaacttcgccaagcgtggtggcacatgcctgtaatcccagctactcaggaggctgaggcaggagaattgcttgagcctgggaaacggaggttgcagtgagctgagattatgccactgcactccagcctggcgacagagcgagactctgtctcaaaaaaaaaaaaaaaaatcaaagtcagtactcaaacccagatcactaccttctgcgttgcacataccctgccattgttcttgttaccttcctctggttgtgatctagtttcttagtgtttttccaatagtatctgaaattgaataggaaactctagaataatccgtctggtacagcagatagtccctgtttaggatgtatgtttaatgatggtaagactggaaatgtgtctaatactgtgaaagtgtttatatttgggtaatggactaagtgctttttgtcccccttgttaccactagatccaaggctcgtgacactaaggtattgatagaagacacagatgatgaagctaacacttgaattttctgaagtctagcttaacatctttggttttcctactctacaatcctttcctcgaccaacgcaacctctagtacctttccagccgaaaacaggagaaaacacataacacattttccgagctcttccggatcggatcctatggactccaaacaagctcactgtgtttcttttcttttcttctggtttaattttaattttctattttcaaaacaaatatttacttcatttgccaatcagaggatgttttaagaaacaaaacatagtatcttatggattgtttacaatcacaaggacatagatacctatcaggatgaagaacaggcattgcaaggaccctctgatgggacggtactgagatatctcggcttccgctcagcccggttttgactggttgaaaccggacattggtttttaaattttttgtcagtttatgtggagaatttttttctttccttcatacccagcgcaaaggcactggccgcacttgcaggaaaagtgcaacttaaagcagtaccttcattcatgaagctactttttaatttgatgtaacttttcttattttgggaagggttgctgggtgggtgggaaatatgatgtatttgttacacatagttttctcattatttatgaaacttaaccatacagaatgatataactcctgtgcaatgaaggtgataacagtaaaagaaggcaggggaaacttacgttggatgacatttatgagggtcagtcccacatacctctttcaggagacaacttgcaccagtttgaccttttcttttctttgtttttattttaagccaaagtttcattgctaacttcttaagttgctgctgctttagagtcctgagcatatctctcataacaaggaatcccacacttcacaccaccggctgaatttcatggaagaggttctgataatttttttaactttttaaggaacagatgtggaatacactggcccatatttcaaccttaacagctgaagctatgccttattatgcatccacatgtatggtccctgtagcgtgacctttactagctctgaatcagaagacagagctatttcagaggctctgtgtgccctcactagatagtttttcttctgggttcaaccactttagccagaatttgatcaaattaaaagtctgtcatggggaaactatatttttgagcacatggaacaaattatacttcctcattcatattatgttgatacaaaagaccttggcagccatttctcccagcagttttaaaggatgaacattggatttcatgccatcccatagaaaacctgttttaaaattttagggatctttacttggtcatacatgaaaagtacactgcttagaaattatagactattatgatctgtccacagtgcccattgtcacttctttgtctcatttcttccctttgttccttagtcatccaaataagcctgaaaaccataagagatattactttattgaatatggttggcattaaatttagcatttcattatctaacaaaattaatataaattccaggacatggtaaaatgtgttttaataacccccagacccaaatgaaaatttcaaagtcaataccagcagattcatgaaagtaaatttagtcctataattttcagcttaattataaacaaaggaacaaataagtggaagggcagctattaccattcgcttagtcaaaacattcggttactgccctttaatacactcctatcatcagcacttccaccatgtattacaagtcttgacccatccctgtcgtaactccagtaaaagttactgttactagaaaatttttatcaattaactgacaaatagtttctttttaaagtagtttcttccatctttattctgactagcttccaaaatgtgttccctttttgaatcgaggtttttttgttttgttttgttttctgaaaaaatcatacaactttgtgcttctattgcttttttgtgttttgttaagcatgtcccttggcccaaatggaagaggaaatgtttaattaatgctttttagtttaaataaattgaatcatttataataatcagtgttaacaatttagtgacccttggtaggttaaaggttgcattatttatacttgagatttttttcccctaactattctgttttttgtactttaaaactatgggggaaatatcactggtctgtcaagaaacagcagtaattattactgagttaaattgaaaagtccagtggaccaggcatttcttatataaataaaattggtggtactaatgtgtatccagagacatttgaattattaactttattctttattagtgaatctctatgatggcacacataaaatcttacagttgacttctgctgtttgaattccccagtgtttttacattaatgtatcctatggccagtttagtctttcttcaactgttacagttctaggccctaatcggtcttattctttcacatatgatgcaatgatagatgtaatccttttctgaagtgtttgtcggattggcatagtctattcaaaaataaggcttatgtaactttcagcttgctatgtgacagaagtttaaatgtgtatttaagtacacagctttatgttcctcttaaagctgtaaagagaaaagaggacttttcctcatcaagagagcttgggagacaaagcatacatttaatttttttctttcaaaaaaggcaatgtgcactttcctctcctaaattttatatgccctagcagttgcgaatgttgtgtccaccttacaatttgattggaggctcccatacactgaaactctcaatagaattcttaaaaatgaacatcagctgggcgcagtggctcacgtctgtaatcccagcactttgggaggccaaggtgggcagatcacgagctcaggagttcgagaccagcctgaccaacatggtgaaaccccgtctctactaaaaatacaaaaattagctgggcgtggtggcgcatgcctgtaatcccagctactcaggagactgaggcaggagaattgcttaaacctgggaagcagaggttgcagtgagactagatcatgccactgcactccactgccactgcctgggcaacagagcaagactccatctcaaaaacaaacaaaaaaaatcacagactcattttaaaggagcagcaacctaaccaaatacaaacttcatttgattttaggtttagaaattctagttttattttggagaatcactcagtttttaatatcaattaaaatagtcctcaaaggaatgaagaggaagtctaaataaatgaataaaactcatttttcattttatggtagtatagaaagcattgatgtgtgtagagaaattaaaagacaagagtggtttactgtctatgcacaaatgagtgcctatatttaaggctgcctataccattacagtggcgtaattggtgatttcatagcatacagagaaacaatgaaatcaaagattaaatcattaggttatgatggtcatttgtaagattg

SEQ ID NO: 3904 - DNA, 6000 bp, Homo sapiens
ctctaggcagcaccacccgggtagccaccaggtggcgctgtggacctctgtgcattctcccagatggagccctaggggttgggacacacaagggagcccttttctgttagattggggcaggcggggcgagcctcctaaccctatgtccatctccagaagcagtatatctacctctacaattgtctgaacagcgcactggcagacgggctgcccctgagtcggcactggtcactgtgcaggagaggtttgtgccctgtgggatggggacagcattcctgacacatccacgtgggcctgggctccccagaagggcggcctccactgggccctgtgctgcaaaggtaaagggtcttggaataaagacctgtggccaagcgtgaagctcagtgtgttctgtctgtccgtcctcagacctgggccccgtgtgtgggtcttgtgggcaaacgtggagccgggatggaagctaggacctggagtctggttgaactaggtgacctatggcccctatggtgttggtttttcccctgaagcaatcctctccctgctaatccttcagtttctaaatatcctcagactttggtctctccacgtctagtttcctgtggtgctaagccctggattcagaatcacagctccaaattgttcgtcctctgccccaccaccctgtacgcaccacgctgtatgcagtagggtttatcctgtttcccacttcccttctcctgccatccccagccttctctacctgccagagcccccaggggccaccctcagcccccaccaggatggaggtgccagagctaccctgttactcagaaggcaggcgctggaggcacccctcaggcggaggtgccaagttttccctgctcctttgctctctcctccttcctcccctccacataggaggaggtggaggagaaagcagggagggcatatggagaaaggaaaaaccaggaggagcagcagagaccagaaaagagggcggggaggcagctgtctgtcccacacactctaggactgcactgcataccatgtgcgtgattgctggtggccacatgagctcctgcctccctccctggtcaggctgggagtttccaggtgcagtgcctgatgctggaccttaactgcccctggtggaaggccctgggaggacacagagaaaacctggacagatcagagcaagagtccctgaagtggagttgggtctccccaaggggaagaggggagagctctttggccaacctgagttcctactaaggtgcaacgggtcagaagtcagtggagggtccttctcagggctggttgaagaagggtacagaggtcgtgctggctgctcagccgggagctttcccagaatgagactaaagcactggtgccctcccaggaggactaaatgtcagtgtcctccatatgccatgtttatcaggagctgagggtgggccccctaatgaccctcataaaagcaggctggaggctctgctctgagctgcccaagtctgtctcaagcagctgctgctgaggttgaaacagggctcaaccatggcttttccactctgggaagatctcacattggagcagcaggagctgcaaatgagatggagccgaggctatggttgagtgaaggaagtgcaggctggcctgcggtagctttcttccatagggcagaggtggctctatctgtgggtctttctggtcatgtaggcccatcctctggccttcctaggaggctcgtcttcttttatttatttatttatttattatttttttttaattgatcattcttgggtgtttctcgcagagggggatttggcagggtcacaggacaatagtggagggaaggtcagcagataaacaagtgaacaaaggtctctggttttcctaggcagaggaccctgcggccttccgcagtgtttgtgtccctgggtacttgagattagggagtggtgatgactcttaacgagcatgctgccttcaagcctctgtttaacaaagcacatcttgcaccgcccttaatccatttaaccctgagtggacacagcacatgtttcagagagcacagggttgggggtaaggtcacagatcaacaggatcccaaggcagaagaatttttcttagtacagaacaaaatgaaaagtctcccatgtctacctctttctacacagacacggcaaccatccgatttctcaatcttttccccacctttcccgcctttctattccacatagccgccattgtcatcctggcccgttctcaatgagctgttgggcacacctcccggacggggcggctggccgggcagaggggctcctcactttccagtaggggcggccgggcagaggcgcccctcacctcccggacggggcggctggccaggcggggggctgacccccccacctccctcccggatggggcggctggccgggcagaggggctcctcacttcccagtaggggcggccgggcagaggcgcccctcacctcccgagcggctggccgggcggggggctgattcccccacctcccttccggacggggcggctggccaggcggggagctgacccccccatctccctcccggacggggtggctgccgggcggagacgctcctcacttcccagacggggtggctgccgggcggaggggctcctcacttctcagacggggcggctgctgggcggaggggctcctcacttctcagacagggcggttgccaggcagagggtctcctcacttctcagacggggcggccggggagagacgctcttcacatcccggacggggcgacagggcagaggcgctccccacatctcagacgatgggcagccgggcagagacgctcctcacttcctagatgggatggcggccgggaagaggtgctcctcacttcctagatgggatggcggctgggcagagacgctcctcactttccagactgggcagccaggcagaggggctcctcacatcccagacgatgggcggccaggcagagacgctcctcacttcccagacggggtggcggccgggcagaggctgcaatctcggcactttgggaggccaaggcaggctgctgggaggtggatgttgtagcgagccgagatcacgccactgcactccagcctgggcaccattgagcactgagtgaaggagactccgtctgcaatcccggcacctcgggaggccgaggctggcggatcactcgcagttaggagctggagaccagcctggccaacacagcgaaaccccgtctccacccaaaaaatacgaaaaccagtcaggcgtggcggcatgcgcctgcaattgcaggcactcggcaggctgaggcaggagaatcaggcagggaggttgcagtgagccgagatggcagcagtacagtccagcttcggctcggcatcagagggagaccgtggaaagaggggagagggagagggagagcgagagcggaggctcgtcttctactttcagcgccatggcaccaactggaggcctagggtcaaggtctgctcatttcttggtccagctatgcagcccctctagccctgggaggttattgggagagtggagaggtgttgatgagaggatcctggcatgtggaaagacagggtggaagaaatcctggatgcctctgaggtcccaggtttctagtataccctctggctggaccatggggagatagggcaaaaaaaggaaggaggggggcccacagcctgctctagctctgcgcgggggcttggctcagcatgggagagaccagagagagcaagaggctgcatgaaggaagcacagccagctcactatggtctaaggagagaacagggattgacctcagttttaaccaccatgccctttgctctccagggctctggggccggcccaggtcagccacttggtgggattccagcctcagggtggctgagctgcaggtgcagcacccggcctccaggtggcaccaatccgcttactttgaggtgggctctgacaaccagctgagctgcccacagtccctcagactcccgaggtcctgggagcagggatcaaggtggtccccaggccgtaaacctgacagaggctgcaggagtgcatttccacccagggtgcactcagcgggtgtaactccacacccgtttctttggagtcaaggcccggcctctcagtgaggagactgctcctggttgcccaccgtcgggtcatcccagcctgcagtggaaccctccgcagcctggcctcttccagggtagcccctcactcccctctctcctgtcctagcagacaggccagggagggtggacgagttccagctctggggatgtcccatcagctgtgtcaccttgaacaaatcattttgcctcttgggtctcagtttcctgcagtgtgaaacgtggtggaggcatgaggggcaatgggagccccaaggcctctttcagagacctcctctgggtcccatgtgacctcgtggctgtccccaaaggcaagagggtccccagccctgcggccaaggccctgggacaccctatccaaacaaatgcaggtctctgacgggctgagctttgctcgcttgggtttctttgctttcttccttttttttttttctttcctggatgaaattcctgccagctccgaaggaaggagggaagaggagcgagccgcagtgtagaaagtttccttgactcctcctccggctgggtctccctcccttgccaagcccagcctgtgaaactgaataacgaagatcactcaacaatgcctgcccctctctgactgcaccgtcccggcgctcccaccgccgccgccgccgcccaatagagcccctggggcggtccccaccgacggtgcagcccgccgggaccgggaggaagcagctgcggccatcgcgccgtgcgtccgcgcccggccgccaggtgccccagtagcccgaccgccgagatgcccagcccgccggggctccgggcgctatggctttgcgccgcgctgtgcgcttcccggagggccggcggcgccccccagcccggcccggggcccaccgcctgcccggccccctgccactgccaggaggacggcatcatgctgtctgccgactgctctgagctcgggctgtccgccgttccgggggacctggaccccctgacggcttacctgtgagtactgcccgcctgtccccgcctggtcctgcgggctgctggctagcgcccagtcccggcctcagcagggcacctgcttgcttggtgccctggggcatgggcatcccggagagggtttgcccccttccaagttgaccgttgcgggactggggaggggagaagagtctgagactaaataccaggcgagcagggagaccgggcttccctgacttggcttccccattggcctccgtgcttgtgggctgactatgggagcccaggcttggcgaggtgggttctggaccctgagcgggagggcgcggggctggctgctccatctcctgttgctgcattctcttctagcagagcagtgcccgggatggtggctgagggtaaagctgacagaactggaggtggaggtgaggggagcgtgccccagtagggtggaaataatgtctgttcttctgccatggtgaggacaacagggctgtcacactgaggctgggtggccttcgtgggggcggggggggcgggtttcctagaagctgggaggggggccttatccactcttgtctcctcagaaagggactctgccagcaccatctcccttcactggggcctcctggctcccccaggggcctccctaaagtcatgtcccaagaggctgtgttggagacactaatttgtgggcaggcgccgaggctgaaaaccagagaaccatttttagcgtctgagttggggtgagatggcgcgtgaaggggaccctactgggggcagctgtcctgtctgtctggctcatgggagcttcccctcagagctggagggctgggggctctggctgctcaccacctgggcaggaggagggtgagagagcacattccaggccaccca

SEQ ID NO: 3905 - DNA, 6000 bp, Homo sapiens; identical to SEQ ID NO: 507

SEQ ID NO: 3906 - DNA, 6000 bp, Homo sapiens
cactgacttccacaatggttgaactagtttacagtcccaccaacagtgtaaaagtgttcctatttctccacatcctctccagcacctgttgtttcctgactttttaatgattgccattctaactggtgtgagatgatatctcatagtggttttgatttgcatttctctgatggccagtgatgatgagcatttcttcatgtgttttttggctgcataaatgtcttcttttgagaagtgtctgttcatgtccttcgcccactttttgatggggttgtttgtttttttcttgtaaatttgtttgagttcattgtagattctggatattagccctttgtcagatgagtaggttgcgaaaattttctcccatgttgtaggttgcctgttcactctgatggtagtttcttttgctgtgcagaagctcttgagtttaattagatcccatttgtcaattttggcttttgttgccattgcttttggtgttttggacatgaagtccttgcccacacctatgtcctgagtggtaatgcctaggttttcttctagggtatttatggttttaggtctaacgtttaaatctttaatccatcttgaattgatttttgtataaggtgtaaggaagggatccagtttcagctttctacatatggctagccagttttcccagcaccatttattaaatagggaatcctttccccattgcttgtttttctcaggtttgtcaaagatcagatagttgtagatatgcggcattatttctgagggctctgttctgttccattgatctatatctctgttttggtaccagtaccatgctgttttggttactgtagccttgtagtatagtttgaagtcaggtagtgtgatgcctccagctttgttcttttggcttaggattgacttggcgatgcgggctcttttttggttccatatgaactttagagtagttttttccaattctgtgaagaaagtcattggtagcttgatggggatggcattgaatctgtaaattaccttgggcagtatggccattttcacgatattgattcttcccacccatgagcatggaatgttcttccatttgtttgtgtcctcttttatttccttgagcagtggtttgtagttctccttgaagaggtccttcacatcccttgtaagttggattcctaggtattttattctctttgaagcaattgtgaatgggagttcactcatgatttggctctctgtttgtctgttgttgttgtataagaatgcttgtgatttttgtacattgattttgtatcctgagactttgctgaagttgcttatcagcttaaggagattttgggctgagacgatggggttttctagataaacaatcatgtcgtctgcaaacagggacaatttgacttcctcttttcctaattgaataccctttatttccttctcctgcctgattgccctggccagaacttccaacactatgttgaatagtagcggtgagagagggcatccctgtcttgtgccagttttcaaagggaatgcttccagtttttgcccattcagtatgatattggctgtgggtttgtcatagatagctcttattattttgaaatacatcccatcaatacctaatttattgagagtttttagcatgaagggttgttgaattttgtcaaaggctttttctgcatctattgagataatcatgtggtttttgtgtttggctctgtttatatgctggattacatttattgatttgcgtatattgaaccagccttgcatcccagggatgaagcacacttgatcatggtggataagctttttgatgtgctgctggattcggtttgccagtattttattgaggatttttgcatcaatgttcatcaaggatattggtctaaaattctcttttttggttgtgtctctgcccggctttggtatcagaatgatgctggcctcataaaatgagttagggaggattccctctttttctattgattggaatagtttcagaaggaatggtaccagttcctccttgtacctctggtagaattcggctgtgaatccatctggtcctggactctttttggttggtaaactattgattattgccacaatttcagagcctgttattggtctattcagagattcaacttcttcctggtttagtcttgggagagtgtatgtgtcgaggaatgtatccatttcttctagattttctagtttatttgcgtagaggtgtttgtagtattctctgatggtagtttgtatttctgtgggatcggtggtgatatcccctttatcattttttattgtgtctatttgattcttctctctttttttctttattagtcttgctagcggtctatcaattttgttgatcctttcaaaaaaccagctcctggattcattgattttttgaagggttttttgtgtctctatttccttcagttctgctctgattttagttatttcttgccttctgctagcttttgaatgtgtttgctcttgcttttctagttcttttaattgtgatgttagggtgtcaattttggatctttcctgctttctcttgtaggcatttagtgctataaatttccctctacacactgctttgaatgcgtcccagagattctggtatgtggtgtctttgttctcgttggtttcaaagaacacctttatttctgccttcatttcgttatgtacccagtagtcattcaggagcaggttgttcagtttccatgtagttgagcagctttgagtgagattcttaatcctgagttctagtttgattgcactgtggtctgagagatagtttgttataatttctgttcttttacatttgctgaggagagctttacttccaactatgtggtcaattttggaataggtgtggtgtggtgctgaaaaaaatgtatattctgttgatttggggtggagagttctgtagatgtctattaggtctgcttggtgcagagctgagttcaattcctgcgtatccttgttgactttctgtctcgttgatctgtctaatgttgacagtggggtgttaaagtctcccattattaatgtgtgggagtctaagtctctttgtaggtcactcaggacttgctttatgaatctgggtgctcctgtattgggtgcataaatatttaggatagttagctcctcttgttgaattgatccctttaccattatgtaatgtccttctttgtctcttttgatctttgttggtttaaagtctgttttatcagagactaggattgcaacccctgcctttttttgttttccatttgcttggtagatcttcctccatccttttattttgagcctatgtgtgtctctgcacgtgagatgggtttcctgaatacagcacactgctgggtcttgactctttatccaacttgccagtctgtgtcttttaattgcagaatttagtccatttatatttaaagttaatattgttatgtgtgaatttgatcctgtcattatgatgttagctggtgattttgctcattagttgatgcagtttcttcctagtctcgatggtctttacattttggcatgattttgcagcggctggtacccgttgttcctttccatgtttagcgcttccttcaggagctcttttagggcaggcctggtggtgacaaaatctctcagcatttgcttgtctataaagtattttatttctccttcacttatgaagcttagtttggctggatatgaaattctgggttgaaaattcttttctttaagaacgttgaatattggcccccactctcttctggcttgtaaggtttctgccgagagatccgctgttagtctgatgggctttcctttgagggtaacccgaccattctctctggctgcccttaacattttttccttcatttcaactttggtgaatctgacaattatgtgtcttggagttgctcttctcgaggagtatctttgtggcgttctctgtatttcctgaatctgaacgttggcctgccttgctagattggggaagttctcctggataatatcctgcagagtgttttccaacttggttccattctccccatcactttcaggtacaccaatcagacgtagatgtggtcttttcacatagtcccatatttcttggaggctttgctcatttctttttattcttttttctctaaacttcccttctcgcttcatttcattcatttcatcttccattgctgataccctttcttccagttgatcgcatcggctcctgaggcttctgcattcttcacgtagttctcgagccttggtgttcagctccatcagctcctttaagcacttctctgtattggttattctagttatacattcttctaaatttttttcaaagttttcaacttctttgcctttggtttgaatgtcctcccgtagctcagagtaatttgatcgtctgaagccttcttctctcagctcgtcaaaatcattctccatccagctttgttccgttgctggtgaggaactgcgttcctttggaggaggagaggcgctctgtgtttttgagtttccagtttttctgttctgtttttccccatctttgtggttttatctacttttggtctttgatgatggtgatgtacagatgggttttcggtgtggatgtcctttctgtttgttagttttccttctaacagacaggaccctcagctgcaggtctgttggaataccctgccgtgtgaggtgtcagtgtgcccctgctggggggtgcctcccagttaggctgctcgggggtcaggggtcagggacccacttgaggaggcagtctgcccgttctcagatctccagctgtgtgctgggagaaccactgctctcttcaaagctgtcagacagggacacttaagtctgcagaggttactgctgtctttttgtttgtctgtgccctgcccccagaggtggagcctacagaggcaggcaggcctccttgagctgtggtgggctccacccagttcgagcttcctggctgctttgtttacctaagcaagcctgggcaatggcgggcgcccctcccccagcctcgttgccgccttgcagtttgatctcagactgctgtgctagcaatcagcgagactccgtgggcgtaggaccctccgagccaggtgtgggatatagtctcgtggtgcgccgtttcttaagctggtctgaaaagcgcaatattcgggtgggagtgacccgattttccaggtgcttccgtcacccctttctttgactcggaaagggaactccctgaccccttgcgcttcccaggtgaggcaatgcctcgccctgcttcggctcgcgcacggtgcgcgcacacactggcctgcgcccactgtctagcactccctagtgagatgaacccggtacctcagatggaaatgcagaaatcacccgtcttctgcgtcgctcacgctgggagctgtagaccggagctgttcctattcggccatcttggctcctagtatttttaattaaggtatgtacattgctttcttggacatattgctattgcacatctaattgatgacaatatagtgtaaacataacttttgtgtgcactgggaaaccaaaaaatgtttgtgacttactttattgtggtggtatgaaaccaaaaccacaatatttccaaggcatgccagtacaactttaaaaagttagcaaaatatcctacctttttttatggacatcataaatcagagtaatattttgttgacctgttgaaagaagcctctcatctggccttccataattattctgtctctagttttgttttcttctttatttggctaactatataattaggacagcattctctggaattgccaatcttagtttgattatgtgacctttgagccatgtttactgggttttggagaagactgtcatctgtacttagagatttgaacctcatctctaaatgaatgttacatgcaattaattttcaatagaatgaatctgcagctaggatgaaagccagttcctttgcttgttttcagaatgaatgtcttt

SEQ ID NO: 3907 - DNA, 6000 bp, Homo sapiens
ggaataggggctaatgatttaatgttgactcaattttaagcatgataaatgctagcggttggctagatagtaatttgtaaactggatagccatttgaagtgaaataacaggaagctgactggagtcaatgaatattcttccaaaagaagtactacaggtttagtcattgttcacttacatttttattcaaggttatgttgtaacgatgactggatttttctgtcattctggtgtattcatttctcccacctcccaaatatctgactgttgccctttctcagggaatgtcaggttacatataacattcatcaaaattattttttcctgaaattgtttatttattgtctgcttcctccgttatttgtacgttccatatggttggtgcctatcaggtttactccagaaccggcagtgtctagtgcatggtagatactcaagacaaatttggacaatatactgtgagccatagtaatgtgtgtaactgagggaccactgaattttcatagagacttcaggttgtgtttgtacatttcttcacaccttgaatttgttagaagtcttattgatttcatatcactttaacattaaatgttatatagaatcacatttcacaattcatgtgctgtagtggaaaagtggaggccaaaaatactgtattgaaatacagacaaaataaaatggtcatgtttgataaagtaaaaagaactgaattcataatggactgcattttcaatgaatagctcatggttttataacttctgtgcatattcccaaggctatcttaaccaaccatgagttaaccagtttacagtgactaggcatatttagttttggccaaattattctgtcattgaattggtctggtgtagaagtagtttttggcctacttgttttcagttaaaccttatactatgggtgggtggaggagacatttataatgtgtgctgaggcagctgggtaatattgcattactctcctaggaatactggggagtggttatttttagctttcacctgagcaaacatgactcagtttgttgacctgaatctatccagccccctcttgaatacacaaactctattaatccctagaaccacgcaagtgactaagtaaggccttcattacaaatacctgttattgtggcttgttcaaaggttgaagatgatttaaacttcctccatttagctcttttctcttaatcccacacactttaaaaaaatttacagacagatcaaactttttttgattctagacacaatttgtgacccatgtagctaaaattttgactatagctaatgaaaacacattctatggtaggtgaccagctaccagctgtaagctttgcttttggtttacgtgataatgctgtctatataaagaaacacttgggaattcacttttagctggagtaggacattgcactgagctgtaaatatattattgggggaacattaactgtccatgtttgaatatcaggatgtctgtttactttctcaagcaatacttgtgttttctcttttgaacactattagaaaaacggaaaatgttgaattatcttcaggttttgaagttatggaaagcatttttgagactcaaggactaatttattcaagtgaaaaaaattgtgattctcacagtatagcttgagatgcacttgaggcttctccaagttcactgccatgatatttatgaaaatattagtatttctgggattttttttctttatagaagaaacactagactaatgagaggatgaaaataatgcaggcccctaaaaaggcaggcgttcactgcattcattaaaaatgcggactttgtgaccataaagtgttcagcttctctgttattaagtttggaatgtggttttggagcttagctgaggaactcagctagttatttttcgttttggcctgagaagtgagagacttgtttttcaagaaggtaaaaaataaagaaaaaaaggttaggttcattttggaagaatagaagttttaaaatgtagtaactattttctgcagcaaatagtcagtttgagtatgttagccgaaaatagaattcatgacttttgtctcactgtttatttctccaaccacattaaaaagggttcagttaaatgtgccatttggcttttctaatgtcagtgggctatttagctgagtcaggataaccaaagtttgattgactcatatttctaagaataagtcagatgtctgattttagatggattagatgtgaggtcttcgtgatacagttttgagttttaaagaaaaacgtctgtagcaggggttagtggcaacttgtattgcagtgttcagccttctacatgaaggatgttcagctagagcttagtagtgttgagttttctggtaagtattaataggcattgtcctaacttcttacaaacataacattttactaaaaatgtatcattaaaatagatgtttaatagaatagaaaaataatgtggattcgaacattagaagtagggcagaatattaataatacacatttttcccgttatataactttctttttgcttttcatgtttctccattgctatctgatctctattaaataagagagaatttctgcaaacataatataccaagtatcagatgcacagaaatacacatatttaaaccacacacataaaccataattgatgacactttcttttaactactaactttcaaaggtttatagatgtatctattttaaaatatactagtaggacccacataaagaaaacaatgaaagttttccaagaaatttaaaaacagattgtagacaatggagaaacaagtactgttcttggatgggaaaactaaacgctggggaaggatgctaattctgtccacattaatttattattatatatttattatttataaatttaatttaatcttcaatatcctagcaaaaagatgtaaatttgaaatggattggggaagagagttactctagcagatattgataaaaataataaatttataaaattcaaagcaatgttgtgctgacccgtgaattgacagtttaatgcatggaaaagaacagatgttcagaaacatgcttacatacataaagattaacagtgatatgataaatcaacaaaagggagggtctgttcaatcaactataatttaaatatttaagaaataaaactagaacctcactgcatctcttatagcaattttcagatggatcaactgtttaaatattagaaaaaatgaaattgcaaaaaataaatagaagtcaatatagatgactattgaattttgagatgaagaaggtcagtttctctaaacacaaaagcatggggggaaaaacataaaagagggattccatataagatctggaacttctctatttaaatgtgcataaacaaatttagatagcagatggaaagtttaggagaaatttccaacaaaacatattaggcaaaggattattcttatagatagcctttacaaactgatgaaggagaagttgattttggtgtattgtgtgattgactattttgcaactactaactgaaagattttaattataaagaaaatatgatataatggctaatattttatactttgtgtgtgcccaagcactactctgagtgctttcatatgttaacttgtttaaaatatgcagtgacttggaaagatcagtactattattattgccatctaagagatgataaaaccgatacagagataggcttagtaatttgcccaaaactttcctagtgtggatttgtggtgacacaactaaaaatgagagagccaggatttgacaccagacaggtcgcctccagagctggtgttatcacacaatactctgcttttctaagtgaataaaaagaaaagactacaaaactatgcatgatataactattttataaatatgtgttaatatttgcgtatattttaaagttacacaatttaattcatgtgtaaactttttatctaattacacagtcatagaaaagacagatggcattttgacattttccaacagtggttacttccctctagtgggattttgggtaaatgttgttttgaacttaaaatttctgtattttccaagttattaatattataatcatataaccattatataatcacaaaatagtgtttttaaagttacacatttcaaagttgctttgctgtcttgaagtgcatcgtttatattttagtacacttttgaagtatcagtcagtgtttgagttcccattctctgctaggtaccaagctaactggtgtcccctagttctttatcttaagcaaaagcaatgttgtacaattttagagccaaaaggaatcttagaaactcttccgtttctcagatgagggtcctgaagctattacagatttaactgacttacccaagattcactgacagtaggtttttaaccaggcttcgaatccaggtttgaagactaaggtcttctgactttagatactgttctctatgaagcaccagagctctccaagacctcaatcaggtgggaactgtagcacagttgattttttgtgacattgttttgaagtggggaagtataactagactggttacaaatgtattctttcacagcaattgaaaacataatgggaaggttctcagagatactgttatgacacctctggaggtcagtgaaagatcctcacccagatttggaagatccctaagtattgctgagccccacttgtagaaggcgatacaaaagctggagggaacacagcagtggaaagaatattaaccagaaacagtagtttcaatagatggcttttctaaaacagacaaactttctcttttcagctccagggcccacaacggcagtgtcctacatgtcggtgaaatgtgtggatgcccgtaagaaccatcacaagacaaaatggttcgtgccttggggacccaatcattgtgacaagatccgagacattgaagaggcaattccaagggaaattgaagccaatgacatcgtgttttctgttcacattcccctcccccacatggagatgagtccttggttccaattcatgctgtttatcctgcagctggacattgccttcaagctaaacaaccaaatcagttaagtgtactctcctctcatccctttcttccctttgagcattgccctctttgggttctttttgagccaattctaataaaagtaaaaatggtaatagtaatagcaaacaattattgactacttcccaggcactttctgtgtactttacctgtattaacccatttaatcttcccaccaggttccttgaggtagtcttattatttcattttacagatggaacacttgggcaccagtgaggttactcatgatctgaagactagagagtggaaaagctgagatttctgactcagaaaactgccctaaccaccaagcttcaccacctctctagtgtcacaggggagttcaccccaatggagtgacttgagggttcctgaaaggtttttatttttttttaaatgtctttttccactgggctttgagtaaagctatggccttagaaaaagatgcctaccaaaatggaaatgccaacccatgagcacccatttccccaccaaaccaggtttttttttcgttttttttttttttttttttttttttttttttttttttttttttagcttatttgcagttaaaaactctgagggcatgagacatataaacttttcatggggagaaaatcactgggtgatttctgggaggccaatacatgtatggcatctggggacagtatcaggaatcttaggctgagaagtaagaaaactttttgttttttcctttttgactgagatgggatcaaggatgtgagggaaagggaaaaagatgtgttaaaggcagctctgtctagggcctgtccatagattgaaacattatttctttttcttttcttttcttttcttttttttttgaaacagagtttcgctcttgttgcccaggctggagtgcagtggctcaatctcggcttactgcaatctccg

SEQ ID NO: 3908 - DNA, 6000 bp, Homo sapiens
tataactatatatatataactatatatataactatatatataactatataaaaatatatatataactatatatataaatatatatataactatatatatataaatatatatacaaatatatatatatttatatatatatatatctgcaacttgctgtgagtcagagcactgcacactgttcagggtgaggttgcctacttcctcagttgcatttcagaggctctgttagtaagtgctggtctgggagcacagaaagggattgggccaggccactcggtgtgagcagaatcagagagaccctaggcctctcttttgggtggggcagggatgactgaggaatccgaggaagaggtagctactctgggaatgtgttgaaatgagcttgtccaaggcttagcacaaggcaagcccaccctgccctgccacatgcttcatcctcctagttttctgtactgctagagcttccttattcctagggaaatcctctgatggctgtcactagtctttgcattgggctctgacactagtggcacaaattgcccagggactctaaaaagggctggtgccgatagccccacccatacccgctcaatcaaaacccttgaggctcattgaccacttgttggggaggtgcagaacaaacaggtaaacagggaactgcaattcactgtgcagtatgtgacccccaaggataaaaatactagcagctgcagttcatggaatgccttggtcctatgcaaaacacttgatgtgcaacggtaaattgaatccccccaaaaaatcctttggaatgtgaaggttgcttattaggctgatttcaaaattttgcacacagttaaaagcacaattttatttgtgcatttgacccaaaacttcctctgaccacagaggctacaagccctacccaagtcgtagaactcggcctttgggaatattctaagtctggtagaactcagtgtggagcaccgtggtgcccacgtgatggatgccctggagtctgggttgctagtgtttttttgcagctttgtctggtctcggcctttatggcagaattacattattcagctgtagcctctccaaaaggttgagtcagcctgggtttgctgctggcgccacggagccctaagactttgctgagccctcacatagcgccggggaggcacacctactgtccacctgctcccatgagtcataaaactgccacactgctaccaggcctgccagccctgcgttttccttcagttgccaccctgatgagaatgaacttagccatataggtcagggcaccaggcaacacttttcccccagcctgccttcctcttgaaatgtgctattggacaaccagtttgtaaagcaagggccaggatgtttctgtttccattgctttacaccaggtggctaaggagagagggcagcagggcagcctagaggccaacagctcaggctagagaggagaatcaatccacgaacatatgatggagtaataggattagcaagtgcccagaccatcacgatgagaccagggagaggtcaaaggagggaataataacgttttattaattatttcagactgtaggctactcatatatcccacctgacatttacagtggatctatcacggagagtctccactgaaagttttcactctttcatgaataaagacttccttatgtgcctaacactttcaaaacgattccacatcatgatagtgtctaaaaataagcaccctttattcaaagttctctagaggagctctcttctcattttctgttgccaagtctttgatcagcctaatagttgggggcaagagcccaaaagaaatgaaatcaaaccttctgtgaaagtaggtagcagtaatattaaactgacatgtaatatgcctcccatagcaaatgctcacttttgccacaggtcccctaagtgctacaagtgtttgcgtatttgtttcctcttaggaaatcctagaaaagtctagttttgtgttatatgttggggtgcatcgattaaactgctagtgctgggtttctgcaaactaaagatttatgtaggtgctcaaatggatgacaaacttagatacctaggtcaccactcgaatttctaaggggtgttttagtaactgcctccaagaagctgtgatgactaggaaaatccatctatttccctttaagtagaacatattattatgaatgtttaaataacttaaagatgcctgttacttgtctttaaaaaaaattctcctcagatttcaggtaaaaacaataattgaagatgtccagcaaaacagcaagcaccaacaatatagcccaggcaaggagaactgtgcagcagttaagattagaagcctccattgaaagaataaaggtaagaagccccgactggataacatatgctttctgctcagttccccctgttccttgtggctggaccacttgtcagagaagataataccatttcattccgcttgcttccaggatttttccagaacaggctgagagtctcaaaatcctaactttcattttcctatatagcatgggcctcacttcaaaagtgtctgcattagcctctctgtttgtaaaactctggacaggatttcctaaggacctgtctcccctgaatgaacatggtcaagtccgttgatccctgtgttctaaagtgggacaggggttccaagtagacttcataaacaccctagtcattcctttggaatttaagtgttctagaattatcagtgcagctgaggcagcttcacgtaagaagtcagcagtctaggtttcctttttagggaaatgaagcttttaaatgtgtttggccctcagtgaccactttctgtgcccagagtaataatgcgagctttagttgagatcccatagagaaactggaatgcatttcttagatcacctgacttcgaagtcttttcccctaaatcccaagagagaactaggcagtgagtgccctggaatgttatgactagttcttccttgaaactgaagcagttggccaggcgcggtggctcacgcctgtaatcccagcactttgggaggccgaggcgggcagatcacctgaggttgggaattcgagaccagcctgaccaacatggagaaacccctgtctctactaaaaatacaaaattagccaggcacggtggcgtgcgcacgcctataatcccagctactcggaaggctgaggcaggagaattgcttgaatctaggaggcagaggttgcagtgaaccaagatcgcgccattgcactccagcctgggcaacaagaacaaaacttcatctcaaaaaaaaaaaaaaaagaaagaaaagaaaaaagaaactgaagcaatcacttgatccattcctctgggcctggagatagtcacctgtcttcccagcatgaggctatctgggctgtgctagacagggctcagctgccccattgctctttgcttagggcaaagagatcctattctgtaggatctccctcccagacttctgaaacagggcatgatattttccgtgtttaattcatgcgggagtaaggtactgcctcttcccatgctggtttcgtctctctttttacttccgcaagcccaatctctaacagtaaatcctgaagctccacaacttggctccagagttttggctccgagcccatcgttcagttcttaaagtgtgttctgcattccaatctgtttttttctgggtagaatttaagatacaaccttcccttgattcacatatgctttttctcacctggcccctaactttttattttgagacatttcaaacctgctgaagagttgtaacaacaaacatttataaaccgtttaccaggattcaccagtttttaacatttgaccacatgtacttgcttgcactgtctctctccctccttctgtctgtacacacatacacacaaaacatatataatgtcttctttaaacccttgaaagttatttgcagttcaggattatctaataagaatacctcacacacagtccatttttgaagaatccaggccacttattttgcagaatcaccctcacttcgggtgtgatcgttcgctgattggactccagttcaatgttggacaggaatgctagctcattagctggcggtgtgtcctcagcactcccatgaagggatacatggtgccagtttgtctgaccattgttaagttgcttggttaagaaagaccttacctgccaaattgcaccattttaaaggtaccatttcctttttatacctgacaagaatctgagagtgatgctttgagactctgattatcttgttcaaatcagtcttccattcaatagcctagcattcaaatacgctctgaaagtgtgcaagtaaaatattttctttcttgtttgtttgatttatctccatgtcaggtttcgaaggcatcagcggacctcatgtcctactgtgaggaacatgccaggagtgaccctttgctgataggaataccaacttcagaaaaccctttcaaggataaaaaaacttgcatcatcttatagtggaatagagaaacagctcctcgcctcttcccaacaacgcaaattatgagcagctccttgaagagatttaccttcagcttatttggtaaccactgctaataactaaaatgttctcagcttggaataatggactctgaagtctctattttccaagttgtcctttctcttaaaataccctttactgatttaatacagaataacaatcttattttccacttggtaactatggctttatgttgggttactgtttaaggaaagttgatctgggcctttttaaaaacataattatatactttagaaatacaagggattccgatatgtcaggacctaaatggcctaagcacctgtcaaattaaaattccaaaattcattgaaatcctaaagccttgatattatattctttataaggcgtgtgccagcctgtatagtatataagagagaggggtgtttgtgtgtatatatatatgcctttgtgtatacacttatcaaagctattttcttatgaaaacgtccctctctccataccatcagtttctcagttccagaagttatacctttattttgagctgtgtataggtagaataaaaaattcctttcatatcgttattgtacaaaaagtaaagagtatcctaaagattgtattcattgtaatcaagtaatgcaatcatctctcctctcttgaaatcttgctggacctcttaggctacaataaactgtaccaaactaaactgacagtccttcgataatatgaaacattaatttacaaggacccgttagggcttcaatgatgctgagtctggaaaaggggaggagacccttgggaggactccaggcagctgtgctcccagggctcatgttctctactggattagggataggcacctctgaaatctccaccctgatgattggaatgaaacggagtgaacatgagcccagctgagagaggagcaggaatgtgtgaaaaacagctgctctccttgtcccagctttgtgattgagccctctgtcttgctctctctgccttccctgtgtctttcttctcttaccagagcatctgtttgcagaggtaacattaccttccccagccacaggtatgtggaatacggtgaggaaaaaaaaaattaaaaaaaaaatgcaagctgtcaggatgcttaagctcttttcagacatctgcagtttcatccctaccttgttcacataccatccaagaggcacataggctacccaagagagccttggattcagtggtacactccttgggcccaagggctttagcagctggatatggggttccttgattttcctctgggcccaaatatagccctcacactcttggaatttccaggtatgggggtagccccaaaaggaggaatctcctatggccaataaggtatcttgactttatcaaagtagaagagagggtcacttcggagtcaaatcatacactaggcctttgatgctttaattcttcttcagttcattaaaagtaactacta

SEQ ID NO: 3909 - DNA, 6000 bp, Homo sapiens
gtgctgcttttgtttgtttgtttgtttgagacggagtctcgctctgtcgcccaggctggagtgcagtggtgcgatctcacctcactgcaacctccgcctcccgggttcaagcaattctcctgcctcagcctcctgcgtagctgggattacaggcgcccgccaccacgcccagctaatttttgtatttttagtcgagacggggtttcaccacgttggtcacgctggtctagaacgcctgacctcgtgatccgcccgcctcggcctcccaaagtgctgagattacaggcatgagccaccgcgcctggcggtgtatgatcctgagcaggtcattcattctgatgagattgatgatacctgccttgtggggttgttgagttaattcagtaaagttgattgtgggaggagctttgcacatgacaaagcaaaacacaaatactgtgtttattggaacagtcacaggtttgaaaggcaaagctgcttctcaaccttctggagtcaggaggactgaatttggtactgcccaggaatattctatgggattggattgacttcaggcagttggctacctattctcgacccctttgccttcccttgattctcacttctttcattttctgcaccatctgaggttgctggttaagcagtttcaaaggagcgtttcaagttcttcccgttttctttctcggcagcagcctgggtcccgagtgacaacagaaacgtgcttccctctggtggccaccattgagcatagcgcctcagctgggacgcaggagtcactctttcagacacttgaagctgacgctaccgtgctaagtctccggcagctgaaacgcttcctcactttctgagtgccttgagttcagttagctgaacccttctctttcccccagggcctggagacctcctgacacactcggtgtgggtgggggggtctggtgggtgaggctgagcgcccagagcagctccccttcgtggggcaggatttcctgttgctcagagtgaaggaaccttgacctccctttccaggcctcaccctccctcccaccaacactggcatggagtgaaactccttgtgctcagactacagcctgtgagtcttgggctccttggattggcctcagtggctgggccctggttagaaggcccgtgtggacagaggctccagatcagcccccggcgcgggaaagcccagcctgacccccggggcttgatggagaggcagagcccggagagtggtgggggaggggcctaggaagcgccaccttcagggctgaccctgagcacttgtcttttctaagcctcagctgtcggctagcaaacatgaagctctataaaaatgtaaggctttggggaagtggtgatggggccaagaggaagtgagcaagctgattttgtgcaactctgcagacagccgtggggtgggagacagccttgggcagaagccccacctttcgcctgcctgacatccggtcttagctgcccgtggaccagctctagggctccagaggccttttccctgggctcctgctaacactgcatcttgctgtttttgtaggctggcaactggggttttttagggttttctgagaagctgcaaaggatcagatgaatcatctctgctgccagcctctcagattattaagcggaaccccaagggcaaggttgcagccttgtggttgagctgtgcccagtggcatcagacccaagtaggccccaggccagggtttgggacaggtgaggcctttcccctccagtcactcttcctgtgatttaagccaatggtttctcctagatctttgcttccctgatggagttcaggttcttttagtagaattttaaaatttatttttaattaaaaaaaaaatagaggtggggtctcagtatgttggccaggttggtcttgagctcctggcctcaagcaatcctctcacctcagcctcccaaagtgctaaggttgcaggctgagccaccacacccagcctcttctagtaaaattgaaaacagccatggcctttcttttaggtgggaaattctcctgaaccacagttaactacagttaacatatatatatatatatatatacacacacacacacacacacacacacacacatatgtgtgtgtatatatgtatatatatgtatatgtgtgtgtgtgtatatatatatgtgtgtgtatatatatgtgtgtgtgtgtatatatatatataatatatatatatatattttttgtttttaagaaaaaaattgtaccttgatccaataaaaatggtttcctttctggcccagagctcaccttggggccccagccttaccagcgacctgctcatgcagtcatctctctggtcctgccatctcttcctagctcagagcagttgccaaatctacattatacttgtgctttgtgcccatagtcttggtggctactttcttttttagatctgagaatactgatctctactgattttgatagcatggcaacatcaaacccagggactccttgtacttttgaaaggtttgtagagtttatttgctcatttacttactgagggctgccattcggaacctgggctccgaagcagaagcctgggtttgaatgctggcttcgccactgcctagcttacaactttgggcaagttatttaaccccgcagagtctcaacttgctcagcataatggtagtatctatttcattcgagagcattgaatgagtctgtgaatagaagctgcttaacactgagtagttggtatgatgcagagcacttaagagtcctcgctgatttattgtttccttatatacccaatgcctagtttatgccacctgattcactgaagtgctttcctattcattcatcaaaaatgtactgagcacccatgatctgccaggcatcatagtaggggcgagaaatgcagaaatggaaagtggtggtccctgtcctccaggaacttacaggctaagcggggaagtcatatacacacagcacagtgtggtcccagaggagaggtgaagactgggaagttttcttcaaggtcctgttgggtaacagtcttggaggaaaagtatttgttttctagatggacttgggggagaagggccctgcaaaccagacaaagagtgtgtgcacaggggagaggaagtgaaagagaatgactctgagccacgagttgctcagtctggtgcagccaatggtgtctgtgcggacccaggtgacaggagactgcagaggctgggagacccatcagaagggtataagccactctaaggagtctggacttgatcctaaggcaatgtgcagaccaaatggtttagaaggggcaggggtcatcctgggcatggagctctggcgtggttcctctggttgcctgaggcaccgagtaggaggctgcagcatctcctacttgagatgtgatgaggcacatgaccaagagtggctgtgcgccatgggctgtgggtgcagcggtaggaatgggcaaatgaagtgaccttctgccccagcctctctgtcctctttcccagattgccttttggttttcaatctacggtcaggttccaggccaaaatgttaagtgactgtgaaagtccttctcctctgttctcaaatcaccccacccagcactgatggaccttgtctattcagagaacatgaaggaagggcttctcttgttcacagaaaagaaacccccatggtatgtgcagagaattctgagggtagaattcccagatgggcagaggtggctgggctggtgaccctaagtgtgtctcctgcctttattctctctagtgggttattctttcatgtggtatcttgcctacagcatgctgtgtttggacacaaacccctttccttggtttctctgacccagctgagatggactgattccaaaagaactcacctatgtactggggtaggggagggagggttttttgcagtatttaactaaggttcaaagagtgctatatagtgagaaaggcttcttttttttttttttttttttttttggcagagtgctgcctcctagaaatttctcttggtaacttccttctctgaagcacagataaagaaaacaattacagtagaaacatttatgagggacacattggaggccgatgaagcttttcaagttccagcagtgcagggatgtgggcagaactgacattggaaaatactagaatgatggaaattcagttggagaggactgccctttttaatgtctggggagtctgctcagggagaaatgacaagtctggcggggacaagtatgggatttggtaagacttggatcaacttgggatacagggtgggggtcgggagtggaatcaatgaatgatgccagagcagatcaactaacaagaggaccctgatgagccccaggcagaggcgtctcccttatgccccactctgaagtgtttgttagtaaacaccagaacgccattgttgttactgctgaattttattttgggctgtacatatttagatgcttaaggtaaaaatgataaagccctcaagccactgtgtgggtttgggtccaagtgttccttcttgctgcctctctaacacgcctggttaaaataatccctttggatggtgctgagaagcacctgaaccaagtgggtccccaaataacaatggcgtgcaagtgtctggttcccagaagttggtgactaggtaagcagcttcagggagagggggctgattcccagacagtcgcctgttcctgcggggatggggctgaggcttggggaatgtgggcaggaggatatgccatttgattctgttgcacacgttcttttcccttctttctgtatgtctggtcattctgctattctgtcgttcctcacataggttggacattggccggctgccagcataagtgccagtgtgattttgctagggtgtgagctgagaaagagaggtggaggctaagcaggtgtgatgcttctcagaggtgctgagtttttgcccttctgagcagggaatctttgcttatccctttgaccaaggatctttgctgcaaaggctgggtatcggctgtgctcagcaaagcgtcaactcgtgcaagaacttagcaggaatagttctggctaaggttaggaggctgccaccaaagtctcttttttgttcctctgcttctcccgtttgcctccttatcatgagatctttttgctaagctggcagaaagattgcatagtcagtgcttccagctctgctcccacctgatcctgcactgtcctctggtccctgaatgaatgaactctgatacccaatcttgtctcgagccttctctatgccactcatggctcctcttctgctctttccatctttttgctgagagttctgagctctgtacttcctcttggcccatctcacttcctgaaacacccctgaagagggttgcttatcttgatggaactcaaaaagccaaaaagctgcaggcagaggcgttgaggacatctgtttggggaactaagagcagcagcactttcagattcagtccatatagagctgtcctacagcattctggaaacttgaggatgtgcggtgcataaaggggctggaagtgacccacctgtgatgagccctttctaaggagaagggtttccaagagatcaccccaccagaaaagggtaggaatgagcaagttgggaattttagactgtcactgcacatggacctctgggaagacgtctggcgagagctaggcccactggccctacagacggatcttgctggctcacctgtccctgtggaggttcccctgggaaggcaagatgcccaacaacagcactgctctgtcattggccaatgttacctacatcaccatggaaattttcattggactctgcgccatagtgggcaacgtgctggtcatctgcgtggtcaagctgaaccccagcctgcagaccaccaccttctatttcattgtctctctagccctggctgacattgctgttggggtgctggtcatgcctttggccattgttgtcagcctgggcatcacaat

SEQ ID NO: 3910 - DNA, 6000 bp, Homo sapiens
ttgtctccaactctaactaatagctgcttcataattctctgagcccaaagagctctattcagtaccaaaaacctctaacagcccaggagagacccaaaacctttatcagtgtttcaattcacaaccataggctgatttggattctatttctgtcttgtttacactcaaaatccttaaaaaccattaaatcgtacaacatggagtataaagattcctttaaactcatagtcagccaagttcaaataggctgtaccttgtacaactccagaggaaccattcacgtagaccctagtatggttgcaatgtagtggccctgcactcaggacatgtaagccacagtgcatcccagtgctggagtctactggttaaaaggctgggctctggagccacatcactggatttctgaatcttctctctaccattaatgaactttgagtaaatcatgtaacatttctgtgcatctgtttcctcaactgtaaaatgtagacaacagcatctattatacctcatagagttataagattaaatgagttcatccgtgcaaagtgcctggcaccgaccgagcactcaataaatgttaattgctgttagctgttttcattattattctgtcagaatgactgtttcctggtttgtttttggaaagaacaagttttcttgttcttctggagccatgcaaaaggtcctggatccccagacagaatttacttctctctgttcaattcctccaatagacgtgaaaccaaatgttgtgttagaattttaaaattaggcaccagggccggacgcggtggctcacacctgtaatcccagcactttgggaggccgaggcaggcagatcacctgaggtcaggagttcgagaccagcctcaccaatgtggcaaaaccccgtctctatcaaaagtacaaaaattagcccggcgtggtggcacatgcctgtaacccagctagttgggaggctcgggcagaagaatcacttgaacccggaaggcagaggttgcagtgaaccaaatggcgccactgcactccagcctgcctgagtgacagaactagactctatccaacaaaaaaaaaaaaaaaaaaaaaagaaaaagaaaaaagcaccaggacacctggattcaaattctgattctctagattcaaatacacttatcagttctgtgatcttggggaagccacttaaccttctgcatataatatttttttctataaaaggaaagaatcattcttaggattgttgtcaaggattaaataagtaatgtgtgtgttagcttctatgggaggtctgacacctggtgggtgtctaataccggttggatgcatctgttggaacatcagctgccttatcccatcgcctataaagtgagaagtgacatgtctcagtttttaatgactttcctcccctcttatgttttattgatgagaaattccacctccctcttcacccctcatcaaattctataacttaggcttatgtagtgaccctgtttcctggcccacaggtgaatattgaccacttcactaaggacatcacaatgaagaacctggtggaaccttccctgagcagctttgacatggcccagaaaagaatccatgccctgatggaaaaggattctctgcctcgctttgtgcgctctgagttttatcaggagttaatcaagtagtaatttagccaggctatgaaatcatcctgtgagttatttcctccataataaccctgcatttcccattaatctacatatcttcccacagcagctttgctcagtgatacccacatgggaaaaatcccaggggatgttgcttactctttttgcccacactgctttggatacttatctactgtccgaaggccttctttccccactcaattcttcctgccctgttattaattaagatatcttcagcttgtagtcagacacaatcagaatcacagaaaaatcctgcctaaggcaaagaaatataagacaagactatgatatcaatgaatgtgggttaagtaatagatttccagctaaattggtctaaaaaagaatattaagtgtggacagacctatttcaaaggagcttaattgatctcacttgttttagttctgatccagggagatcacccctctaattatttctgaacttggttaataaaagtttataagatttttatgaagcagccactgtatgatattttaagcaaatatgttatttaaaatattgatccttcccttggaccaccttcatgttagttgggtattataaataagagatacaaccatgaatatattatgtttatacaaaatcaatctgaacacaattcataaagatttctcttttataccttcctcactggccccctccacctgcccatagtcaccaaattctgttttaaatcaatgacctaagatcaacaatgaagtattttataaatgtatttatgctgctagactgtgggtcaaatgtttccattttcaaattatttagaattcttatgagtttaaaatttgtaaatttctaaatccaatcatgtaaaatgaaactgttgctccattggagtagtctcccacctaaatatcaagatggctatatgctaaaaagagaaaatatggtcaagtctaaaatggctaattgtcctatgatgctattatcatagactaatgacatttatcttcaaaacaccaaattgtctttagaaaaattaatgtgattacaggtagaggccttctaggtgagacacttttaaggtacactgcattttgcaaaaaaaaaaaaaaaaagtaatcttttagcaaccccagtattccttcactatttcgcttcctgcattagcaaattttacttacagtcaaaagtgcagatttatactcctgacgtgtctcattcacagctaaataataggccataggacttttggtaggtttaaacttttaattctgtatttcatgattataagtcttgctagaattttttctaatctttagtagatttgattaaataatgattcacagaatttagtaacagaatcaaactaagccatgtatgagggtaatcgagatgaggatattaactcaaaagaaatagggtgatttttaaaggattaataaaattctgaaatgttaagtagaagattacattgtctagtcttgtatttcctccttctgttgctctctttcattcacacactctcagtttctcatatttgtagctcatttatttggttatttcctaagaatattgaaagtgaagcaactatgtgactgtattcttcaggtaaacactgactgcgcttgttggattttccctatttttgtgacttcaagaataatatgccctgctgaatacatgccatttcacattctgaaactgggtagagtggttgggtgttctgccaacaattgctagtggtgtgaattcattcatatttgccagtattgctcacttcaaagaaactccttcatcaagcagtccagagctaggccagatcaatgctacaatcatgaagttctcattgcatgcaattgtgtaggattgacaaggaactcagataaaaatttccagggtgcacttccagaaccagcttcaacatatgtctacattgcccccaagttaataaagtgccaaccctttactctctcatacagccagaaatgttagaaatccaaaatcttggtgcattattttttcataaacgctaaaacatttgaagaaacaatttaattatttaaaattcaagtattttattcacattatttgcaatatccaaatgtttaaaaattcccagataattaactagctattacagatctcacctagagggttgatgttatgaagactccagtggactgtactcacaaattgactggacaccctatgaaagtgggtagacctctcagcggaaaataagaagggcttttacctacagggcaggacagggtcccatgagagcagttctgtggagatataaaaagaatggaagaaggaatgccttatagtgatattgtgacattatatctatatatctacatatatctatctatctatatctacatctatataatcttacatttaaaattgtattcctacacatattagaaactcttctaataaatgaagtaaaaaaattaaaaagaatacaaatattccagccccaaatgagaaatcaaacatattaaaattgttcaagaaaatttctttgaacacttctgaaagtttttggaaacttagaaaagagggaaaaaaatccagtgttactagtaatttccatggtaatacagataaaatacattcttttaattctgggaaattagaaaaagtggggtgatctttccaggaaaaacatgtgtaacatctgcttatcactccagctccctcctcctcctcctctccacgttcccttgagtaaatgtctgggaaagcatgaagcttgatgcaagaaccctgttgtactggcgttttcctcccctgtgaaaacgtaactactgttgggagtgaattgaggatgtagaaaggtggtggaaccaaattgtggtcaatggaaataggagaatatggttctcactcttgagaaaaaaacctaagattagcccaggtagttgcctgtaacttcagtttttctgcctgggtttgatatagtttagggttggggttagattaagatctaaattacatcaggacaaagagacagactattaactccacagttaattaaggacgtatgttccatgtttatttgttaaagcagtgtgaatagccttcaagcatgtgaataatcttccatcttccccgccacacatacacacacacactttttgtttctttcaggtagacaccttttaaaatgcagaactaactgaggcatttcagtaactttgctttcaaatcaataaagtcaaatgtatggaaacattttgtgccctactctccataccccgtgtactcaaattctctactgtatgaattatgctttaagtagaattcagtgccaaggagaacttggtgaaataaattattttaattttttttttatcctttacaaagccatggattttatttggttgatgtgtgctctgtacacaagccatttcaataggatggagctgttaattattttccaaagagtaatagacatgcaaaagtttcaataaaaactgggccattaacaaataaattaataaactaataagcattcccttctaggtttttgccaaactgcctatccaataacaaatttgagaatcgttgtaaaagctagttatatttcagagaaatgattttcattattgaaactgttctccctagcaggccattttccctttttcctgggagtttagcaagtttaggagagaatagtcatgaaaagaaagggaagaaaggggagaagggaagaggttaaaaagtaagtgctcagacctatgaacgtaatccctttgctacaaatatttaagagcagctcagcttggttgaaactgagttttgtcatcttccatatttgcaggaaggtattttctgacttgcaatgcagctagatgtaaaattttattttatcatcctagaaagccttgactagaaaaatgaataaatattgagggtttcctgtccatatctggcttgcatgtgccagaaagcagagaatagaaaatgtaatctccaacatccaagcatcgaaacccaaggggtaggcaattctatgtaggttttggacatgaagtttggtgcatcttggtttatgctggctcaactgctattaaacctctctggcttatagtctcttcattctattagacaagcacgtatcgaacacttgcttcgcacaaggctctttagttaacaatttagcagctactgtttgtgttaaacacacttttcaccaaataggttctgaggcaaacgagagcaatgactatttaaagaaaggctttcccagcatcacttacacatcccaaaactaaaaagatcaactcttccaactgagaaaagactcctggctttgaatggaaacttacagcagagagt

SEQ ID NO: 3911 - DNA, 6000 bp, Homo sapiens
ttctcacataaaagataacataggctgggcgtggtggctcacacctgtaatcccagcactttgggaggccaaggagggtggatcatttgaagtcaggagttcaagaccagcctggccaacatggtgaaaccccgtctctactaaaaataaaaaattagcctggtggtagtggggcgcgcctgtaatcccagcgactcgggtgactgaggcaggggaatcgcttgagtctgggagacagaggttgcagtgatctgagatcgcgtcactgtactccagtctgggcaacaaagtgagaccatgtctcaaaaaaaaaaaaaagataatgtatagcaaatattcctgcaccttgcttttttccacttaacaatacgtctttgaggccactacatgttagtgtatagagattttcttcattcatttgtagcactgaatcctaacttattcctctaatcccctactgacagacatttgggcatttttaatcttctgtaattacaaatgtatcccaaatatataatgttgctttttattggcaacagaagataaatgtgtacttgaggatttttttaatagatcaaaagataaatgtacttgaggatacttttttcccccgatacaaaatatgtggaattttttccaacatcaatcaattctctgacaccaattgggtatccaacaattcaattcaattccgacactaactgcctgagatagttcagactccacagattaagggctcagtcccatacactgtccccacttcaggcaccacatgaatgtccagggcctccagtacttctgaccgacttggcttcagatcaggagttcccatggctaataatttcctataacagctcacagagctcaagaaagcactttacttactttgattactggtttatgacaaaggatgcaattcaagagaagccagatggaagagatgtgtaggacaaggcagtggtacgatctcagctcactgcaacctccacctccccggttcaagcaattcttgtgcctcagcctcccatgtagctaggactacaagtatgtgccaccatgctcggctaatatttgtatttttagtagagacacggttttgccatgttggccaggctggtcttgaactcctgacctcaagtgatccacccgccttggcctcccaaagtgcttgggttacaggagtgagccaccgcatccagcccaataatgctcatttcaatatatcagccctagtggatgacatcatgaagtggtcagacacttgaagttatagacaggatcactgcaagtatgacacagatatataaatgtagaccaagtcacctaacttgtactagtaaatctgataccatgagtggcattgttaatagtgaggtgatttccaaaatactgaacaactcttggtgaggtttgagtaaatcaaggtgcaatcttccttcaattcacatagtacttgcattcctagacaaattgctgtacaacaaaaccatgcaaaaaaacccctcatggatatatgtaaaatagtttggtttcagacttagaaaagtatagacagtttttactgtcatgtgtgaaaggaactgttctttttgtgtaggactatttcatgtactgcaagatgtctggtatcctgggccgcacccaataaatgcctggggtgtcctctaatcattgtgacaaacccaaaatgcctttcaaaatgtcgtattaagaatcactgagtgagatgctttctgttccaagtaacagaaataaacccatactgattcaataaaaatatatgtatattgattggctcttgtttctgatcagtccagaggcacatcagtttcagggaagtttccatctgaggtcaaatggttttaccattctatcagtggaggcatactgtaaacaaataaatagaaaaattgatgcatattttataaatttggacacattttatgtagaaaaacaacagagctgtgaaagagtacatagattagagaatttcttttagattggtcaggggctgagtgcagtggctcacatctgtaattccagcactttgggaggccaaggtgagaggatagcttgagcccaggagttaaagacaagcctgggcaacatagcaagatcccatcagggaagacttctctaaggaagtgacatttaaggtgagatgtgaagggcaggaagggcttggcctgtaaagagtggaggaaataacattccatgtggaacaaatagcatatttcacagttttgctttcaccagttttatgtggactgctagactgaaatgatattttacataaaatatgttttatatataaattattcaacacacatgtgaggttcagttggacaaggcctctcattatcttactttataagtctttgtggatgtctctaaaacagaatggtttattaaactaatttgggaaaggagaattagtgtgtatctttctctttttctaaaaaaatataaatacattcttgcacaaaatcagtcacgtttttcacaattgtcacctatacaatgatatacggtgaaataattactttaataataatttgtctgttttctctgcatctgattgaattctgctcatagctcaatattagctccagaagggaaaaaaatcttaagagagcaattgaaaatgcatttgttggcagcaatttccatccctgaatgcacagtaagttctgagcttatgagctcagaaaaaagaaaaatctttgtgataaataatgcatttgataatgagcagcaggagaaaaaaagtgttttctgttgaagagttcaaaatgaaatagagtaagtatgggaaaaggttgctcagtatgaaggacatctttcgcatcatggatgggtatggagccacaacagccgtaactgtttattttttattctcattctcaccatgccagtctgtggcatatattttcagacctttcgtgaataccaattttcaaaagggtttagttctcagattctatgtcactggatgatttacttacatgacctcatttaaccttttcaactctacagataggaaagtatgagtatccccattttatatatgaataagctgagaggaaggttaactcactccctcaggctcatagagcttagccgacatctgagtcagtgtaaattaaataaatatcagggatttcaaaataagtgtctaaaatactattaagaacagaaagctttaagctccttcaagtgtctggcttgccgcgtgacctagactcttaagtggagcgtcagcttccagtttttgaccaaataaagcatttatcccataggaatattaaggcacccatttacttttttctccccattatcccatttgtccccagagcaatgtgggtgtttggcaggtgccagacagtaaattactgttctaaattgtgcctcagtggcccaataatattaaggaagcatctcccacagtgtcaatctgtagacaagggaataattaatgtatttatcaaagcagatggatttcagaggaatgtgaatcctgctctaagcacagcatcagggtttgtttttttttttctggagtttagtgaactgggctttgtaacttcttacctgattattttgctgccctgtttgtccttccttctttccctttttagcagttctactctgtgcttcaacttttcatccccttattaagactgctgcatagaaaacgtaggagtctggagacaggcaggcaaagtggggagtgaggaagggaaaacaaacattctgagaaggaactgttccgtcccccgagctgacagcgcccgctctttgttttgtgatgactgctccctggccttttggttccgagggagtgcagggcagcagtgtgaagacctgtttacgtccactccccactccccggggctggcttcgggacgaattcactgtggtattaacagagcccgggacagagcctggcagaaggcagatggatgctcgtgcccgtcggctggatgaatgaaaggtgagcagcaaaggcgataccaggatcgtccacggcgggactggaggaggagaatgggactgtgcggagcctgcgggaagaatctgaaagtgtctgtgtgatggagagagacatggaaaaggcgacgtcccagcggctggaactggggcggaggaacgggaacagggaaggcctgagttaggcaccacaaaggttttcaggagaaaagtggggcgagccgagagggtaagggcgagacaaagagcagcagccgaggctgttcgtgggaagaaatgggaaagaagcagccgggagggcgggcggacggacgcgaaggaaggggcgcgggtggggaggggcgccgggagctgggcggggcggggcagtgcggggcgcggggaggcggctcggggctccgggggccggaggggcccggccgggcgtggggggggcggggcggggcgcgggcgccgcaaagttacttggcctgcgcccgcccgggtccgcgtgctggtggctggcccgcgggaggagcgaagcggggctcggtgggctgaaacccgaaacctccagtcccggagcgcggcggggaggaaggaagcggcggcggcggtggccgaggcggggaggcggctgggccggggcctgagctgccgcggcggccgctcctcggtgagcacccggcgtggggcgcgggcgcgggcccgggcggagagggcggtccggatggagccaggctaaactcattgtgcgaggctgagggctcagggcgcgggccgggaagggtccccgcccccacggcgctccctttctccccgcgcccctctcggaggtcagggctgtcctccgcccgcactgcgccttgctttggagagctggagctctttgtgggaagatgttgggggcgcgcccctcccctgcggcctggggcttctgagaggcccaccccattctgctgggtgcagcccgccccgtttctccggcgccgcccgaagcccctaaacagtccgctggatgggagggcgtaggtgcgtgcccgggactctgccgatgcgggccgcgccccctggggccaagagactccacgtcccgctcagggcaaagggtgtggggagaagcggtcacgcccctcggctggaatccgtgaggaccaggtgagcagccttctcccagccgggactcagggcgctgtctccccgagcctgggcgggcggcgggtggcgcgcccagaagtggcccggcgccgccggatgggcggctctgcccctcagatctgcgggagggagattcggctggttcttggaaaggggagaactcgaccagccctcggcgccttctgggccaagcttaacccccgtgcaacctttggacaaaggcatatgggatgagaacgtctgttgggtaagtggggtgtgtcctgtgcttcccggaggtctgctcaccagtaaccacatagctgcgcattggcatcgctttatatcacatcttggaggctatttttgcttgttattgtactttcatcccttttgcaaagtgctttcatagagcaggtcatttgatccacctcccggtgaagccgtgaggaggtgtgtggttttggagggaaagaacctcagttccttgattgtccaatggagacaccgataacctccggtgagcctgtctcagcgtcctaggggctgggggaggatggccatccttgtggctcctccgtggagccaggcgtggattcagcctggcttcttctcccctagtgacctggacctccagatgagttctggagagctactgcttcggggaataggcggttttcccttataatctattttactgcagccactgggagcaagtgaagagaggcatttttcaggccctcagggcagaaagaggaggtgggagggacctcaggtcatagagacagaggctcttcaactgtaactggaatgcatggcacccatttctgttacttctttcagagcacctctcttccggtcctcctccacacccgtcttattttatacttgtca

SEQ ID NO: 3912 - DNA, 6000 bp, Homo sapiens
ttaagcaaatcaatgagtacatggtttttcttgatgtcccattaaacatagagcatggttgctcattcttttaacatttttgggcttctacaacataccagatacaaagatttatgacagagaatctgctctcaaaagaactcgatgagaaaggaaatgtaaaaagagaactgtgacacaaccaagtaacttttataatagaagcatctacatatcaaggtgactcaaatgggaagtggggagcagtcagattaggtttcccaaagatattaaagagataggaaaatcttggccaggcatggtggctcatgcctgtaatcccagcactttgggaggccgaggcaggtggatcacctgaggtcgggagttcgacaccagcctgaccaatgtggagaaaccccatctctactaaaaatacaaaatttagctgggcgtggtggcacatgcctgtaatcccagctactcgggaggctgaggcaggagaatcgcttgaacccgggaagcagacgttgtggtgagccaagatcacaccattgcactccagcctgggcaacaagagtgaaactctgtctcaaaaaaaaagaaaaacatatatatatatatatatatatatatatatatatataaatataaatcttgaagacaaaaatttaccagatttgggccaaggtagaaggaaaccaagactcaaaggtataagaagacagggagtggaagtgctcagtgtgtcagagacagaggtggaagaggggatggggggaaatgagggttaaactataatgggaacttctgcctctgtccacttggggaaaactgagatcagacttaccccgctatcaaaaacaactgggaaacgagatgatctatgaggcaatgattttcagtgtggaaagcagacagcacaagatatgatgcctgaaggaagggaaatgaactgagtaaatcttattgttgtcttggttttctgtacttaaaaggtagctacagtgcagaaggagatccaaagaagagtacagaaatcacgctgagatgaggaaatggagaccagagtttgggggaggctgagaaaccagaatttgtggcacagagtaccatacagtaggttgctgcccagcaatgaagagatccagattgaaaacagaaatcatcacagctgaatctgaaaactagaactattttagtcaaaaacaagttatagttacaaggtactgaaaaaaaatcgtgattctgcaagtaattccaaaagaggaattttttaaatgttttgagcaacgtacagtgtcattggaatagggtagattaggtacatacttggaagaaacgaaggaagaaaggaagcaagcatcacaggccggatggacagatactatgtctcattgtttcttttcttaatagtttttaggaaaactttccaaacccaaataaaccaccaagtcctggttgcttttctttgtctttggataatgtctttcacaaaaacgaagcccacccttgattatcttcacttacagggtaatgcctgtgggtccaatggaggctctggctgaatactaagctgtatgtgcataacacaaagctccatgggtctgagcaaagaatgtacaggcagctgtaagctgaacaattctcggagctcacaggggattcggatacatctgagttccaacccaccaaaggggaagagttcactgaacacacaggcattcaactgcgaccccagaagagtcacaccctagtaggaaggctaaactagtcctagaataaactaatcctataataatggctacgagcctttaagacaaccatcaaaaggatcgaacatctgtaaataaccaccttccaaaacaaagtccctattctttaaaagaacacagcatctactagaaatacaaaaattagctgggtgtggtggtgcacttatggcacaatatcaaatggtctatcatatctgtgattggagtcccagaaggagaagagcaagataatgggtgaaaaatttttaatttgatatattttgataaaaattgtaaacctacagatccaagaaatccaatgaacaccaagcagcataaacacaaagaaaaccacatcaaggcacatcataatcacactgttgaaaaccagtgatagaaaacttgacaatcagccatagaaaaagagacgcattacatatccaggaaaaggataaagatctgcagatttcttttttttttttttctttttcttttcctttttttttttttttttttttttttttgagacagagtctcactcttgttgcccaggctggagtgcagtggtgtgatctcagctcactgcaacctctgcctcttgggttcaagtgattctcctgcctcagcctcccgagtagctgggattacaggcgcccacaaacacgctcagctaattttttgtattttttagtaaagatgtggtttcaccatgttggccaggctggtctcgaactcctgacctcaggtgatccacccacctcggcctcccaaagtgctgggattaccggcgtgagccactgtgcctagcctggagatttcttcagagaaagtatgcaagcacagtgaatgatatctttaaacttcttcaagatgtcaatctaaaaaaaaaatcctccaaaaacaaaggcaaaatacttatattcagaaaaacaaaaacagacaatcaccagccaatctgtattaccaaaagaaggttaaaaaatgttctacaggcagaaggaaatgatatcagatagaaatctggatcttcacaaataaatgaagagcatcagaaatgataaaagatttttcaaaatcatttctaaatgtttcaaaagaaaattgacagcttaaagtaaaataatgttctgtggggttattacctatgtaaaagggagatataacaaaaataatacaaaggatggaagagggggaatggaagcacacactataaagaatctaatagtgaagaagaagtggcatgatgttatttgaaggtagtcgacggtaaattaaagatgcattttataaaccctagaacaaagaaagaggaggaaaatgaaggtcaatacttgagataaaatggaatactaaagtatactcaggcaggaaaaaaggaatgaagaataggacaaacagaaaacaaatagcaagttggtagttttaaacccaaccacatgataattacataagaagtaaatgaactaaacattccaattaaaagtagagatggggtttcaccatgttgaccaggatagtctcgatctcttgacctcatgatcctcccgcctcgacctcccaaggttttccttctttatccctagtcatattctttgttctgaagtcttctttgtttttatctatataaccactgcggattttttactattagttgtcaagctgacagatcgtcaagctgaattttaaaagcagatccagctctgtgctgcctacgaagatggagaatcccacttttaagaacaaagatacaggccgggcgtggtgactcacgactgtaatcgcagcactttgggaggccgaggtgggaggatcacccgaggtcaggagtctgagaccagcctggacaacaagttgaaatccggtctctactaaaaaggcaaaaattagctgggtgtggtggtggacgcctgtaatcccagctgctcaggaggctgaggcaggagaatcacttgaacctgggaggcggaggttgcagtaagctgagatggcaccattgcactccagcctgggcgacaagagcgagagtctgtctcaaaaaaaaaaaaaaaaaaaaaagatacagatagatttaaaaattaaaaggatataaacacatatcatgcaaacactaatagtaagaaatctgcagtggttatatagatataaacaaagaagacttcagaacaaaggatatgactaggaataaagaagaaaaaccttgggaggccgaggagggcagctcatgaggtcaagagatcgagactatcctggccaacacggtgaaaccccatctctaccaaaaatacaaaaattagctgggcatggtggcgtacgcctgtagtcccagctactctggaggctgaggcaggagaatcgcttgaacccaggaggaggaggttgtagtgagccgagatcgcgccactgcactccagcctgggcgacagagcgagactccctcccactccgcaaaaaaaataaataaataagaagaaagaaaactgatacccagggtcctggtgccagactttacactactgcagctatcctgggtgatgtccagagatgaacggaatcagaattacctggagggtttggggaatcacaggttgctgggccccacccccagagtttctgattccttaggtctgggtggggcctgggagtctgcatctctaaaagattcccaggtgacacgctgattctactggtcttgggatccactctggaaccacttgttgactgacctcttcctcctgtttaaaactgacatgatcctatcttgaatgatagtgtaacaattagaaagataaaataaggaaatgatgcgcttgaaagtgtagacactgatttcccttgtgattgattaattgagattgggatttgggataaaaggaaacctaggattctgccttagccaaccagtcgggggcgggaggtgggcaggaaatgcaggagaaataagattttggggtgaaaacaatgagctagggtttggatttgcttgaattttcaatgcagtactcatatatctttctcacttttaaaagtctgtgaggtggacatggactggcttcgtcggtttgccaaggtttaattttgtgccttaaatgggcacttgagagctttgtaaaaaccgatgtgtttgctggccccgtgtttacgggcctttgtgatctccgcgttcgcatccaatctggcccttgggctccgagaaggtacacgtgtgtgtagggcaaggtccaaccagtggggccagggatctgagcaacaagcgcgccctgtgtcctttgtggcagggaccgcttgtggacggcggatgaggatgaggcgcccagatcttcccgaaatatttcctaatcgttcatcatgatgttatgttgttgttttcacaaagggaattaatattggcctccttttctacaaatcttgccaacactgcgtgaaatgttttcgttgcttctctattcccaaggtttcgtattattttaccaagtcggaaaatggacggcgcttaaactgttttttccctgaaaggaagagggctgtaatcactaaagtgttttaaaatctccagcgcaaaagcctgcggtgccacagggacgaggcctggagagcagtcgctcctagaaccggggcgcgaagggcacccccgcctccagcacgcgccctccgccctcccggcctcgctccccccggagtgggggcctcgccggcccctggtccccgtcactcagcaacgtcgggtcagccttcgccgggttagtggcgacgcggccgcgcgaattcgcacaggtattccgcgtttctccgccgttccccgccttggccggaggcttccgaggcgtcccttggtgcagggtgggaagcggcccgcgccccaacggcccaggcgctggagctcaccccgagcgagggcggtacctgaggcttcggggagcccgcgctgaccgcggccccgtccccagacccctccagcaaccccggccccgccccagacccctccggtgatttcccccccggccccgccccgcagatccctccagtgatctcccccccgccgcgccccccagacccccccccagtgatttaccccccggccccgccccacagacccctccagtggtcccccggccacgcgggctccgggggggcggggcgggggcgcggccctttgctgggacagggggcgtgggcccgagtagcgggcggggggcgcgggcccgggctggggcgggggcgggggcggggagcgcgggagccccggtgacgcagcagtgacgtcggtggc

SEQ ID NO: 3913 - DNA, 6000 bp, Homo sapiens
aatagttttctataactgtgttgctcaaacttaatggcagtttttggcctactctcaagcctcaatacctcttcccttcaacccctgacccttttagaagtgtcttagctatagccattggccagagtagggcagtgaaagtgatactgtgttctattggcttacactaatcacaatattctgcacctatgtccattttcatactatttcagattctttgttactcaaactgctgttattcttatgtatattttaacaagtgcctgatcacttccctataaacaaagatacttagatgataaatctcagtttaaaaattagcataacgtctgtaccagaaatatatgaacccactgaataaaataatcttcagtttcttaaggttactaaaattaaaaacatgagtttctacagttggaaaaaacatgtatggttaaaatgtttgaagcccatcaatctctctaaccacataagctaatgagttccttctgttttctttgaatgaaatcaccatgagtggttatatgttgatttaacataaaacaaatggaaatgggtgtttcctttgtcctttgtagaatttattttaaaaaacaattagcaactattatgaataagtcaatgattttgccattacttaaataacaatatagattgagtaattaaattgattggattgcagggaatgcgtaacatactccaactctccttaacttgcacacatctgtagatattattaagcttctcatttcatttttttctaccataacacctgtattgttataaattatgttatgaattgtcagagagtgccaggtaaattatgttttttgaatgtagatatactctatggtgtgtgccttttaagtgttcctttgtaatggcaggtttgtggctaacagcttaatcttgaatctagcaatataattaaacactatttcaattcttctttgtggatatacaaagaaggttgaagtattacctctaaagaataaagaaataattaaaaatctttaatatttaaaacattgtcttacacaagcagtattcttaaatgtaattttaaaacatagcaagtctattatatttttaggagaaaagtgtggaactctttgaactctatagaatacacatcctattgaaataagatttgaaacttctatggggcatttttctagtttgtataattttaattcacttttgataaattcttcccccttccaagcatcctccttttttgtgatattgtctctttaagaatacagtgaagagtgattcacttatgtcctgagcatcaaagaatgtcaaatatatcatgcagatagataatgggtttttccagagattatttctgagagagttaaataaataagtaaatgagccaacatatggccagcttaattcaggcaaaaatgtctattgattacttactaagctcactaaataaaaacttcagcctaagttttgcttcccaaaagaaaataggattagactgatgcatgcactcattggggcttttgtgaatggtgcccagatgagtgaaaaccttcaaagatgaacaaagaagggctaaaatattttggtaaatgcaagttactatcagtttgacttattctcttttgcaatcctgaatgaaataattttatattcctaagaagatcataaaattacctctgaggtctgagaattagataattctgccttcttttcaacgacttgaagtagcctgatttaattttgctaggtagatctgttgtatgtatgtattttgacatatgtaaaaacttaggtacgttataaggttttgcaccagctctgcataagtgtactttatccagactagtttatatcctgcgtggttaatatttgaattatgttatgtaagaaattccagatgtaagtgtgtatgtagtttaaagcaccaatgctctaagttgctccttttatcttttgaaatagtgagaatattaaaacatcaatacatcaggtagaagaaattagattatcaaaggttcttttttaatctgagaattacaatgaaaccaccaaaagaacatgttctagttatttggacacacgtacatttaacctatgatttcctacaagtcaagaacaaacttgaccagtagttggattggatttactttagtactacacctatctggctttctgacaaaatactgataggtatttaggatcttcatgtattttgaacaatctgctgttgacatattaataacattgtttggaatgattcctgaagtatgatgcttgcaacattcctgcagcaccaaaaagtacctattgtttctgaaagcaaagcagcttaagttttatcctactttctaggttttaaatattggagaatcatttttttcttgaaaaaaaggtaaatatgcttatttaattgatggctgcattcattagtagaatcagtggtttacaaatacatctgaaaacatagctgcttccagctcagaaattttgcaataaaaaaaaaatccatgtttgaattttgtggcatgcacaggacacttaactggcttttaaacgtttttccagcgtgattcgccctgtcctgctctgttcctttcagcttaggtccatcgtaggctctgcctggctgtttgctgacattgccaaccgagaggggcaaggaagtgtgttcagaggacaagagcaaaggcagtttcaatgtaaggaaatgagggaaacagacctaacagctctgtgactatacttgagagtaaagagccttgtagtctcctttccttcctttgcttatcctggtgagtttaatcaaaaacaaacaaaacgctcttgtgaaatatagtcaataaagtcaaagtttagctggctctacgtaactacaaagaaaaaaatcatcgcaatttaaaaaaatgtaactttcattaacgagcgcgccggaaatctcaggtatcaaagacgcattaaccctggagcgtcccccgcgcgccgcagccggacggaggcagccgcggcgaacagacgttctttctcctccatgcagttacacaaaaggagggctacggaaactaaaagtttcggggcctctggctcggtgcgtggagaaaagagaaaacctggagacggggtgggtgaaagacgcatcccgggcgcctctccgaagtccaggccgggagcaagctcctgggcctagaggggagggggccccgagccgctggtcatccccctgcgctcagcctcggagcgccgcgcttcgcggcgctctcccaaatactcttcacccactccagaaataaaataaatgtttttaaagtgcatgtgtgtggacaggatggagagcgcgcgccggcggagcgcgcggaggacccagcgcgcagtgagtggagtttgggggtgggctaggggttagcggttgaatgggtgtgttaatggggggagctggaggcagagctcggggacctgggggtagggggagcgcgaaccgactgggaggggagagaaggggaggggcgcgagctggcgcaggccgcctccggggcgcgttccacggccgtgcgcgcgcgtccctcgccgccaccgccgcccggacagccctgcggccgccccgccggcggagccggggccggcctggtcctcgggcggctgcttggccaccgccaccgccgtccgaagggctcgagcccgtaagtatcccctttcgctcctcctccccgccgcttgggcgcacagccgcagcagctgctcaaatggagtggaaaacggccattgggcgacaatgagttatagattatctgctccacgttttgtacttagctgcctgtaatcttcttttgagtttgcccgagccccttgctggaaaactcaggagggagagatttgtcctttgacgctgtacacgctagtatgtttatatgattagcccaactggcggggagggcggatttgggggaaggaggaggaggaggctggaggtgactccagttcagacctcgcggagagtctgtgtcaggacttcgcattcccccgtctctctctctctccctctcgctccctctcactctctctccgctcacacacacgcagaggtgctggggcgaaatcgggagcttaccagagaattccttgggattgttggggggcatctcccctccgctgctgtgtgtggcgtggctcttcccggctactccttgcttccccgagcccgagtctgcgccgccagccttccttggggcagcggccaccgctcagccccggccgggagatccgaaatgtgaggaggggtcgccgccgcctcccgccccaggccgcagggtcggcgcgagggatgctattccggccgggcgctcggggggctgaggggcttcgcctgacaaactgagttggcctcgcgcccccggcgccctcccgcccgtcgcttcgaagggactcccaagtctgcgcacctctgtcaggcttttgcttccaccacccctttcgctctgattcccgatttttttttcctaagggagcgtgcggtctgggggtgtgtgcgtgtgtgtgaaagacctctctcgaagagcggcgtgtgggaaactgcgggaaaatgttgacttaaccccaggagccgcccggcgctggctgctcggctggaggcggcggcggccgagcaggaggacgcgccgagctgcggcgccgtgtccggccggggagctgcggcgctgcctcccgcgcggactcggcggccgaggacccgctcgcggccggcctcggccctctccggccggggtagccgctgccctccgcgcctgtccccgcgcggcccccacgccagacggccctccctcggggcgcgctcgcagacggaggtaagagccgcaggagcgaacaatgtgcctctgtgcccagcttcggagacctgtttgctttgcgcctccagtccgggggtggatgctggaggcgcagggagccgcgggttaatggggctcggctgttgctgttcggctggcccagggggagacccgcgctcgctcgggctgctcgctccctccccccaatctcctcttggaaatcgatccgcagaactctcagtccggtccagccggcttctccttttctcgtggagccattgtaacgctctccaggcatcagtctagttgccgggggcgctggcaagggggttaggatgaggctcccgtagccatgcattttttaatttcataaaagcttggggtcgcaaggttccgcccgtcctttcactgggggcctggggaggaggagtgtgaagcgcgtcctcggcggagcttatttgctccgggcgctggggcccggggccaccccagcgtcccgcccgctttgccctccggtcccgcactgtaagtggagcggggaggctgagcggctggagcgagttcgggggaagtggacggtgggggagggcttggacgagtttttgagggttgctgttccttctcgtcagtggttaggtggtgtggggaggcgaggatgacagtaaagcgcagccagatgtggtcgggccgccgccgggactggctacgattgggagcggcggggctgctgctgccagggcggcctcgtgggtcgggagggtgcaggggccggggacccggcgggccacggggagggcagagagcctcccggagccgcagtgagagggcagcagcgggccgcgttgggcctgcgggagaagttacggagtgtatgctgctggagtggctgtggggcagggagcctcgggagcttggtttgtgggatgggggtgccactggggagtggcgacgagagaaaggcgtgggaggagcgcgagggaaggggagacccccgcgctgcccgagcgtgggctccttgattggctggggcgaccctcaggcagagggggcgagggcgagccaaaccatggaagcgccccagcagtgtggaggtgcgcctgcgagacttctgcgcttgggacccgtaaagtttgttcctttcgccagactgcggggtgggggtgaggggagaatactggaagcttta

SEQ ID NO: 3914 - DNA, 6000 bp, Homo sapiens
gaccagatgtctctttatacctggagccaccatctggtagcccagctgggtctctaggctactctaagggcagctctaaactcattcactttacccacaaaactgcattcctggccaggcacagtggctcacacctgtaatcccagtactttgggatgccgaggcgggcggatcacaaggtcaagggtttgagaccagcctggccaacatagtgaaaccccatctctactaaaaatacaaaaaatagccgagcatggtggtgcatgcctgtaatcccagctacttgggaggctgggcaggagaatcacttgaacccgagaggcagaggttgtggtgagccgagattgtgccactgcactccagcctgggcaacagagcaagactccgtctcaaaaaaaattaaaaaaaaaaaatactgcattccctgactctcaggagctgcctgcggaggggcccagggctcaggcacctcattttcctctcattcttcaaaaattgagagacataaagcagagtgtcaacaattattgaatccagacaccaggcacagtggctcacatatgtaatcccacttgagaccaggatttgagatcagcctgtgcaacacagcaagaccccctctcaaaaaaaaaaaaaaaaaaaaaaaaaaagctgggcatgggtggcctgcacctgtagtcccagctagctactcaggaggctgaggtgggaggatcacttggggctgttctcaagcagtcaaggctgcagtgagctatgatcacaccattgcactccagcctgggcaacacagtgagaccctgtctgaaaaaaataaaataaaaattgttgaatctagcaggagaatatctgggtatttattataccattacaccattcttttgatttttctgaaggcttgaaattttcccaaataaaaaactgggggagattttttaaacctaaaaatgtttattagtttaaaaaaaaattactttcactgccgagcagagactggtttggaggggaggtgaccacatgaagaatccataaaatcctgactgagtatccccctctgtgacagacctgaagtggggaactgagaaacaacagagcccccacaaggagtgcaccttccagccttgaagaaagtggggaacagtgggcggggcacgacaggcaagtgtagaccgaagggtgttcagatttctggccacccccatcccccagtctgctggctcctggttccttcacgccacccaccccacagtccaggagctccaggagtcacccatggccaggttctctccttctggtttctgtgccctttctaaagcagcacagagcccagaaatgggatcgggtgccagggcctctttctctttccagagaaactgccctgcccacccacaaaaggtcaccatgaccgatcccatcagcagcctccctccccacccctccttcccagcaggccattggttccagaatttcaggccacagggatctgcccaaggcagagctcaccttgttcttcctcaccagcgtgctaggccacagcagagccaccccaatcttcagctccagccaagctgatgcttgcatttcattcattcctttcattcattcatagtgtactgcttaagagagtgggctctggggtcagattgccggggtccaaatcctagctcttccattactagctgtataatcatggagaagacacttaatgtgtagattaagtgacttaactgatgaattcctcttccaggaatgctgttcctgattcttgaagatgcagcccaagtcccgtctcctctagaggccctctgggatttcctccaccctcactgctctgtcctctgaattcctttagccttttctctcagttgcttctggagcacttcacccatgcgaccctgttgtgttgaaagccagggccatgccttatccagggggtcctcaggaagcaacctgagtaaggaaatcccaccagagctaaaggacagccgcaaggctagccaagcaggtttccttccttcccagagcctccactgtgaagtgggaggtttggactagaagaacaataaattctcttttaacagaccccaagcccttgctgccccttgatagcacctaaaagctatgcagaagggaggcctaaatgtcccttacacacaggagggaggtccataggttccttacaactggaaagctccatgaagcaggcagcccttccctggggatcagggaggcctccaccagggcaacccctccctcatttgagactctcagtgatgcatatgaaacttggaaatttccctcctgcttttgggagttggaagtatctgaggaagtgatggggagagagctctgtcctgtgcccccggagggaggactggggaggattaaggactatttgccaaatgtgcttggggatgaaggaaagggttccttggatcccccaacctatctgcctttgggtggaaaggccacccacctggaaggggcttctgagctcatgccttccctggcaacccctgcctcaaggtgcaaggccccagaaccaccttccgtgatccagagccagggctactctttcctcccacccagaaagcttattttagcaacaaagggagcgagatgaatggagagttgcagcttctccacgggttggcttgggccttcaccagaaatgagagtctcattacccaaccccaattcaaaggataattaacagatggtataatttccaagcattctctgcaccacatggctattaggtgaagaacaaaatgcccacgcagcccctagatccttccaaactccagagtctgaggaagtctagagaggcagagccctgcggaggcgtgtaacccacgcctccatctccagagctgcccttggccttgctcagaggaagaaagctcctgtttggtcaaaggggagggcatttccttgagccatgggtcctcctcctacttctatccatcctgccaggagcacagtctaaccctaatctttcttgctgtacccaaggcccatctcctttcctgtttccccaggggaaaagagaaaagctgatttctcatccttggcctcactgtgtggtcacacagacactccttgggcctggggctgggggatcctctgctgtgacccagtgagagtggcaccactgtgaccgggggcagtggtagaagggagcacctgatccagtgcttttcagatgggttcctccagaccctcaagttgcacagagcagcccagggatttcttggttgggggagtggtggagaggggcaaggccctgaccccctcacttcaacccagcagcactactcatctgttctatattctggccttccacttcagatttcttttgaagaaaagaattctactgctaaataaacatttgagaaccattcaccttattcaatcccctcattttacaaaaagggacattgaggcacagaatttgagcaaggtcacatagctgtggtgttggaggctgggacccaggcccaggcatccccccaggccagggcatccccccagggactacctgactgggcccctggctgctccaggatgtagggaagccttttctgggtcgcctgcacggctcctgcctggctctccgtgtggtccagcttcatgtctggtcctcttggagaacccctggaatcctgcacaccctctcaaatgaagctgccttggagagggtcaggagcccgggtaccaggtaggcctcctcgctggtcacaaaactgtggcggaaggagggggtagccgcaggacatggacagggaggcaggaggggatgagaggccgcctctctagacaggacctcagggggcagtgtaagccccttgtctagaatccaggaagcctgtgttaaagctaggctccaccgcagccggcctccgaatctggtgacagtgtgtttgcaccacctggcttccacccactctgacccttctaatttacttccctggaaaagcccaagtggtgtccaacatgaggctggggtcattcttccaacagcccgaccccaaggggcatgctggtcagacaacagcctcgctggtggggtggaggggacggtagggagcgagtgggcccggtgactcattgtgggtgcttctctgggattttggaggctttgttgtgttgctcagggcccttttaactctgtctgacctatgggaggggacagcaacgagggcttttatgactggaatgaactggaaacttggcctctgagagcccttaaaatgttttggaaacctctaggcatacttagggtacttccaccatgattatcatcggctgtgtggcttccgatcgctaattcgcaccgggcatctggcgaggccggcctggggaaattgggatggagggtcctgctggagggaatcctggcgctttgggcggaggagtgctctgggtggggcccacctcctccagcgcggccggcgttgccgctttaaggcggccgcggcgcgagcaggtctatggtaatgagccgccgccgcgactctgcagagctcgcccgcccgccggggaggcgagggagcgcggggctgggcccggggccgcggcgacaggcagcagccgcggcggggacgcggggcgcgagcgggcggcgcgggaccgtcgggggccgccggggccgggccggggtcggggcgcacggctacgcgggcgcaggtgggcgatcccataggggcggagggggcaccccggctccggaacccggggcccggcaaggccaggggcgccgcggggcccccgggcgcaggtggtgagtgcccggagcgcaggtggaggcgcggcggcagcccgcggtgctcagggtgacccgggagcgggtctggctcagggggcagtgggagcccgggctcgtcggagggtgcagcgcggggtcccgccgagccatccagacgcaggccccgcggggcgcacgggaggcccccggggactggcgccctggcccgggcatgaggcgcggcggggccggcaggagccggaggaggagccgccgccgccgttgacccggccgccggccgggagctgggagagatgcggagcccggccaccggcgtccccctcccaacgccgccgccgccgctgctgctgctgttgctgctgctgctgccgccgccactattgggagaccaagtggggccctgtcgttccttggggtccaggggacgaggctcttcgggggcctgcgcccccatgggctggctctgtccatcctcagcgtcgaacctctggctctacaccagccgctgcagggatgcgggcactgagctgactggccacctggtaccccaccacgatggcctgagggtttggtgtccagaatccgaggcccatattcccctaccaccagctcctgaaggctgcccctggagctgtcgcctcctgggcattggaggccacctttccccacagggcaagctcacactgcccgaggagcacccgtgcttaaaggctccacggctcagatgccagtcctgcaagctggcacaggcccccgggctcagggcaggggaaaggtcaccagaagagtccctgggtgggcgtcggaaaaggaatgtaaatacagccccccagttccagccccccagctaccaggccacagtgccggagaaccagccagcaggcacccctgttgcatccctgagggccatcgacccggacgagggtgaggcaggtcgactggagtacaccatggatgccctctttgatagccgctccaaccagttcttctccctggacccagtcactggtgcagtaaccacagccgaggagctggatcgtgagaccaagagcacccacgtcttcagggtcacggcgcaggaccacggcatgccccgacgaagtgccctggctacactcaccatcttggttactgacaccaatgaccatgaccctgtgttcgagcagcaggagtacaaggagagcctcagggagaacctggaggttggctatgaggtgctcactgtcagggcc

SEQ ID NO: 3915 - DNA, 6000 bp, Homo sapiens
tttaaagccagatcttccttatctctctgccccatctctagttcttgaagtgtctcatatgagtttggttgagaaatattgatcattacaaatcagttaatagttttgtagaagatctcatcttaaagacattgttttgttaatatactcccttgatttttttaaaagaccttacagacatacagctattcatttgtttttggtttgttcaaaaaaggtataaagaaatgcattcagagaaagatcatatattagccagttgaaaattaaacacaaaatgagtgcatattacattacttaatcttgcagtcaaaggtaaaaagtcaacctaaaggtatactacctgctttcttatcgcactgcaaatagaaattaccacaaattttattttggaaataatctcagaaaacataattttttatgtactattaaaacatttactttccaaatattctgtcattcaggagtatggaagtatcgatggcttctttaaaatgaagcaggagggtctggcagagagtatctatgaaataagttcctctgaccttcacgcttaattttctgaatggagtggagcaaattacttcaagcttcacttaacttgcatatgaaatgaaccgtacaaaaatacaagagtgtcaggagaaagttatgctctggtaaatattttgcaaaacagataaaagataatactagagctctgtcctcaaagagttaagcagctaatctaaggaggtaaactctatgtcagcaggatgaactgctcttccctttcctcctcaataaattgcaaatcatctagtccaacatctttaccaccagtgcctgaggctccagaggagccattgccttctcaaggtcacataggtggtgggtgagttaggaccaaatctagaattcctgactccagtaacttctgaagtcattttgttttttatttttatggttttattataagaatacttgctaagcacacttaccccctgcattgattaataactctaggatctcaggtggatccagcacatagaaatatgaattcgtttctatttggacttcatgatatatttacattatcaccttggaatcaccctaacattcaggattgtatcttgttataatcaaaaaggatgttgcatcccctgaacagtcatcagtcagggaagcagaggagggaaagtaatcttgcgaggaagagaaaatactatttaagggacagtcagagaacataatggaattcaaactttctgggaaaacctacatacataaatgtattagtggccatcctaaatgtctttatatctttgaggctttattttccctactccaaatagacacatttagttattcatttcttttaaaatggtatttctctttttaaactatttcttgacttttttaataaaaagagatgcaagcaagaggatatttaataaaaagtaagagagttgagcttaaggcttattaaaagaccccctttttctagttagtcaggagctctaatgtgccctggctacctattaaatggtggcaataaactggaagctcagtgatgactctagcctgcttctcctaatagctgttaagcctcaaatgccctttagagtgtgtatgtcctttaaagtagctattaagaaggaaagcagcagcagcagatattgtctagaaagaagccccaagaagctgaggtttcagcttgggcatttgttttcgccatcccatgctccatttccctctgctggaactgtgcacctcagtgtattctccctctatacctcacagcaggaactgcttgccccccccccccccccccaacatacatggctggaactgaatagacttttactttcccgaggtgcttctacagttccctctgccagcaggggaacagatggaaatagcaatcacctgccagaaggtggcgtgcagcaaggatgtgcatcttttgccgctactgctttctgattcctaaaaattactcagagatcactcatgtgttcagtgattcaggttctgttgaagataccaaagatattcggttggtcaaaatgacgggcatataaaggcttctcaggtttctgaggtaaactgaagggtcagaattccagttgtggatgaaggaaatggtgttatgactgcctcaaggttttgtagcaagtcatagggaaccaagaggaatcttgttttcctcagaggtcatgccaactccaactcccgttccctaaactgtctctgagccatagactagtaatggactcttcaagctctaccattaggtatcttttaaagaaagctggttattactatttattcatttttttctcttctgtgcagtgcaaaagatatgaaacatcggctaggtttcctgctgcaaaaatctgattcctgtgaacacaattcttcccacaacaagaaggacaaagtggttatttgccagaggtaagagaaaaggccttggtgaagatgtacttagtattaactatctgatgatggggatgttctgtgagaaggaacttgtgctcctagttaagccagatttggatcaagatagcctccattttcatggagatcataactacatttgaaatttctatacatttagtgaaaaactgccctcatcaataacatattttgtcataacgatggaaaataaaatctttgccttcattcaggatcttagatttcttgccccaatttttttaccatggcattccaattattctgtttctctctattttttctagagtgagccaagaggaagtcaagaaatgggctgaatcactggaaaacctgattagtcatgaatgtaagtctgacagcaacctgggatgaggtactctggataagacaagttatattatgctggtctaatagaaactgcagcaaggcctggcttctttctgatgttcagactcaggagactctttaggtcttaaattcagtctgtttaaaattttaatatgccctagagctttgtgatatacaatgaaaagtttatgcaggaaccatgtggaaaaccatctctctcatcacaaggaaaaacggaagagagaaaaaaaatgataaatatcaataccttcttgcaaaatcaatctcagtttctctttcccaaattgaccttggtaattgatagctgcataggcatttcagaagcaaaatacttccttgaaagaggcttccaacttgagtaagaatcattaggtagaactgggaaccactggatatcaaacacagattagggttacctgactccaggtgacttgaaaaaagcaggggaaaaagggattgcttgaatccatgctttatcccccaagtacctcagctttatgtgaaatagcatatccaagaggccaaccagtgtgatgacaactgtggtcctttctcctgtatcataggtgggctggcagctttcaaagctttcttgaagtctgaatatagtgaggagaatattgacttctggatcagctgtgaagagtacaagaaaatcaaatcaccatctaaactaagtcccaaggccaaaaagatctataatgaattcatctcagtccaggcaaccaaagaggtaggttttttatggatacataaaaattgtacgtatttatggagtatgtgtgatattttgatacatgcatacaatgtgataacaatcaaatcagggcaattgctatatacatatctcaaacatttattatttctacgtgttgagaacattccaaatctcctcttctagctatcttaaaatatacaataaactattgataactatatcaccctaatgtgctatcaaacactagaacctattccctctacccaactttctatctattccttctacccattagccaacctgaccaaaaaggtaagcttttatggcagagaactctctggatcttagtgaaggttcctagaatagtggagctgactatcataatcttgacaaccccaaataaatcagttttttaaaaaatctcttttatccatgtggcttaccataacctccctgcatgaatttttctgatgaatctccccaatttgttagacagaacagaagatcttgccctgctctctctaaagcagaaaggttcattctgaacctttcatactctctcacatgtgccaaggaggaccccaatgtcacttttgttttttgcttctgaaatacagagggtgcactgccacttacaagtcactacaaagcatacaggcttgcatcctcaacagggatataggtctaatgaagccttggcctttgcccctcaggtgaacctggattcttgcaccagggaagagacaagccggaacatgctagagcctacaataacctgctttgatgaggcccagaagaagattttcaacctgatggagaaggattcctaccgccgcttcctcaagtctcgattctatcttgatttggtcaacccgtccagctgtggggcagaaaagcagaaaggagccaagagttcagcagactgtgcttccctggtccctcagtgtgcctaattctcacctgaaggcagagggatgaaatgccaagactctatgctctggaaaacctgaggccaaatattgatctgtattaagctccagtgctttatccacattgtagcctaatattcatgctgcctgccatgtgtgagtcacttctacgcataaactagatatagcttttggtgtttgagtgttcatcagggtgggaccccattccagtccaattttcctaagtttctttgagggttccatgggagcaaatatctaaataatggcctggtaggtctggattttcaaagattgttggcagtttcctcctcccaacagttttacctcgggatggttggttagtgcatgtcacatgacatccacatgcacatgtattctgttggccagcacgttctccagactctagatgtttagatgaggttgagctatgatatgtgcttgtgtgtatgtctatgtgtatatattatatatacattagacacacatatacattatttctgtatatagatgtctgtgtatacatatgtatgtgtgagtgtatgtatacacacacacacacacacacacacacacttttgcaagagtgatgggaaagaccctaggtgctcataactagagtatgtgtatgtacttacatgggtgttttgatctctgttctttcatactacatttgaacagggcaaaatgaactaactgccatgtaggctaagaaagaaatgctaacctgtggaaagttggttttgtaaaattccatggatcttgctggagaagcatccaaggaacttcatgcttgatttgaccactgacagcctccaccttgagcactattctaaggagcaaataccttagctcccttgagctggttttctctgatggcacttttgagctcctaagctgccagccttcccttcttttcctgggtgctcagggcatgcttattagcagctgggttggtatggagttggcagacaggatgttcaacttaatgaagaaatacagctaaggccttgccagcaacacctgccgtaagttactggctgagtgagggcatagaagttaaaggttactgtttttatcctctatccttttttcctttcctgatcaaggtgctcttctcattttttcctgagaaccttagccatcagatgaggctccttagtttattgtggttggttgttttttctttataatggctctgggctatatgcctatatttataaaccagcagcaggggaaagattatattttataagagggaacaaattttcacaatttgaaaagcccacataagttttctcttttaaggtagaatcttgttaatttcattccaaacatcggggctaacagagactggaggcatttctttttaggctctgagactaaatgagaggaaaagaaaagaaaaaaaaaatgattgtctaaccaattgtgagaattactgtttgaaacttttcaaggcacattgaaatacttgaaaacttctcatttatgttatttatgatg

SEQ ID NO: 3916 - DNA, 6000 bp, Homo sapiens
ggccagaggggagagagcccaaagctaaccccttctttgttagccccataggcaatggtggggtgacctgggtttcatttcactttctccatgaggaagggatcctggcctataaaggcaaccttggagacgccacacctgccatccccagggatcctggaggggctgcctgctgctgaggaggtcagaggcctctccctgctcctcctcagaaatccacacatccactcagcctgcccgccccacagtgttctgggctgcagctagtccaggcaacatctttgtgagaaatagaaaagggtgccccttgccccagtggccctaccacgtggggagcgggcagagttgatgagtggggcaggagcagattttgtcctctggttggccccttggccagacacctttgtctagaccaggccacagtggcatatttctatgagtcagcctggtcaatacttagttaaaaaaagtgatttaaaacatatttataaaagattgcttaaaggaggtttattctatggattcccttggatatcctaaagcctttcactcgaagtatggttcacagcccagcagcatagcatcggcatcatctgtgagtgtgtgaggaatgcagaagctcaggcctcaaccctgacctactgagccagaatcttcattttagggtttgccaagcactgcctcaagcttattcatggaataagtcagatcatcagtggagctgctggacagccactctctactccatctcctacagaaatgcttttacctagtttgtacttaggtgatgcaccattggtttatatccaggtctataagaaacagccctatggacatcacggttgatttactgcaaggatgtggtgaagaaatgggttcagaccagaagcctgctgctctggtggggtatttggaagaggcaaggaagcatcagcttcatttaggatgtaaggggctgactgagatgtctcttcctctgggaaaccttccctaatccctcaactctgggggaggcctcccctctgtgtgcctgccctgccgcaaggctcattcccttgggttcagattcctggttacttgtctgtttctcagaccaggctgggacccccaagaaagcaggggcctggccaccattgctctcctggtatcctcagtgctggcccaagccctctgcacatggatgctcaaaaatattggtggaatgagtaaagagatgaatgagtgaatgaatgaatgaacaaatgactggccagaggctgggaggtacagagcagaaaaaaaaaaaaaaacaaaaaccctaggctggagcagatggacctatttgagagagagggagggagggcagccctcttcagacctggtagtagcactaacctggctccaccacaggcaggagcccgaggtgtggcttccaacccagacggctgcggtgaggatggagccgcactggggagcctcttaagctgccagccagtcagctcgtggccaggcttgggtttcattagagtgagacatctgttctataaacccttccacttagaagcttttgcctttcctattcattctcttgattttttttaaagaaaacttcttttgaaaatttccatccaattccaaacaagctaggacgaacaaaggtatgtgcctgcccctaggcttggatagaggactctagcaacttgaggctgtgggttcttgaatctccacagtgtgcccgacacttgcctaggctctgaagatcccagataagtaagacttgaattttgcattaacagagattacaattgggtcagaaaattaccattgtgtgcgttaagcatgaggcaggagacaagcataggctggttgtggggggacttagaaggtgggtaggatggggcagcagtgggaaggaatgtgtctcattgtggaatcctgtgaagatccagggaactggggccaatggccagttaaccctgggagagaagcctggcaacaccaaagcccatggccatgccagcaaatctcaagtgtttattgagcatctactatgtgccagagcctggggaaagtgctggggatacacagatgagtatgatgaaacaatatacagaaataaacatccaatttcatttaatgacataaaaactgagaattattcatgagatgccatgggaacctagaggggagccctcagaaagcctgaggttcacgaagactttcagagtttgtttttttgagacagagtctcactctgttaccgaggctggagtgcagtggtgtgatcttggttcactgcaacctctgcctcccagccccccaggttcaagcaattctcctgactcagcctcccaagtagctgggattacaggcatgtgccaccacacccggctaatttttatatttttgtagagatggggtttcaccatgttggccaggctggtctcaaactcctggcctccagtgatccgcctgccttggcctcccaaagtgctgggattacaggcgtgagccactgcgcctggcccagagtttgtttttttaaactaaatataatatacataatagaaaagcgtacatatcataagtgtatagcttggtacatttccataagcaaatacacttgtgtaaccagcacctggaccaagaaagagaacatcatcagctttccagaagccctccacccccatgccctctgctggtcactacccacccccacaaagatagcaacgatcgtgatttctaacaacataggtaggctgtgcctgtgttttgaaccttatcataaatggggcattattttgcatctggcttcttttcctcaccatgtttgaggattcacccatgttgttgctggtggtcatagttcgttcatcctcattgtggcatggtacttactatgggtgaatacaacccagtttacgcattccactgtcgatgggcaaccagacatgttctagttgggagtatcatggctaccaccgctatgagcagtttcgtacggttgtctagtgagcatatggatgtgtgtctgttggttaagtccccagcaatggaattgctggatcagagtagatccaagggagtctcaagggggtgagaatgactttcctaggtggagaagtgtgggatgggtcactggcttgggccagtgatggagggcgagcagagggaaggacaggaggaagccacagtgggaagaggggcttgaggaccagcagcacactgaggctctgctgattgttccccgcttacctgggttagtttccagtggctgccgtgacaaagtaccgcaaactgggtggcctaaaacaacagaagtttattctttcacagttctggaggccagaaacccaatatcaagatgtcagcagggccacattcctgtcaatggctctaggggagaacccactgcgtgcctcttccagcttctcgtggttaccacatcactccaatctctgcctctgtcttcacctcaccttcttctctgtgtgtgagctctgcgtgtctacacaagggcaattgacattggatttagagcccactcagataatccaggaggatctcctcatctcaagatctcttacttagctacatctgcaaaggccgttttttcaagtaagatcatattcacaggttccagggattatgaggtagacacacctttagggaggccaccattcatccaccacactttccctcactcccatgctaacacccccagctcatttcccccctttgcacagctctgaggcaggccactttctgatggcaaatcatgtctctcttggccagctcaggccaagcttcctccaggaagccctccctgacccacaggtacttgagattcctccagcactaatgtataaggctctgtccagcagtatctgtgggtctgaatctctcctcagaccgaagtttcctgagggcagggaacacacactgttcacaggggcacacacactttctccagtgctcatccagggctctgcataaactggttctggcaataaggaacttgggctgaagtcacctttccagcagtgtctggtccagccagggcatcatgcccagtaacagccccgatgtccaacacttccccatgtcctcttctccccctagacactgccaccttaggggtcctggctgttacttcgtcccagggcctgactggtagtcttagttacacacacaacacaggggagggaggaaggagcttggggcaaagggagggagtccagccctttgcctttccttggagaaggcaagggagacaggaatgcctttggctgggagaccctggccagagatcagaagatcaaaggatgagaagatcaggggcgaggcaggtggcactcacttggaggcaccagagagaagcggcagctgctgcctcctaagggcagggctgacccagaacgccctcctctacccacagcctccccagcctatctttcctaactttatagccctgcttctccaccaggaggggctctgttggttacatgcaggtgaggagagggatgtccactgacattcatgctacacccatgggttctcccatttaaacctcacaacattatcttatggggaatattagatactattttatagatgcagaaactgaggcacagagaggaaaggaactagtccaatatcaaacaactgctaagtgttagggccaagatacaaactctggcagtctgaccccagagccactgaggattacattataagggcaggcagagaactctattcagtccaactgcagcatgagggagtgaggctaggtatcaggaaggacttcttgttgggcaggtattttagatccagatcttggatctagtctttctatagctctgatgaaccaaatagttcgggagttagggaagagggcagatgggtggggcgctatccagagggaagggcatacgagagaagcggcagaacgagagaggatcagcgcggagggtggcgggcactggaccgcagaactggcactcgaggtcccaggggccggaatgcgcttggagggagagggccgctcagcgagggcgggacagaacctctcccgggctgggagtgcacggcgcggtgcgcccaggtaggcttgggggaagggtgccgagctccggaaagttccacaggtcctccgcagccctggggagcaggacccagaaaccgacgcgacgggtggggcgctacccgggccggccctaatccccttccattgttctgggagccgaggccgcctccccacttccggaccctttcagccatggagcgggcggcgcgggcaggggcgggcaggggcacggccaggcgggctggggtgggcaggggcgcgcgcgcgaggctggtccccgcccccggggccgccgcttagctcccgggtacgtgcgtgcagctaggggctccactgaaccacctggcgtgggttcgcgctgccaattcttaactttgtggcacagtgggaagtaacttgatatttccgaatctccgtttcttcatttaaaatgggaataaataatgcttcgttccctgacctattaaaaaggatcaaattaaatgaaaccaaggatgttcaagagctctataaactgcaaagacgtggagtgggggtctggagaggcggaaaggtggcgaaacctcttaattttgctgaacctcatctgtaaaatgggtcagtgaaatctttagcacagtgtgtgatccagcaaacgtagctctttttattatatgctctgaactttatcttctgctcttttctcctagattcaaattgagtctgggatcctgtccaatttagaaaaccctctggctagggtaggggtaaatggtgtttgggtgcacctgggtgtgtgtgtgtgtgtgtgtgtgtgtgtgtgcgcgcgcgcgcgttggtgagttgagttgctgggttgggaaggagggtgctctgatgtaaaagaaaagctcccatctgggatggggttagtgagggtggtgggggtggtgagggtgggactctgaatagagggc

SEQ ID NO: 3917 - DNA, 6000 bp, Homo sapiens; identical to SEQ ID NO: 506

SEQ ID NO: 3918 - DNA, 6000 bp, Homo sapiens
tgctttctaataaaaaaaattaatgacgatgagaacatcatctttattaatagagtggtattaatgtatctcatcacatcagaaccccaaatgagtacccacgacttcctaaacatttctgtcttcgtagctagaagtcacagtgggttttagtagtgtgctttgcttaaaatttctgcttcccattcaaaaggctttattttcctcaaagttatgttcatataccacattcccttcttttctcgttgctttaatatctgaggttcttagaaggaaacccaagggtagcattaggactgccatggttattgactattaactcgttaacttattaactcttgtcctttggatgttgtatcacatgggtaagcaaatgcctataagtcatttccctctaatggttcttgtctacctttaaaatttttgctcatctcatactgcacatctattgcatgacagaaaaggactggaacatttttaaataaggaaaagcacatctctgagaatttcagaaacgtattagatattgaatgaatgtcaaagtgtaagaagaatgatggccaatggtagatatgacaaagagtacaggtcaaagataaacaggtatttaattaacctaatatagagagctaaactcacctatagctgactttcctcaattctggcttctttcattttctgtattcaaacaaagcataattggactagaatactattcatttgggggggctcttcagattcacaggatgaaatgaactaaaagaaaacaactgaccttaggctaatttcgaaaatttttacttatattcttcaacaatataggtcaactgagcaaattaaattgctgttgaatgtatacaaacataatgtgattatccacagagagtaatttgatattgcctaaataactttgtgtttttaaaaatcttttatttgtattccatctcttacctgggggtgagtttatgaaatgcagaggctgtggaatccctgaattccacagcaccagtcaccataatctaaagctagcagtggttaaatgagcttgtgctgatattgacaaagacagaacaccttttagttgcaggtgacagaaagtatctctggtagcccaggcaacaaaggaaaggcaaggtcaaggaggtggtgttcacctcaggagtggctaaattcaggtttcaaaggacatcatcatcatgctgtctctgtttcccatactccctcccatctctctccttccttcatgcctttcctctatgtttgcttactctagatttcccatgtggtggcaaatagggtgatcagcacctagtaattccaaatataagagaatcactgtctcattccaacatccacatcaaatctccaaatcaaccctcctgcctgggtcttcttcatgttcattgttgtggtagaggagcgaggaccatctgattgatgcctgtcccaaactacatactgtgggtgacaggctatttccaaaaagacagctgaaagaaagacaaatagtagatacccactgcatggctttaaccaacaaagatgaaagaagaaagaagtatcatcagcacaaatatgaatatagcatcgggatgattgggcattacattatttataataaaaccagcatggcataagtcctgaaaatggggctacaggacatgattacctcccatgggacatgaaagcagagacctagatagtagaaatgaggaaacgtagctgctgtgttcaggaatctcaggagtgaaggagatttcagaaagagaaaggcccttcagagtacatgagaaataaacacaggcccggtgctggaaaaccaaactggatgaataaagatgataatctaaagaggaccaaatgccacttatcggcgtatggggccgagagcatttaagaggcaccccagactccccagtagaccaatagtaatagtagttattaacctcagagacagggtgttgacctgattaaaggcacatctgtccttgtgaatatacatagtcacaggtgcaatggagagataacaaggcaaacacctttagaactgcagtaaactggtatctggatggggggagagcagcagacagatcttctgtacatgcatcttggaagaaatcctgaatgtaattgtgggctacaaacagtgtgtaacacttcccaaacccagacatcactcagtgagggagaatgagagttaagtgtaagttgacacctaataaaacccaaatatttaaaaaaagtaaaagagaatagtcttgtcaatttcctataattgaaaatcagtgcaatgtcagatatttcagctatgggaaaataatattagattatacagaatattttgtgttattcctctctgtaattgagttttatattagaatatttagactatttcaaattttgtattatttcaaagagtactaaggtgaacatgtgtacatgtatttatatgtgcatatgtgagtgtatttatgtctaacattataggtattatgtgtatacatagagtcagacagctcctgagatcatggattttggcatttttgacaaactgcaaaattgtctttcaaatgaccaatttatactgcaaccccaagaccatgaaaattgattatttttgtcatactactgtgaatgctgaatgtatcaaatcgtttgcatctttgccattgtttcaggtgataaagagtatctcattaattttaacatgcacatcaattccaccttaaggaggcgtgtgatgatttttaaccagctaggaggtgctagttgtataggacacctggaaggagctggtggagaggcagcacagcctcacagttacacatggaggctgtgggttcagattgtctggatggaactctttaggtcctcccagacatcaccttgttagctaaattccctgcacagattatttaaatgtgtcttcctttctgtaaagtgaggttatttaaggattaaatgagataatacactgggcatggtagctcatgcctataatcccagcacttttggaggccaagatgagcagataactagatgccggggttttgagactagcctggtcaacatggtgaaaccccatctctactaaaaatacaaaaattagccaggcaaggtgacacatgtctgtaatcacagctactcaggaggctgaagcatgagaatcacttgaacctgggaggcagaggctgcagtgagccaagatcacacccctgcactccagtctgggcaagactctgtctcaaaaaatataatataataaataagataatgcatatgatgcatttgcacaacacgtaccacacagtaaatgtccaataaataatttctactaacatttattattgcactaaatttagctctgagcatcctggcagccaaagcaaagagagctcattgttcaataaaaagaataagataataatcacagatactcatatagcatttactgtatcagctcctgttctaagtactttatatatgttaaaacattttgatgagaaacgaagcttctttggccacttattgaattctggaaagaattgatcaacaattgattctgttatacagaaaattatcattcccatttttcaatgagaaaacttggactcaaagaagttaaatatctaagttctcacctccagtaagtagtcaaacagatttgaacctaggccttttgaccccatagtcttcctgctatgccagaaagcctttccagaagtctctgtgtgaatctgactactgctttgagagacactctgagaaaactctggcattcaataccttaaggcttgattcaggactcttgcaatgcacttgcatatgtatgtttatctgtaagagtttattgttgaagattttttttaaccaagagcataaatgtagtagcagggtacacaatagatttttgctgggatgatcaaactttgaactcatagaatgacactgattgaggaatgatttgcttatctagtgtacggtggctggcggtgtgtgaattcctgagccagtggtgtcccagaagtacagccctggaggctctgagagaatggtacaggtcacaaccgaggccaacagtgacaccaaggaggtctaactgtggcaccttaattgtaatgcttcttagttgttcatatactctggcaacaagtgtgtgaaagcactagttgcagttttgcagtttttatatgcaaatgtgtgtgggtgtgtccatttgttcacatatgtgtgacacgctaaaatacattttcatgcttggatctaaaatatctaaatactagaaatatttaaagctggtttggtccattcaaaacgttctgctaaaagttcatctgcatgttatcaagtagaagatagctttccaggagatagtcgtgttaccagtccttacaaggaacggatgtcttacttttttgatcctgtctcaaagaggcaatatagtgtgaattgatttacattggttttatcccttctccaggttggcattgctcattttagtaagacttaaatggctggtatcaccttaaagttgcgtatttctgaagcctcagatgggtaaatgcccagatagataaaatgcaaatcaagtcaagttatcaatttagcatgaagataaagctgtttggataattgtaatagaaatgtctgatatttttcacctttacaaaataagagaagtaagggcgattttgtctagtaacagaattacatggaatatatttagaaatgagaaaaatgtgggaaaaaagcacaatgttcagtgcatgccaccaattatataatactatctcaaacaaatcgatgtctgtctgccctagactccacttatttaaaataagagaatgaacttgatgtttggcttcatagagattcagcaccctgtaataggccttccatgtcttttaacgtatgtaatgcaaagaacaaacaaataaaggcagaaatttttctaactctgtctcttctctctttcccccagactatgtcagagagtcacaatgaccttgcacaataacagtacaacctcgcctttgtttccaaacatcagctcctcctggatacacagcccctccgatgcagggctgcccccgggaaccgtcactcatttcggcagctacaatgtttctcgagcagctggcaatttctcctctccagacggtaccaccgatgaccctctgggaggtcataccgtctggcaagtggtcttcatcgctttcttaacgggcatcctggccttggtgaccatcatcggcaacatcctggtaattgtgtcatttaaggtcaacaagcagctgaagacggtcaacaactacttcctcttaagcctggcctgtgccgatctgattatcggggtcatttcaatgaatctgtttacgacctacatcatcatgaatcgatgggccttagggaacttggcctgtgacctctggcttgccattgactacgtagccagcaatgcctctgttatgaatcttctggtcatcagctttgacagatacttttccatcacgaggccgctcacgtaccgagccaaacgaacaacaaagagagccggtgtgatgatcggtctggcttgggtcatctcctttgtcctttgggctcctgccatcttgttctggcaatactttgttggaaagagaactgtgcctccgggagagtgcttcattcagttcctcagtgagcccaccattacttttggcacagccatcgctgctttttatatgcctgtcaccattatgactattttatactggaggatctataaggaaactgaaaagcgtaccaaagagcttgctggcctgcaagcctctgggacagaggcagagacagaaaactttgtccaccccacgggcagttctcgaagctgcagcagttacgaacttcaacagcaaagcatgaaacgctccaacaggaggaagtatggccgctgccacttctggttcacaaccaagagctggaaacccagctccgagcagatggaccaagaccacagcagca

SEQ ID NO: 3919 - DNA, 6000 bp, Homo sapiens
tccatatcaatttcattggtagtttgataggaatcacattgaatctgtaaattgctttggtcaatatggccattttaatgatattgattcttcctatctatgagcatggaatgttcttctgtgttttgtaattctcattatagagatctttcacctccctggtaagctgtattcctaggtattttattcttttgtggcaattgtgaatgggattgcattcctgatttggctctcagcctggctgttcttggtttataggaatgctagtgatttttacacattgattttgttttctgaaactttgctaaagttgtttatcagctgaaggagcttttgggctgagactatggggttttcttgatatagcatcatgtcatccagaaacatggatagtttgacttctcttcctatttagatgccctttatttatgtctcttgcctgactgctttgagtcctggccattttgggttgattgttaaaggggccattgtttggctttctggcttaagatagcaatccgacttcctataagtctgacttacagcaggctggcttactatttattgattagcagttggtttcctgagcaggttgctgcaggttgcaggtcaggattctattttcatgtatggtgtggccatagtccacttgtatattcagtttcttttaaccaaatgcacattttctagagaaactctgctcttagctactatagctgagtatgatgggaataagaacacttgggctgcatcttgctccaactactcagatgacagatatctttaaagaccctttgtaaattctaatatgctctacagttttacagtattataactattgggaaagcagcacaatgtttgttttcctcccagatttaccatcaaatcatagtggctctactagctgtgtgaatgtgggcaagcgacttaagcttctgagcctcaattttcttcatttgtaagatcagattaataatacctgtgttgaagttgtttttgttttttgatttttactttttcttatggaaaacttcatacatacaaaagtagagtgactatgtcttagtctgtgttgctataagagaatacctgagggcaggtaatttatgaagaaaagaggtttatttggctcacaattctacaggctgtataagaagcatggtgctgggacctgtttggcttctggtgtgggcctcatgctgcttccacccatggtggaaggcaaagaggagccagtgggcagagatcacatgatgaacgcaagggaagcagggtggggggaggtgccagactctctgaaacaatcagctctcatgggaactaatagattgagaactcactcattaccatgatgacaatgatggcaccaagacattcatgagggatccacccccatgacctaaacacttcccacgagaccccacctccaacataggggatcaaatttcagcatgaggtttggagggtcaaatatgcaaactatagcagactagaagaacgaccccttatttatctattatcctgtttggtagttatcaaattatggccaatcttatttcatttgtgcctgtatccacttaccctgcctgactatcttgaaattttagatattaagttatttcatctacaaacttttcattttctatttctaaaagatgttttaaaaattatttggcttattcttattgcctatttaccttcctatttatacatctaaatagaatgaaagttaattctatggaattaatacaccaagtaatattcagaatactagtagacacatcattcattctctgtagctctggcactttcatttactttagagatacttttttttttttttttttttgagacagcatctcactctgttgccccggctaaagtacagtggcgtgatctcggcttactgcaacctccgcctcccgggttcaagcgattctcctgcctcagcctcctgagtagctgggactacaggcacgcaccaccacgcctggctaatttttgtatttatagtagagatggggtttcaccatattggccaggctggtctcgaactcctgacctcgtcatccgcccacctcagcctcccaaagtgctgggattacaggcgtgagccaccgtgcctggctagagacactttttcatgtcttgggcattttgctgatatctgtgcacaatccatttctctttttgctgctttctttggtttcatgttgccatctctgagcaatgctgagtgtgtttgttttgcatgaagtattgtcagagataaggactgcctcttaaaaatataacaacaatatttgcattaattattcattgctgtgcaacaaattacacccgaaacttagaggcttgaaatagcaatcctttatcatctcttatggtttctaaggggcagaaattcagggggcattttggttgggtggttaatgcatggtgtctcatgagggtgctaggtctgcagttctctgaaggcttgacagtggctggaggatccacttctgagatgactgtcacatgtctggtgaattggtttttccatatgggcccctctgtagcctactcaagagcttggtggctgactttcccaagagggagcagcatgagagactagggtggaagttgcacgccttttatgacctagcctctgaaatcacatgccatcacttctgccatattttattgatcacacaggccagtcctgattcagtgtgggaggggactacataagggcatgaattccaggagccatcgtgaaggttggctatggcaatgccattatcacatctcaaaaaataaattgaataattatatcctaatagtatcactgtccatatattctaaattgtttgcttcaatcaggatccaaataagttccacatattataatttgtcatatgtctcttaagtcccttttgattcatagattctcctttccttgcttccttttttattcatgtaatttgtttgtgaaactcatagaggtttttgatgaggagcaactgaggtgatgtagataaaaacctaccatcatgaaggcttgctgcttgcccacatgctgacttcacatgaattagagacaggctccccttcctccagagaggacattattgcataacctggacaatctatgtatgacccttgatgggatgtgctggctctgggatgtgataagtagcacccagcttaacttcacctgagaggtgattcaataattccaacttttaaagccagtggtcagagcacatgagtcccattagaatcaggagaagctgctgctgcatagatgaatctccttgctttgtcccagctcttctcaggaaagctttcaggaagtctgaagaccgcagcccaaactgcggccacccacacttccacctgctcacgtgttccaggtcccaggcacgcaggctactgacagctggcatgcgccacccgtggccgtactccccagatgagcctgcagtgtccacttgggagctgggttagttagaaatctgattactaggattcctctcaactgtataagaaattgggcctccaagattggtagacagacaaaaggagtggcctctgatgatgccaggaccattggcagcaggacagggcatagtagagcacatacaaatgtgtaccagtgatggctgtgtgcatgtgcttttctgagtgtgggccagagcccatttacgcaggagggagatctctactgcccagaattttcttggttgccccgtcagtaagtttatgtctatgaagagcatgtggtatggtgcattgtgcagtgtatctatacatggcagcactgcttggactaactggttgtttcccttttcactggtctcttcaaaccaggataaagccatattaagctcaagcatatctgtttcccttaaacagattcagaattcctgggctccctgggtgcattctatcattccagttgaaagtttgcttccttccagtcatgtggctcttcattctactctccttggctctcatttcaggtaggatgggggacggaacagctccagccctttaagctgtggcctttccagagactttgcactgaagtcctcacctacttggagtccttgcttattaactcgaaccatctaaggagtgggatgggaaaataaaaggcgatgaaaataggtcttgtccatattagttcttgttcttagctcagataagagagtttgtgaggaaattgaaaagcttgactaaaatgatgactctgcactcactttggcagcacatatactgaaattagaatgatacagagtagattagcatggcccttgtgcaaggatgacatgcaaattcattacgcattccatatttttccccagcatctccactggaataaaataaaacgagagctctgtattttcttttagtttacccaggttcccccttcccccttctcccctcaaaaatatatgtgcacatatatgaggacacgactttcccctttccacttgtgcttgaccccaaagatgagacttggaacactggccttttcccagctctgtctgaccttcagttgtgtggcatttagagttgctgaacctttctctgggtcagcattcatacttataaactgaagatcatgctatcttccttgtggggttgttacgaaaacaaaatgttataaagaacctgagcctgcattttagtggtttttgctatacttctggaaggctgagagaagaatgggctctgctgtctcatctcctcttcttggtcagacactttccctgccatggtcaagctggacatggtgtgcgtgacttcctcattgtgcaatatcctgagatgatagaggtgcctatgctggtcttgtacggagggaacatgaagttcttatcccctaaagacagaacatgacttcctctgttttcagccctgtgcagccagcagaagcctccaaacatcactttctttctgagggtgctaaggtagggtgggagctagggacagagggcctcctaacggtaagcctcaggctcttcaaggccctccgtcaagcaatggtaggaggcctccatatttcacccacccttaggccagggaaaaggacttctccagagttgctttattagtttgctagggctgtgataacaacaacagcaacaaaaccacagtctgggaggctaaaacaatggaaatttatttccttatgttatgaaggtggtaagttcaagatcgaggcatttggcaagtttggtttcattctgaggccatctctcggtttgcagatgattgccttctggctgtgtcctcatgggccattcctctgtttgtattgtcagtgtcttaatctctcctttttataaggacatcagctgaattgaattaaggactaccccaatgaccctatgttaacttaattatctctttaaaggccttatatccaaatacagtcacattctggggtcactggaggttaggactgaaacatatgagttttgaaggggacatagttcagcccataatagttgccaatcaaaaagaggcaaaaatcagcctccgattctttaattaattatccttcaggagggcaggagctgcaatgttttgagagaacaatggtgtgtgtgtgtgcacgtgtgcgtgtgtgtgtgtgttttcacagatgccatggtcatggatgaaaaggtcaagagaagctttgtgctggacacggcttctgccatctgcaactacaatgcccactacaagaatcaccccaaatactggtgccgaggctatttccgtgactactgcaacatcatcgccttctcccctaacagcaccaatcatgtggccctgagggacacagggaaccagctcattgtcactatgtcctgcctgaccaaagaggacacgggctggtactggtgtggcatccagcgggactttgccagggatgacatggattttacagagctgattgtaactgacgacaaaggaaccctggccaatgacttttggtctgggaaaggtaaggagcctgcc

SEQ ID NO: 3920 - DNA, 6000 bp, Homo sapiens
caagaaactggaaggagactttgggattttctgtgacacataaatagttcattttgtatttaataactaaagatataaaaaacaatacctgtcaaaacaagtcaattccccctggggcataatgcatgaaaattaatctgtaggcttccaaagaggattatttctaagcattttttgtggttgaaaaccacttggaataagttccttgaagccctatcaataaatgatactctcagaccaccattccaataataataataaaaaatttaatatactttaatatggtttagaagcttttttttttttaagaaaacgactatattaaagaattgaatcctaatgggaatgtagaagtcaccacacatataaacttagtgttatttttaaattatgctaggtgagagattctctctcaatgaaaatgactggtctccatcaaataggaggccatatccctttcttgccacacaatagacctagtagcttactttttccctaaataccattatccacatgcaaacgtaaccaccttttacctttggatttggataaagatcattcttggtgaggtttttaccatcagctcctgttaagatcttattgcgaatatgaatcacaatctcagctacattatatctggggaaagacaaagtttccatcttggaagtttcctgttaatctgaaggaagaaaaaacaatgagaaataccacatgatcagtagttctcattatctggaaactaataaacataatgacaaaatgagccaaagttgaactattcatagtagtgttaactatcatcaaatatcttagtaagataaatacaagtatttatatatgtatcctaaaattacttttattctaaggtgacacagttattttctgctaattttctagtgtcgttctcttttgtaggaagagaacaacacatttgggaaggaggactttggttgaatagatagatgagaaaccacgtgcttctcttttacatttgagggccacggagcttaacaagaccaatcctaataattaattctcaaagcaaggcatataggcaacatcatcagcagaagctatatataaacaacagtaatatagggcataaaaaattgtattcagttttgacatcctattcattacatatatagtgagatggctaataaggttgtagatgcaaatagaagagagaaaaaaaactgagtaagaatagatgatataattgataggaaatcctatcaccagagtgagaattttaagaaaacaaaaaaccatttctcctaatgtcttcacgtagtgagttattcctacctgtgtccccctagcgtagtagttctctaactttatcaccaagggcacatctggcaatggctgaagacatttttgattgtcagcacaggagtgtgggtgcaactagaatctagtggataaagaccagggatgctgccaaacatcttacgatgtatagggtggcccccaacagcaaagaattatccagttcaaaaggtcaataaatgctgatgttaaaaaaccctgtacctgtaatctcagcactttgggaggccaaagcatgtggatcgcttgagcccaggagtttaagaccagcctgggcaacatgatgaaaccctatctctacaaaacacataaaaattagccaggcatggtggcctatgcctgtagtcccagccacttgggaggctgaggtgggaggatcacttgagcctgggaagcagaagttgcaatgaactgagatcgcaccactgcactccagcctgggtgacagagaccctgtgtcaaaaaaaaaaaaaaaaaagaaagaaaagaaaagaaaccttgtcctagagccttgcatttacccctgttataatacttgttacaatgtactggaattatgtttaaagaactctgacaccacattgtgagattccggtaagtaaggatcttttcattttcttcatatctctccctgtaaccacaaaaatagcagtagtaacagcaagagagaaatgagcagcaatagcagccactgttattgctctcagccactcccttaaatacctgttgtgttaccttcagatcccctactctccagtgaagcaaaatgatctcggagacccaatgtgaatatattcaattttgcaaacaaattgaaatgggccacaattctgacaatctatttctttaggctcctaatttttttagaattttagggttaaaaaggggagctttggcaacttgcctaacctctaataaatggaagcaattctaaacaaccactaacaaataacttcccaattcaacttgaacatgtgacaacatcacagaattcactctcaatgcaactttttcccactttattatggttccaaattaaataactcttcctcatagtgtgtggaaatatgttttgtggtaattttacctcctggtcctatgtagtcactgcaactaaatagaatatattaatctctgtttacatgacaccattttcaaaaacatgaagaaagctattacacctctgctaagccctcccttctttaaagtaagtataatttctttatgtatggctatatgtaacttcaaaatactccttatatgacattgttttagaaactaccatcttattcatcttcctctaacacacactattttgtaaatgtcttcttaaaatgtagtgcccaaactgaacacgacactccagatatggttggtctagggcacagtataatggcctctgctgtagcacttactgatcaactgaaactccaagaacttcatcatgaccgtcttgcatcaaggcggcttctccctgttctttttttccccctttccctctctttttttttggtcaccatctgctgtgtcacttgtgttcttgttgtataaattgattatttgaaacttaagcaaggatttgtactttctactattaaatttcatgattgcaagctttccttttagagctaggacgttttgtctatttttttttctttgaggcagggtctcagtttgtcatccaggctggagtgcagtgtggcacaatcacagctcactgcagcctcgacctcccaggctcaagctatcctcctgcctcagcctctcaagtagccaggacgacagcaggcacacactaccacgccctgttaatttgtgtgtgtgtggagatagggtctcactatgttgcccagtctggtcttgaacttctgggctcaagtgatcctcccacctcaacctcccaaagtgctgggatacaagcataagccaccttgccaggccacagagctgggatcttttggaatccagattctgatgcatcacatattagatgttcccttcagcataaatatgcattctacattttcatctaagtcacagccttaaaaactgttcataaaaggactggaccaaagaaagacttcagaaaaagtcacttttccaaaaaagctgcatctgaattagagagtattgcaatagaaagcgtaggtgtaaagtatcttcataattattatcacttgttcctctcttctctaatgtttggcactctgctatcagattaatccttataaaaacacttaacgcatcatataatatttgtatgaaaatacttcaattactcaccttacccaccacatcaaattcaaatttttctgctaggcttctaaaccctttaataattgaatgaaatttctgctccaagttagtctcctaactttcccaaacttccagtatttccttttggaacctcctccaatatccaaattctatcattctttcgaagtacaatttcagttacaatttattcattaacgagagatgaagacactttccaactacatagtttgagctcctaggtgggataaagtatataaatgacttaatatatatgcagtaatactctgtctaacgagtagcaaagattaacctataattactcatctggtttctcatttatttgcagcaccacgatgctgagcagagtgagtaggtactaaaagtactctgttaaattttacacacttcgttttgttaaaataaactatttgtggacatcacagttccacgaggcagagattaaacaaaaataaacagaaatggctcccaacttcaatgaattaagtaaaacgttccttgaacttttaaaaggaacaatgatggcgttatgcatgcgtagtgctatatatgcgctgctcttttcctttgaattttggattaggtgtgatatttttaccttttcattcatggttttggatttggttaagaaacgtttggcaacggagatgtgtaaaaagctgacaagcatctgcagccaaataaaccacattaccaccgcctttccaaaaatcacacataaatgtatgcctaacttgaacaatttcagctcaagctcgtcttcttcggtctatgctgcaccagaaaacacccgttagtttagtaggaactgagctctggttgtttctgggactaacatcaaataaaaagtaacgacgggcccgcccctcacctcccaggctctggtttcttccgcctcctcccaccgctgagcacgacgaaaacaccgccaggcccagcgtcccggcacctgcccgcgccttgggatggagaaggcgtctgtctgcaggcttccttcctccgtcctctcgcgctcacctacagtgccggccgccgacaggaagacggcgagttcggggagcagctacaagcaaagtcaaaaatcagcaaacgtcaaccgtcatcacttttcaaacttgccgcctcctactggaagtcccgccccattccgccaagcccacgtccaaccgcgacggatgccggttgggctcaagagacgccaggcaggtgggactggagttgtcatggaaggggcagggcgcagggcggaaccattgctcgcggagctggcgtcgagtcggaacctcggactgcaggaagtgggagcaccgcggtttcggggaagagaccggggttgagcgtctagcccatctctgcgtgacttccgccagcgtttagagcgttttcggggtccgagttgaagagcaaaaccaagtgaaggaaacttcactaagttcagggtgacaagggaggaagtacagaggtaatttatagaattccagagtaataataacttgttgaacattgattatgtgccgggttttgttagatgcttataagcatcatctcatttagacttcattaaaggggagaaaagggatagtggagagatactatcatcccctcaggtgagggctctgaatcagagaatgcagttctctgcgcacagtagttcacaagtagcatagctgggatatgaacacacatcctctgactctgtgctcataagcacgacttcaagaggtggaaggaacataacagttcatctggtcaaatcctctcgctttcaccgatatgaaaactggactcagagagaagtgatttgttagaagttatacagtaagtgggactgtaaagtagaaaccaggtctcctgattttagcttctccctcttcgatcagtgcttttcacctctgaactgttccccaaatttgcacattcctgagtgagttgcattcttcagataaggggccctgaaatctgtatttttttacatggtattttgtttgtttgttttggcaagagtggaaacactgcatttaacacaagttaggaagccatggcaggcctggttgtcaggggagaaagccattaagttttattgaggtttgggacaggagaagacgtaataggacttgtatctggtcacagagtagagcatcatctggtgacagtcgtgtgttggatggggaacctgaactgaattatgtgaaaaaagtgctagaaaggttgtattgaatgtagacacaaattccgctgctttgtcctgtcctgaagaactaaacctattgatagtgaagtctataccaattctaaataaaaatacatttcatatcattagttcagggcttttgtctttcctttcaatgtctatttactgatgtaagtctcaaa

SEQ ID NO: 3921 - DNA, 6000 bp, Homo sapiens
atcctttccatgtggcgatgagacacaatggcatcactgatttatttcacgggctgatggagttttatttccaagagaggaaggaagtctgggacttttaaccataggagaaaacatttctctgtatctcagtattttaaccactgaaatgctcacccctgccagttgcaagcccacattttcacatatgacctgtgatccaggagtccattcaatgttgggcttcatttcactgattaatgtattagtccagattttgtaaactcacttgtcttctaggcaaaaaaaaatagatgttttctagatcaatgaagttaaaatgaagaaggaaaaaaaatgaggacagaaaatggagcaggaaagggttcgtagaacaaaaagaaacacctgcttttgaggccaagattttccatgcaagtcacttgcaggtgtcctagaagagctggtgaagctgtgagcacaggcggaaaacaccagctgtggttggtttggcacatcccaggcagctggtggtctcatcttcatttagggaaagcaggcttgtgggatgcctttgggctgaagagcttatggaatgggttccaagttattggtctttccgaggaatgggagctggggtgggggtgggggatggttcttcttgttcttccctgaaggtcctgatcccaggaggaggcagcagcatcagtaagagtctgggaaccaaagcagaatgtggcgccccagcccagccgctcaccctgcgctgtccatggctttctgactgcaggagagagccctggcctctgccttgtgtccctggtccctctgtctgagccagggctgaccagaccctctgtgggcaaggccttgatctgcagcagattctgaaaccctaatcacttcccctgccactggctcaccttagtgttaactagaggtatgaaggatgatctgatctgtctcagagccagcaagaagcaacttggaggctctttcttgattctgttcctctcaatttgtatgggcacttggaaaggtttaaccaaagtaaatggaataagctttcctaaaagcagtgcatatgagcaaaggcagaagcagaatcccacacatttctggagcttcccagctgacttggatgtcaggagtctcctgggcagttgacagtgtgtcctttatatctagcagatttcagccataatcagtggttctgcttctctcattctgtttgtcccaaagtgaggaagtacaaaatcttaggctttccatgggtgccaaatgtcgctgggccaccaaataccttctgcttgtaaggtctccttagccaattcccacggggaaggtcacttaggaatttagatctctggacttcctggaggttgccacgcagcaccaccatgtggcagataggtcagccctgcatggacattgctaaatgctaccaggtggtcttaggatggtaaagcaccaatacaaagctgactggtggctactggcaatgggagccaagaagaggcttcaggagaaagtgcaggcagcccctccacctgcccttccgctggccgacccagaaccttcactccagccagggctggagagcccgagcaccacccctctccccagccagggagggtggcccaggcagtatcagggggcaccccctccaaacgccgcccttacgagacccttgaagctcctgggcatagagcctttcccgttatctcctgcgaaggacactgactcacgtttgtccaggggaaaacacctcgctccaggttcttccttgagaaggcctagcttgagggcggggagggtgaccccagagcctttggatttactcccttgccttcctaagttcctttgcttgggggcatctagaggtcttgtagttagctcaaagtacctgcaaatttatctcagaatcacacccctgttctttcagcttctcagagcactgtgactgttgctcaccgcatgcctctggagagccacaaacctgattccccgagcctgtgcctttgtgcttttttcttgaggggttggattgtgctcagcccagtaaatacattgtttcatgtgaacaatctcagggtaattgtctccaccctctgctggtaaatgctgcataaacacagaggagagggatgccacctggctgccccgtttccagaccttttagctgagccgcattggcctggctcagaccattcctcccactggtgcagaccgacatgttcctggctttcactgcagcctcagagatggtgtccaaaacccactgcggcttcagccatcccagctggcaggagatgcccccacaggctctgctccctaagccaggcctcctgctgaacacagtcatgttctcaggccgagaccttgggaggatgggcatgtgcaggggaaaggattggggcctttctggtcccagctccctacagtaacccccagtcaagaggaagtccccttgcaaaagcaggattcccaaaagcagcgagagggaagttctgagagaagcctgctgtgaccaccccgccttcccacaccatgtcctccttggctccagggaagaaaggagaaagtgcattctattgccttgtaacctctgaagaattagggtagaatgaaggaacaggtctcctcctatctgtgagtgtatcataaaatacaagagtgtcctttatggcagattgcaaaatctgccaggcagtggatcttcttcatgagctcccaggagtttgacttcttgtgctttgtttttaatttctaagagcgttttgttatctccatgttccttttttcatagcctgcagctcttttttttattttcctaacattctgaggatgacccattgtaatattttttgctctcttaagctccctgcattgaatcctctgaggtccatttttcttttcttttttcccatctctgtctttcacgctagtaccttcctttaaatgtctagtgatccttgggcaccccttcacctctaataacgagggcctagaaaaccacagggaagccctgggtggtgggatgcaggcaggcttcctgactgtgggttggtctggcagggccatttcacaggcacctgactctcagtgcctgtgagtctttcctctaggcttggtggattttcccagggaagagttctgcagtctccagcccaggttaagtgggacaaggggccagggtcccactacttaatatgtaaatttccacaataccctcagtttttactgggtcgcttctgccgcggctgtgcccggggctcactctctctcctctcctaccaacactggggtctggcgcccgaggcctagcctggagaagagcagtggctcctggccccctaccccccaaccccgttcctgagttttcagagcctggtgaagcctgcctctcccaaacctccccgttgccaacctcagttctctattccgggtcagctcatcactctcaaccatctgctttccagcttacaaaaattctctccttcctttggggtgtaagcctcttaaaaatccctctttgataattcaagtaggatttcaggaggtgaatgtggggttgaaccctccatctttaacgggaagatcttctcacctcacattttccctcctgcctgcctttttgattgtgctccctggccctctgtcatcaccttggtggtggttgacattgtcaggagagtttcccctttgggggaacccagtgagtgctgctgacacagtgggacagaaaagaggggcgagccaggagggagcagctaagctctcctgtctttcagggagttgagagtgagttttgcaagggcgaacagaagggcaggagatgggtctgtggggaaacggaggctggggcccctccttgcagagtgtgattgtgttgtcaatgccaattttgtctttcagacctgggcctgtccccacacctcactgcgctcatggcaggtggacagcccctggggcacagcagcagcacgggggacactggcttcagctgctcccaggactcaggtaacctgcgtgctttataagcctctcacctgtcgcgttttccctgtgttgcgtttcccccgtgtcgcgtttcccctgtgcaggctcaagagctggcggaggggcatttcccacggtgggtggggggtgagaatcataagtctgggtttccagtcgtggctttgacttttcagctttcctgtgtctcagtttcttcctctacaaaatggggctgtcagttcctgttctctctgccgcacggtgttattagggggttgaaagtgagtgaaagcctttgcaaaattaaaatgagaaatgattgtgatgataataaccactgacccagaggggccttgcagtcagcctgcctggtcttcagtctccagttggctttttaagagctgtgttatctcaagcaagttgcatgatctcctcctaaaccctcaactttccccatctgtgaaatgggggtactaatccccattacagggcagctgtgagaattgagagacttaatgaatgtgaagcactcatcttgttcttggcacagaaggagccctccagcaaggtcagctggccttgtctcctcactccatgtcctttgatatgaaactcagtctccctgtagaaacgcatctccaccacaaatcctgcagagccctccctttagcctctgcctaaaggatcttgcaagcccagggctgctccttgtctgagcagtcggcttcctggcatcagagtcatggcaccggggaggtggggagctgcagatgctgtatcctgtgctggaagcacgctgttagagccacaggaggccctgggcagaggcgcatgggcagaggcagggagtcacactcatggctccacattgctgaggaagagccagggtgtctggccacacctgctgcccatccccaggctggctgttggtgcactggcgcctggagggagtgccgctgaagctgcacaaagccgcatgcctggcagtgggtctgccgctcccagctcctccatctctctgctcttgggagcctttgaaaaaccacctctgacttgacctgggtttcctgttccccatgagtgctccagggctgcgcctaagcctgtgtcatggaactcaggggtgagccttggggttggcaccgggaccaggccatgacctctcttagtcatggagaattttccttggaaaattccttatctggcaacccagagggccccgcaccacacggagtcatatatgaagcactgatcacactgtgccctctaggcctgagtccctcatgtgatttaaggaaagtctctgttactccccagtctgcttccctgttctcagacaactaaagggatccagaggcactgcaacattcattcattcattcattcattcagcagttatttgccacgttcctgccttggccggaccctgtgccagatgctgggggcacagtggtgaactgccattgttgtggaggcttcagttcataaaagattgaactgtaaagtatataaagattgtaaagtatacaattctcattgaattgtatactttaaatgagtcagttacatggcatgtgaattacatctctataaaactggttttgaaagatgatgaatgtgtcgagagctgtgaaaggggaagccctagtggagtgggagcccgtgggctgctataggtaggggagttagagagactgctctgagcatgcgatgtcgaaagctgaagcatacgtggaaggtgccccggcgcaaggagtgaggggacagcactgtaggcagaagaaagagcatgggcttcggggcacacagatctggtgtgagtctcagccctgccctttgttcgctgtgtccttatcaggaatgatggccctcaatttagcccctgctgtgtgcaagcactatgctagatgtttacatgtctcaactcaaaatccccacaactccgtgaggtagactgaatgatgaccccaggtttacagacgtggaaagatactgaggcattaaataacctgccagtga

SEQ ID NO: 3922 - DNA, 6000 bp, Homo sapiens
ggtaatagatatgtcagttagcttgatttagccattctataatgtatacacgtatcaaaacatcatgttgtacaccataaatatattccatttttatttgtcaattataaataaggaattctactttttttttttttttttagagacagggtcttgctctgccacccaggctggtgtgcagtggtgcgatcacagctcactgcagccttgaactcccggactcaagcgatgtccctgcctcagcctcccaagtagctgggactgccggtgtgcactatcatgcctggctaattttttcattttatggtagagtcttgttatgttgcccaggctagagtcgtacgtataagaagaattaaatgacataatacatctgatgcatgtagcatagtgctggcacctgagaagcactcagtaaatgtaaatgttagcttctatttgtattatggttttatccagctgcctcctgagcttgtttaatatgggtcagccacaagagatgatctattctgagtgtgccaggaaattgtgtttctgggcccagaagtccagtgattgccctctgaagaaagggggcagattcaccaaggtgtcctctactgtctgggactggacaggttgtcagatgccccgtctcctggcctctcatcatggatccacagtggcgtgcaagtgttcttttgtgacatttcagcacacatggattattatagtgacttcatcatgtttgagatcacagtgagatcttctagagggcaaaactgttgccttattctttctcttgcatcctctgaattagctaaagggtagatagtgaatacttcctttctgaatgacataacgaggattatagagaattcagatgaaactggagcatgtccaaaaaaaatgaagtagatgggaaaagtgaaaactagaaaactggagagggcatgatagtcagacgagacgttctttttttttttttttttttttgagatggagtttcactcttgttgcccagactggagtgcagtggcacaatctcagctcattgcaacttccaactcccgagttcaagcgattctcctgcctcagcctcctgagtagctgggattacaggcacccgccaccacgcctggctaattttttgtattttttgtagagacggggtttcaccatgttggccaggctggtcttgaactcctgacctcaggcgatccacccgccttggcctcccaaagtgctgggattacaggtgtgagccactgcgtccagccgagccattcttaaacggaactcccagaagagctcactggagtcaggggcctagacttagcaaacccaagaggacagtggctcctagaggaggaatgtggttgttccaacactgcagcccttgtgtgtgctgcccaggcagcagtgaagaccactgcccaggggttgccagaggggtcaatggatgaatttagtggctgtcctaacatggtggccatgagggagaccccagacctcagcagcttctgcatctctgggcatggtgagaagccaggagtggaaactaaggaggtcatcactccagcagttggggagggcacttggctttccttagaaggtggcagcaagggagggctcaatctcccaagtccaccggctttgagttgcagcactcaccatgtgattccattctcttgtgtgtccatcgcagccctgtgggcctcagagtccatttccttaagcctgtgctcctgctccttgtgatggcttcacaggccccccacaggctcagttttcccctgagcctcacccatctgggaaattcctatatgggcgtcctgtaacccactgcaaacttcaaacactcctattcaactcaacatacacgtttttaggatcttaaatactgaccatgctattaaaggtagaatcatagacgtcttagagtaaattgggaccttagagctctccaacgctcctgaattttacaaatgagggaagtgaagctcagaaaggttgagctgcttacccaaggtcacacagctagcttacgggcgggggtagatctagaagcctgatgttcaccggaactcatttctccatgccacattcttaacaaatgtaggttttgtcaggatttagactaactcatctgctaaacttcaagttgatttatttgagtgatgtgtttagttgattcattgtatatctctgctggaattatttctagccattgctaaagcggttaggtctgaaaatcagaagaatctctgtaaaatgctgaaagatgagccaatttttaaaacccagaagggaatgtgtatggcctgtgtagctggaggcttctaaacattttttttcttcatctgtggaacatttttatcattctggggaagatttagacattgaatgtactaaaaggatttcatttgactgctatgtatttacccctgcctgtaatccgctaataaatactcgcaggcagaacagcctaattggcaggatgagttaatgcacaggccatttatctgccaagcacatgacacagaccatgaacaaaataagctggtaactgcctctccctcttagcaaatgcttgtccgcaccccgccctctcccaacctgctcttcctctggccttgagcttggggacagtttgatgcacaactgccatgcgccagcaggcttcagataagcctggaaagaaatggaatggaaagaactttctggtcaggagcacctctctccgcagggaagtggccactccaagttaaaacatgtgtgctggctgggcacggtggctcatgcctgtaatcccagcactttgggaagccgaggtgggcagatcacctgaggtcaggagtttgagaccagcctggccaacatagtgaaaccccatctctactaaaaatacaaaaattagctgggcatggtgagtgcctgtaatctcagctacttgggagactgaggcaggagcatcacttgaacccaggagatggaggttgcagtgagcggagatcacgccaccacactctagcctgggcaacagagcgagactctgcctcaaaaaaagaaataaaaatgaaaaatgaataaaaataaaacgtgtgcttataaaatatagctaaatacaagttctgttgaggaggatgaagtgtctctctgtgttggtcacaagagtggattgcaataaaacaactaataatgataataaatatgatcacactggcttggccaggggctgccttctgctttagtcttccagaaacggtttagcaaagtcattgtgagactactgtcctggaacctccactcctcacctactcgagaatatatcaaggctgtctgggcctcctgccagccctcagtcctgtctccatgctggcctgccatgcgagggcagcctccccttcttggaggcccgcttcgaaccagtctcctagatctgcacaaaccctccctccagcctgggcatgaccatgttgtaggccgtgcacacaatacagcctaccctagggcttgtcccctctgtacgtggacacctcttccctggactcactctgcaaaggggcctttaactgagcacctgtgctctgtgccctcacaggtctcccaggcagctgcggacctcctggcctactgtgaagctcacgtgcgggaagatcctctcatcattccagtgcctgcatcagaaaacccctttcgcgagaagaagttcttttgtaccattctctaactccgtgtgtgatgaaaacgcctccttttctgaccttcaaagtcccctgtagagaccatgcatgctctaagccttagggagtgagaccaacacccatccctgcccagccaacagtggccggggcttgtcttatgtttccatctgttttcttcgtggcattcaatttcatttttttccttttcattttcatgttattttcattattggcaaagaaaatcaaaatgtttatagccaaataacaaatgtgccatgtaaaagtaagtctggacttaagagtttaaaatttttaaacatcagtttccaagtttatatcatattaatacatttcagtggataatttattttaaaaaaaaaactatgcctaaatatcccttatttgcaatattcagtatcaaattagagcattttgaccaactgaaacatataacgttttcatctcctttcctggagaaagcagctgcagaggttctgtatttcctgcatttccatcatcctagtaaaaagacaacaacccacaggattggaatggttttcttttgttttttttttgttgttgttgttgttttgagatggagtctcgctctgtcacccaggctggagtgcaatggcgtgacctcagctcactgcgacctccacctcctgggttcaagcgattctcctgcctcagcctcctgagtagctgggatcataggcacgcgccaccacacccagctaattttttgtatttttagtaaagacggggtttcaccatgttggtcaggctggtctcaaactcctgacctcgtgatccacccgcctcggcctcccaaagcgctgggattacaggcgtgagccaccacacccggccgtggaatggttttcttagcatatcctcctggggccgtggcgccccggctgtgggccgtggtggatgtcccttgtttcagtggtcctacaaaggtagatggtgggcggacaccgaagtcaacttgactgtaaaagtaccccataccgttgacgcgctgtggcagacctgtgggtgcggtctcccctctccaaatgccacctcttcctgctccctcctcttttggctcctactcagtagttccattgtgggctgcagtaatataaggacctgttctggacacagcactgggcccgctggggttttagtagggcagccccttccctgcaggagtgaggcatggtgacagcagtcccctatgtgcccccaagtcatctgagcattggtgtgcattaaggtactcaatcttccaacaataaataccataagtgcatgtctgttttattttatttatttatctttttgagacagagtcttgctctgtcgcccgggctggaatgcaatggcacaatctcagctcaccgcaacctccactcgcaggttcaagtgatcctcatgtctcagcctccctagtagctgggatgacaagcacacgccaacatgcctggctcatttttgtatttttagtagagacggggtttcaccatgtcggccaggctggtctccaactactggcctcgagtgatctgcccaccttggcctcccaaagtgctgggattgcaggtgtgagccagtgcacccggccgtatgtcttagagtgaggggaaactgaggcacaaagcgtttatgtagtttgcccaaggttacacatggtaagcagaaaaactgggatttgagggcaggcagcccggccccagagttcccttagccccctgaactgtgctaccttccaggtctacctgtttgcaggtagggagacccacaaactatcataactgcacaccgtgaagcaaacacctttgttgcagtaacccgtggcacacttcacttcccacattctccaggaggaagccgtattctggtagtttaaggaaggtgattcatggatgccccaaggaaaggctagacatcgatgaattagctcttggattgtctaagatcaacctgaaggtcctacctaaaccaaactcatatgatcccgatgaaagaggagaatacacagtgggagcagagctctttgtgtaagtttgttctattctgtttatttggaaactgcctctctccctagttctgaaagagacttgctgtgtgatagagaacaggccatttgtgcctgaaatgttctaacctgcaaattgggtttaatggtaattatcctgcctttctgtctgggaggaaacagagatgctacatagatgaaagctctgattatcatttaaaacaaataaatgtactaaatgccgtggtataatatagggaagaatggatgacttcaaagagacca

SEQ ID NO: 3923 - DNA, 6000 bp, Homo sapiens
atacctgcgagtgtcccccaaattaccttgggccatactgtgagaccaggtaagcagaccagggcatgtggcagcaggtcccagtggctgctgcttctctctggtgtgtccctcagagccccgaaagcctggctgatccacagccagggtcagaagggccacatagggctcacctaggttaggtgggagtggcagggggagctcatgcctacctgggtccctctctgcaggattgaccagccttgtccccgtggctggtggggacatcccacatgtggcccatgcaactgtgatgtcagcaaaggctttgacccagactgcaacaagacaagcggcgagtgccactgcaaggtgacagccccaagcaagcctccactgtggccacttgggcctctgtccacatctcctgggccctagagggcaggctgtagggatgggtcttcctgtagagctgagggccttgtgcctttgctctcacaggcagggcagttggctgcttaccttcgtgtgtctgaggcgcagggggaccctgggccaatgtgtaacccatgagctctggcctggtgtggtggtggtttgcagcctgttctgattctgtgacatctcgctgatgggctcaactccaaagcattgctagtgttaattattttgaatactgctcctgaggggacctgaggtcgggaccctctccacaggggccacagctgagaaggacccatgagcatcctgggaagagagcctggccagtgacaccgttcttccctcctttctcaggagaaccactaccggcccccaggcagccccacctgcctcttgtgtgactgctaccccacaggctccttgtccagagtctgtgaccctgaggatggccagtgtccatgcaagccaggtgtcatcgggcgtcagtgtgaccgctgtgacaacccttttgctgaggtcaccaccaatggctgtgaaggtggggctcctgggatgggtgggcagccctccttacagtgtgctaggcacctgcaccccaggaaagccaggaaggggctggttgcaggcctggggaggcctggggaggcctagggagggctggggagcctgggcaggacagcagagggagagctgctcctgggtgaccatgtgctcttccccgcagtgaattatgacagctgcccacgagcgattgaggctgggatctggtggccccgtacccgcttcgggctgcctgctgctgctccctgtcccaaaggctcctttggtaggtgttggaggccccgatgtgatgtcgaggacatggcctctgctgttagtgggatgagggcaggaagctcctggctgaagatccggggaccccactttctggcctccaggtcctgggatttcatttcccatcttccttggttcacattcccccttccccatgttgcccaggtgtgcctacatcttggactgttttgttttgttttggtttggttttttttctgggacagagtctgtcactgtcacccaggctggtgtgcagtggcgtgatctccgctcgctgcaacctctgcctcccaggttcaagcaattttcctgcctaagcctctggccgccaccacacctggctaatttttttttttttttttttttttttgtatttttagtagagacagggtttcaccatgttggccagtctggtctcgaactcctgacctcatgatccgcctgcctcggcctcccaaagtgctgggattacaggcgtgagccactgcaccccaccacattttggactttttttttttttttttgagacggagtctcgctctgtcatcaggctacaatgcagtggcatgatctcggctctctgcaacctccacctcacaggttcaagcgattctcctacctcagccttccgagtagctggtactacaggcgtgtgctaccatgcccagctaattttttatatttttttagtagagacagggtttcaccatgttggccaggatggtctcgatctcttgaccttgtgatcagcccgcctcggcctcccaaagtgccgagattacaggcgtgagccaccgtgcccagcccacatcttggactcttaacaaaaatgctgaaaaacctgcactgtgcttggcatagggctgtgctagagattcaaagatgaatcatgcagggttccaatcgtcagctcaccaccgagtcctggagttacgccaccacaaaggcagacagtctggggagtagggggtgttggctgctgacccaggacacccagcccaggatgggggctggcgctggtcctggactggcaatgagcaggttcataggcaggaagtggcggagagcacaaagtggtggctggagacaggcaggatgggggctcaaggaggtcgtatgccctgttcccctagagcccatgtgtggactgatcttgcggagatttttggccctggtgttctacatacctgtcttcctgtttcaccagggcccttgtttgctagttactgtccccggcccatgaggtgctggcctccagcagaacctctcagccagtctcaggggcttcctgtgtgtctccctgaggccggcccttttggcttccttcccccagggactgctgtgcgccactgtgatgagcacagggggtggctccccccaaacctcttcaactgcacgtccatcaccttctcagaactgaagggcttcgtaagtgaaccccctcatctccatcttttccctgtccttcgtcctgagtctcacttgcccccactcccatctttgagaacggggcttctggaattccagcctgtgtgttcctgggctcccagctggagaggccgtctctcacctcctgaggtccttttgctccagagttcctgccctcactcctgctcctccgctccgtcctgtctaggctgagcggctacagcggaatgagtcaggcctagactcagggcgctcccagcagctagccctgctcctgcgcaacgccacgcagcacacagctggctacttcggcagcgacgtcaaggtggcctaccagctggccacgcggctgctggcccacgagagcacccagcggggctttgggctgtctgccacacaggacgtgcacttcactgaggtggggcttggaggatgcagggctggctggttagataggggtcatggtgagtgagcctgctcatggcaacctggggggcagagggggccctcccatcccacctacaaggagctccctgctggcaggaggcctccatgaaaccctgtgacccctggcccagccctcttcccaacccttctcatagtaacatatgtgtgttggggcatggtctgacccagagcagaggcctgcctgtggtaccatgggctgggaggaagcagtatctcaggacatgtgtgtgggtccaggcacagggctgggaagctcttatgtagagaatgaggaggagggcttaggggcagagcatccagtgacctgagtgggcagtgcggtccaggagcatttcaggggaggcaacagtgagcacagagggaggggcctggtggggagcagggactggcccgggcacaggccggggctccatggtggggatgtcaggtgtgggttgtgagcacacccaccgtgaccttgcccaccccagaatctgctgcgggtgggcagcgccctcctggacacagccaacaagcggcactgggagctgatccagcagacagagggtggcaccgcctggctgctccagcactatgaggcctacgccagtgccctggcccagaacatgcggcacacctacctaagccccttcaccatcgtcacgcccaacattggtaaggctggtgcctgggttggggaggggtttgtggagggagtccccgacaagagcggctgtgctggggtcctgcctgcctcacaggtccgatctgtgaccatccccttccttagtcatctccgtagtgcgcttggacaaagggaactttgctggggccaagctgccccgctacgaggccctgcgtggggagcagcccccggaccttgagacaacagtcattctgcctgagtctgtcttcagaggtcagtggtggccatggattgagttgggagctggaccccagtgtctgtgcagactccacagagagcagggcccagctaagtgtgacagtgtcccctcccagagacgccccccgtggtcaggcccgcaggccccggagaggcccaggagccagaggagctggcacggcgacagcgacggcacccggagctgagccagggtgaggctgtggccagcgtcatcatctaccgcaccctggccgggctactgcctcataactatgaccctgacaagcgcagcttgaggtcagcagctaggggacaggtgtgggtaggggtatgggtcgggcggtgagtgctgaggcatggagggggtcgggggcgtctccccagtcatgtgactgccgtggtgactgtgcacctgactgccccacatcagagtccccaaacgcccgatcatcaacacacccgtggtgagcatcagcgtccatgatgatgaggagcttctgccccgggccctggacaaacccgtcacggtgcagttccgcctgctggagacagaggagcggaccaagcccatctgtgtcttctggaaccattcaatcctgtgagcctgcactgccctcgccccctcaggcttcgggctgaaagtccaggcccctgcatgcctcaccctccttgtctccctgaccctgccttcctcacacagggtcagtggcacaggtggctggtcggccagaggctgtgaagtcgtcttccgcaatgagagccacgtcagctgccagtgcaaccacatgacgagcttcgctgtgctcatggacgtttctcggcgggaggtcgggcccacaggggcagctgcagagccgtgggtgggcacccagggcacggggctgggtgctcaggtcctgcccttcctaattccctggccccctgccacctactctgcagaatggggagatcctgccactgaagacactgacatacgtggctctaggtgtcaccttggctgcccttctgctcaccttcttcttcctcactctcttgcgtatcctgcgctccaaccaacacggcatccgacgtaacctgacagctgccctgggcctggctcagctggtcttcctcctgggaatcaaccaggctgacctccctgtaagatgctcctactgcccagaaactgtccccaccttctcaggccgcctccccagcccccactggcaacccctgctcctgcaccatgaactctaataaggtgcctagtgcagcacctggcccagggtttcctcttctgtggctcccccgggatcccccagcacctgcctctggcccaggcttccctggaagcagttcccaacacccaggccctcctccatgcctgacccgaagcagagcctgtgctctgggcgggccccggtcgctgacctgccctggcctgggccctcagtttgcctgcacagtcattgccatcctgctgcacttcctgtacctctgcaccttttcctgggctctgctggaggccttgcacctgtaccgggcactcactgaggtgcgcgatgtcaacaccggccccatgcgcttctactacatgctgggctggggcgtgcctgccttcatcacaggtactcccacccattcccagtcttggggtcccacatccctgggtccacctttgtgccatgttctctccacccacatacaggccctgaggccccacatccccatgccccaggccgccttattcacaggtgtccctctggtttaacccagactctgcagccgccacccaggcgtcactcccttatcctggggagatcggtaggggccgatggtgggcagaacccttttccatgcttcatgcctggccctgtgagcccacctgcccgcagccctacttcccaggcccctcatcacccctccactgctcccgtctgtctccatgctccagggctagccgtgggcctggaccccgagggctacgg

SEQ ID NO: 3924 - DNA, 6000 bp, Homo sapiens
agcaacagagctaggatgtggatcagggctgtctgacttcagagtctgcatctgtgacaactatactgtaaggaagcccaagagacacaggtttaaattccaaccctgaagcaaaactctgtaactggaaaggcccctctggcattgggtggagcctggattgaaggggacactggaggccaacagaccttcaggaacacagagtttgcatggaaaggggctgagccctccagctgctcacagccctgggctctgccccttcctgcagccaggcccttcccttgtatggcccttgccccttccccaccccttggggtggcaaagaggaacctaatcccaggggtccccaaagtctgtctttgttctttgttctcccttctgtagccttgcctctatgaagggctcctcctatccccacccattcccacagtgagatcagcattcttttgttcttgtgatgctgaggttgggttcatatttgagattttcacatacccgtaagaggagtttaagagagatgacatgtgactctgaccaggacgtcacataggaggcatggaaaacaactcaggctcatcatcttactgctcagcattttctggccactgctgtatcccaccactatgatagatgctgtggtgtaatggttaagtgtctagactgtggacccaaactctctaggttcaaagcctagctctgtcagttagcagttgtgtgcaccctcagcatgaggatgataataatccctatctgttggagttgtaacaagggtgagtttgaattaatacaagttctaagaccaggacctggcacattagccattcctattattaaactaaaggaccagaaattgggctactcttcctgaagcgtggaattaccttaatgattgtgcaccaaggcttccccctctgaaagatggatggatacaccataaaggggtaattgagtctcctagggtagggctcactcactgtgcccagggcagtcagcaacttcctcccttcttgcttccccagctcttccatgaactccctgtgtgctctccttctcatttctggatctaaaggcctggagggttttcctcctatgtctttacccagttccttctcttgctcagggctctgtgcctcaggggactccctgcgctttcgagtgctatcctcaaaactttctaagtcccctctgatgcctggggttggctagagtcagcagtgccacctggagtggcgccccaggccctgtttctccccttgtacatgctctctgaccctctaccctacacatggggttcccaggtgccctgaggagctccaggactcctgcctatggagtcatcgtggggttttgggacttaggtcctggtccccagaggacagctagtgagcagatcgttttcattggctggcacagcacttctttgagggattaggtgagattgggccatgagaatagtgcagatacactcctctggagtacttcgaattgttcctacagacaaaggctgaaaaaaatgtatttgcctggggcactgacaccctaagggcagccttatcctcatccacatcctccccttccataaagaaacctttagcctttcagatgaatagacacggaaactgacaacctacattttcccacatccttcctgaccaaactttaacaaaatcccaagtactcttgacttcagaatgtcttctctccttcctctccatggtcttcttcacccctgcctcctcctagggtcccttctgagatgctctccctgaacactgggcctccctgccccatgtacaacaccccagggacctcagcagcctctgaatctgcactaacaaagcaggggagctggaccagactctctctggggctctgaggctggggtgagaaggaggggtctggcttgggactgggggttcaagggaggagtcagcaccctccagccagctctgcataccatgtgcgtccttaaagccctttctcttctcccgtaggatgctgcagaacaatcagctgggaggaatccccgcagaggcgctgtgggagctgccgagcctgcagtcgctgtgagtcattagagggctggtctgggagtcaccagcttcctggggcctgagtcacagcccagggccccctgcctcagctttcccttccctctgcaggcgccccctctcccagtccacgttccagacagcatgccgctcctggctttggtttctccggggttttctgttgtcatcagtgtgtggctgtgtacactcctatgcatatttcaggaaaagagtgctcccacgccccactgggggactgtgggaatgggacctccctaggtgaggccaccaggccagcggtcctggggcgactggtgttctgccattggagcctgggtttaggggtggagactgccgcccaaaagaagcatcaggaaggggttgtctcctctacctagcctgctcttgcccctgggctctgctgtgggtgggaaggaggctaggctcagatactcattttctctacttgggggtgggactgtccacagggactcacaggccacccataacagatccctccctccaaggagccctgtagttcccttcttgtccagcaggggcatcgtggaagccagacccagcctgagggtggaagcgggagcaggtgctccagggtgatgtaacccagcccagtgggagccgctgggcttcatccacataatgcacagcccaaggcctggaacacagtaggtgcctcatacatgcttgatgaacctaacttaattatcaggtacaacttcatccgatgggagagtgaacagatattttgggagaagtcaaagttggggggcaagattggggcacagcagttagctagtgggggaaactgagtcatagtgggcatgcagtgtgtccgaacaaaggcctctcatattctcagactttggcgctgttcagtctgtggatgtggaagtcagacaacttctgacttctccttgggtggaaggagaaatgaggtgggaaaaggtgactttccttctcatgactgatatttaggccccattccaccttacacagagggccagctgtgggggtcctggctagcagctgtgccacaccccccgtggtgagggctttcctctcctactccttccctgggtgccctctaccctcctgcctctgtgtctggtccctggcacccctcagctgctcgatcgatcggccccagtggcagaacctgcctccctgcactctctcagcttctgcccccccttcccaatgagtgctgggcgtctggccccagccctctcctctccctccatccagcctcacccctggacagggccaggcaacccagtgtgcccctagaggccaacgtcggaagaccagaggccaggcaagcctgtgcttgctccccacccgcaggggcagactaaacatttgcctagggcaccagcgcagcagggacagccaaaaataagggaggaggagtgaggagaatttgacatttcatccacagcctcaaagaggacttcataggggaaaaaaattagactttcactggacttcttcacacttttaaggttgttaattaagtttacttttttaaaaaaaatcgtgaatcacatattctgagttcttggggcttctaaaggtcttgctttcggactaggcatggagcttttgggcaatgcagacaattttccctacactttctgggaagtgggcagcccttgtggctgggagaaccagaccattagcttccactttcagccccattattctcctttgcctgggtataacagggcaggggacagaggtcaagtcccccactcccccagttataaggcagatgagaagattttgctttttgcaatcctgcaagaagagcactggcctgtgtgacagaaaatgtggcttcaagtcctggctctgatcgtgactactgtgtcatttgccctctctgcacctcagtttctctatcttcaaggtggggataattatcttccctgcctcacagggtgttgggaagatcaaatatatagtcaatgtgagggggatttgcaaaaaaaaaaaaaaagacttcacacagctataatgtatgatgatgttattgtgagatcgttcatctaaccagtcattgatcctccgccgtttttttgttttgttttgtttttgtttttgtttttgttttttgagaaagggtctggctctgtcacccaggctggagtgcagtgacctgatcgcaactcactgcaacctccacctcctaggctcaagccacccctcaccttagcctcctgagtagctgggactataggtgtgcactaccacgccaactaatttttgtatttttttgtagagatggggttttggttttgccatgttgtccaggctggtctcgaactcctgagccaaagcaatccacctaccttggtctcccctcccacagttctgggattacaggagtaagccactgtgcccagcctgatccttttttttttttttttttttttttttaagacagagtttttttgctctgtcgcccaggctggagtgcagtggtgcgatctcagctcactgcaacctccgcctcctgggttcaagagattctcctgcctcagcctcccaagtagctgggactacaggcgtgggctaccacgcccgtctaatttttatattttcagtagagacgggggtttcaccatattggccaggctggtctcgaactcctgacctcgtgattcacctgcgtcggcctcccaaagtgctgggattacaggcgtgagccatggggcccagctctattttttttttttttaaacaaaattttttgaggtggcagaaccagagttgagccttgaaagactagtatgaatcaggtgaagaggcggggaataacgtttcagacagagggaacagcacacgctgcaaaggcacaaagttaagaaggaacctgaaaggttcttgtatcggttggaatcccgagagctccccaacagctaacacgaagcggtgcgttttaacaagagcctgggtgccggcgggctgaggcgtaaaatggcgtcagcccccaaaatggcgtcagccccaagtgaggacggggcaggggttttattgtctcctataaacagggggcgtctcggtctgacgtaactgctacgcggtacccggatggcctctttctccatcttcaggggtaggtgtcttccaaccagggtaggtgtcttccggccggctcttttcctgcttctgctgtcttgctggcgtacgcaagtagccctgcgcctggcgactgggcctgagaagggaggggttactcatcccttcaagctttcaggccccggggacaatctttcagaaccaagtaaattctgaagaatttggaaggaagtgagtttggctggctgaacttgtgtgtgtgtggtgtgtgtgtgtgtgtgtgtgtgtgtgtgtgtgtgtgtgtggtgtgttgggggactggtgggaagggcagtagtggggaaagatctggagttagacgtggtcatacctgaaaagtagggaggaccttgctaaggatttggactttattcttaagacagcggggagccacgggagggcttttagcaggaaagcaaggtgatagggtttgtgtctttgaaaagttactttggcagcagttatagggggcagtctgaaggtggggaagtcagtgaagaggctcctaaaccaaggcagcatgttagtggccaaaggaaagacagacgggggcattggtgaaaggagaagcagacaaactagaaatatctagaagtcatgccagtgagactctggagtcggattgtttgggttcacctctcagcttcttcacttactcacttactgcctataagatcctgggcagactacttaccctctgcgtttccatttctttatcagtaaaatggaagcgataatagtatctgtgtatctcaacagcatagaatgaaatgatttaatatacataaaagaattagaacagcacctt

SEQ ID NO: 3925 - DNA, 6000 bp, Homo sapiens
tcagattaataatacctgtgttgaagttgtttttgttttttgatttttactttttcttatggaaaacttcatacatacaaaagtagagtgactatgtcttagtctgtgttgctataagagaatacctgagggcaggtaatttatgaagaaaagaggtttatttggctcacaattctacaggctgtataagaagcatggtgctgggacctgtttggcttctggtgtgggcctcatgctgcttccacccatggtggaaggcaaagaggagccagtgggcagagatcacatgatgaacgcaagggaagcagggtggggggaggtgccagactctctgaaacaatcagctctcatgggaactaatagattgagaactcactcattaccatgatgacaatgatggcaccaagacattcatgagggatccacccccatgacctaaacacttcccacgagaccccacctccaacataggggatcaaatttcagcatgaggtttggagggtcaaatatgcaaactatagcagactagaagaacgaccccttatttatctattatcctgtttggtagttatcaaattatggccaatcttatttcatttgtgcctgtatccacttaccctgcctgactatcttgaaattttagatattaagttatttcatctacaaacttttcattttctatttctaaaagatgttttaaaaattatttggcttattcttattgcctatttaccttcctatttatacatctaaatagaatgaaagttaattctatggaattaatacaccaagtaatattcagaatactagtagacacatcattcattctctgtagctctggcactttcatttactttagagatacttttttttttttttttttttgagacagcatctcactctgttgccccggctaaagtacagtggcgtgatctcggcttactgcaacctccgcctcccgggttcaagcgattctcctgcctcagcctcctgagtagctgggactacaggcacgcaccaccacgcctggctaatttttgtatttatagtagagatggggtttcaccatattggccaggctggtctcgaactcctgacctcgtcatccgcccacctcagcctcccaaagtgctgggattacaggcgtgagccaccgtgcctggctagagacactttttcatgtcttgggcattttgctgatatctgtgcacaatccatttctctttttgctgctttctttggtttcatgttgccatctctgagcaatgctgagtgtgtttgttttgcatgaagtattgtcagagataaggactgcctcttaaaaatataacaacaatatttgcattaattattcattgctgtgcaacaaattacacccgaaacttagaggcttgaaatagcaatcctttatcatctcttatggtttctaaggggcagaaattcagggggcattttggttgggtggttaatgcatggtgtctcatgagggtgctaggtctgcagttctctgaaggcttgacagtggctggaggatccacttctgagatgactgtcacatgtctggtgaattggtttttccatatgggcccctctgtagcctactcaagagcttggtggctgactttcccaagagggagcagcatgagagactagggtggaagttgcacgccttttatgacctagcctctgaaatcacatgccatcacttctgccatattttattgatcacacaggccagtcctgattcagtgtgggaggggactacataagggcatgaattccaggagccatcgtgaaggttggctatggcaatgccattatcacatctcaaaaaataaattgaataattatatcctaatagtatcactgtccatatattctaaattgtttgcttcaatcaggatccaaataagttccacatattataatttgtcatatgtctcttaagtcccttttgattcatagattctcctttccttgcttccttttttattcatgtaatttgtttgtgaaactcatagaggtttttgatgaggagcaactgaggtgatgtagataaaaacctaccatcatgaaggcttgctgcttgcccacatgctgacttcacatgaattagagacaggctccccttcctccagagaggacattattgcataacctggacaatctatgtatgacccttgatgggatgtgctggctctgggatgtgataagtagcacccagcttaacttcacctgagaggtgattcaataattccaacttttaaagccagtggtcagagcacatgagtcccattagaatcaggagaagctgctgctgcatagatgaatctccttgctttgtcccagctcttctcaggaaagctttcaggaagtctgaagaccgcagcccaaactgcggccacccacacttccacctgctcacgtgttccaggtcccaggcacgcaggctactgacagctggcatgcgccacccgtggccgtactccccagatgagcctgcagtgtccacttgggagctgggttagttagaaatctgattactaggattcctctcaactgtataagaaattgggcctccaagattggtagacagacaaaaggagtggcctctgatgatgccaggaccattggcagcaggacagggcatagtagagcacatacaaatgtgtaccagtgatggctgtgtgcatgtgcttttctgagtgtgggccagagcccatttacgcaggagggagatctctactgcccagaattttcttggttgccccgtcagtaagtttatgtctatgaagagcatgtggtatggtgcattgtgcagtgtatctatacatggcagcactgcttggactaactggttgtttcccttttcactggtctcttcaaaccaggataaagccatattaagctcaagcatatctgtttcccttaaacagattcagaattcctgggctccctgggtgcattctatcattccagttgaaagtttgcttccttccagtcatgtggctcttcattctactctccttggctctcatttcaggtaggatgggggacggaacagctccagccctttaagctgtggcctttccagagactttgcactgaagtcctcacctacttggagtccttgcttattaactcgaaccatctaaggagtgggatgggaaaataaaaggcgatgaaaataggtcttgtccatattagttcttgttcttagctcagataagagagtttgtgaggaaattgaaaagcttgactaaaatgatgactctgcactcactttggcagcacatatactgaaattagaatgatacagagtagattagcatggcccttgtgcaaggatgacatgcaaattcattacgcattccatatttttccccagcatctccactggaataaaataaaacgagagctctgtattttcttttagtttacccaggttcccccttcccccttctcccctcaaaaatatatgtgcacatatatgaggacacgactttcccctttccacttgtgcttgaccccaaagatgagacttggaacactggccttttcccagctctgtctgaccttcagttgtgtggcatttagagttgctgaacctttctctgggtcagcattcatacttataaactgaagatcatgctatcttccttgtggggttgttacgaaaacaaaatgttataaagaacctgagcctgcattttagtggtttttgctatacttctggaaggctgagagaagaatgggctctgctgtctcatctcctcttcttggtcagacactttccctgccatggtcaagctggacatggtgtgcgtgacttcctcattgtgcaatatcctgagatgatagaggtgcctatgctggtcttgtacggagggaacatgaagttcttatcccctaaagacagaacatgacttcctctgttttcagccctgtgcagccagcagaagcctccaaacatcactttctttctgagggtgctaaggtagggtgggagctagggacagagggcctcctaacggtaagcctcaggctcttcaaggccctccgtcaagcaatggtaggaggcctccatatttcacccacccttaggccagggaaaaggacttctccagagttgctttattagtttgctagggctgtgataacaacaacagcaacaaaaccacagtctgggaggctaaaacaatggaaatttatttccttatgttatgaaggtggtaagttcaagatcgaggcatttggcaagtttggtttcattctgaggccatctctcggtttgcagatgattgccttctggctgtgtcctcatgggccattcctctgtttgtattgtcagtgtcttaatctctcctttttataaggacatcagctgaattgaattaaggactaccccaatgaccctatgttaacttaattatctctttaaaggccttatatccaaatacagtcacattctggggtcactggaggttaggactgaaacatatgagttttgaaggggacatagttcagcccataatagttgccaatcaaaaagaggcaaaaatcagcctccgattctttaattaattatccttcaggagggcaggagctgcaatgttttgagagaacaatggtgtgtgtgtgtgcacgtgtgcgtgtgtgtgtgtgttttcacagatgccatggtcatggatgaaaaggtcaagagaagctttgtgctggacacggcttctgccatctgcaactacaatgcccactacaagaatcaccccaaatactggtgccgaggctatttccgtgactactgcaacatcatcgccttctcccctaacagcaccaatcatgtggccctgagggacacagggaaccagctcattgtcactatgtcctgcctgaccaaagaggacacgggctggtactggtgtggcatccagcgggactttgccagggatgacatggattttacagagctgattgtaactgacgacaaaggaaccctggccaatgacttttggtctgggaaaggtaaggagcctgcctggggtctggctggatgtaacccacagccatgggtgtttgctgctaagagagcactctctgaagccagtgagccccaactcagactcccactgggtactttgggcctgcctggcctctctcttcctccggcaaacatagggtggtcattaacagtgctggggaatagctggaagttggggacaaggagggtgtctgcgccctggggcacttttagaacttctcttcccttacagcaatctggtttaaggaccttagaagaggctgacagggtctaatagatgtgagatctttatgttgaaaggctttgaagttgttattaaatgtctgtgtgagaatcgcttgaaccaggcggcagaggttgcagtgagccgagattgcgccactgcactcctgcctgggcgatagagtgagactcagtctcaaaaaaaaaaaaagtctgtgtgccttgtcggtctagaatcttgaagattagattcttgagaggtgtctgaggctgcaaaaaatgacccacgtgcctggtaactgtcaacttaaataatttaatagtatacggaggtagccaggtgcggtggctcactcctgtaatcccagcagtttgggaggctgaggtgggtggattgctagagcccaggagtttaagaccagcctgggcaacatggagaaagcccatccctacaaaaaatacaaaaattagctggatgtggtggtgcctgcctgtagtcccagctactcaggaggctgagaagggaggatcatctgagtccagggaggttgaggctgcagtgagccgtgattgcaccactgcacttcagcctggatgacagaatgagaccctgtctcaaaaaataataataataatttacagatataaatttcatggtccaactagtaagcaccctattttgcttttaaggaatgtgcagtttatatttggagaccacagggaaggtgtgggtggaactg

SEQ ID NO: 3926 - DNA, 6000 bp, Homo sapiens
ggcctctccagtagctgggactacaggtgtgtgccaccatgcctggctaatttttgtatttttagtagaaacagagtttcaccatgttgaccaagctggtcttgaactcctgacttcaggtgatccatccgcctcggcctcccaaagtgctgggattacaggcatcagccactgcacctggccggaatgtataaatttagaaccctcattagcatgtcttaatgtttgatttctcatggaaaaaaatgttggtaccctgcccagagcctcaagttaaatgactatatttttgccactttcctatgccagtgggaggagctttctaatcccttttccatgaaggagaaatcccttctagaacctactctttatgtaggatgttggttccagttctctgccttgtagggcccaaagtcattctgccacctaaaaacctctgccctaggggacttaaactataatagatctaataccctctggttacaggtgtgaggttaatattctgccttttagttttttctctgttacctgtaggtttctttcttttttcaagtttgactttttttaaaaaattaaatttggggttatatttaatccagcttttctgtgcatttgaaataagaaacatgttcacatcagtgacatccaccatgttgccagaggagactcccatagtaagtgaacaacgctatcctttgcttggataaagtcattataccttgtgaagtgcttcctagtcttgttttcattcaccttttatattttcaatttcttaatctttctgactgcattttggggaatttcttcagactaattcttatatttatgcttgaatagtgagttcatactgatacgtccaatcaccaatctaacacaaggtgttttctcacctccccccattctgtaatttgtatcgtttatctcccacagtaaaatacttggttcccaacataagcgtggttatagttcaaacaaaagcatttatacacaattgccctacagtccaataggtataaaattgcaatgccattaccaacatctaacctactaagtaaacttagtaaacttaatttttttctctttatggttatatcattaatctgatttacattaggcttttttctgtctacagtcaagtttatgtttactttttataacattttttatttaaaatttttagtgtgtaaaatatttacatggttcagaaatcaaaactataaagaaatagagaaatttacttctctctctcttaatttctgatgtatctttcctatatttctttttaaataaacatatttatatatatttgtgtgtgtatgtattctcatttcaacttctttctcacttatttccagttttttttttttttttttttttttttacaactagggcctcagtggataaaataaccttgtccacctgttatttcgtattgtgaatttgtatcttcagggtagatgcttagatatggagttgctgggccaagggtgtgcaatggtttggatatggttttgggggccccgccaagtctcatgttgacatttgatcccagtgttggaggtggggcctggtgggaggtgtttttgttgtggggtagatccctcatggaggacagcatggtgccattcttgtgggagtgagtgagttctaactcttagttcccactagaatgggttgttgaaaagagcctggtacctcctttcctctcttggctcccctctccttatgtgatctgcatacactggctcccctttgttttcagccatgagtggaggcagcttgaagccctcaccagagacagatgctgcaccataattgtacagcctgcagaaccatgagctaaataaacatcttttctttataagttacccagcctcagttattcctttatagcaatgcaaacagactaagacagggtgcatacacttagtatttttacctttgcccaattcctctccctagggttctgccagttgcatttactggaagtgtaggagagtgcctgtttccccaatgccttgcctgcagagagtgctgccaacctttggaatttcctggtctgaaaagaaagaaatggcatctcagtgtagttttaacatggatttctcttattttcagtgaaattgggtattgtttcagtgtttgagtaccatgggcatatctttctgtgaactctgtgtttaggtctttgtctttgtccattttttgttgcttataacaaaatacctgaaactgggtaatttgtaaagaaaaggaatttatttcttacagtgatggaggctaaaatatccaaggttgaggggctgcctctggtgagggccttcttgttggtggggacgctgtagaatccccaggtggcacagggcatcacatggatgggggctgagtgctagctcaggtctctcttcctcttcctataaatccaccagtcccactgcgtgataacccatcaatccatgaatgcgttattccattcacgagagcagagccctcatcacccagtcacctcttagaaaggctccacttctccatgttgcctattggaggttaagtttcaacgtgagtttcagaaggtacaggcattcaaaccataatagtcttacggccacttttttattctgggttttcatctgttttttttctcttgatttttttttaactagttctttacagatgaggatgattagctttttatctgtgatataagctataaacatttcctctctttatttcatttgtctaatgattcaacctctattttctttctttttttataatttcaacttttattttagatttgggggtacatgtgtaggcttgttacatgcaaagtctattttcttaatcaccatgttgtcccttgtgcagtaatatgcttatttagaaactttgagacgttaattaataatttacttattagagtcaacaaacccagaactcgccaactaaaggcaaaaaccaaaaacaaccttacaaagacacagacatagaaggcacacctagaaagtatctccatagcacaaagctggagtaactaatatgttacataactgaatcaaaattcagaatactttagcagcctggaaatatgggccaaaatgcataaagggaaatttagtagaaataatgttttgtacataggcttaaaaacattaattccacatgttcaagattagggacatctgtcttcacagaaattcatgtatgtataaactttggggtttagtcaatcacacacttatataagcccaacagaattagttgctacaagaaaatgttttgagacagggtcttgctttgtcacccaggctggagctcagtgacacaaacagctcactgcagccttgacctctgggctcaaggggtcctcccacctcagcccgctaagtagctgggagtacaggaatgtacgaccattcccggataattttctgtgtatttttctgtagagacagtttcgccacgttgcccgggcttgctctcaaactcctgagctcaagcagtctgcccacatgggcctcccaaagtgctgggattaccggtgtgagccactctgcgccctgcctccagaaaatgtattcttagagtgaatagtagaaggggattattctgatcatggagataattgcccctttggacctgacacttatcaaaatacatccagaatggtgtgttcaattttggggaccgcaaatcaagagagtcatagacatctgagagcaaatacaaagcagggaagctgagttagtgaaaggtctggaaaccactatacagctcactatgagggaagctttctctctggcacttaggactgctggtgaggggaagggctgccctattaacccatgcactccctctggccaaagagtgtttgagtagaggcagcggatccaccacgagggttgtgaggatggccccgctgctgtgtgtaggcagtttaggcagcagagtttttgtcttgatcgtggaaagcgatctttcctttctttttggtgtcttctgtgtgcagagaatgagagcaggtggggaaagtgatctgtggggttttttggctaactgaagtatatgaagagttttggagaaacattagtctgtaggatttaacattaacatgtgtcaacctgcggctttagccaagatcccaagccagtttcctgagggcagggactgcaccttatagacagtgatgtctgtgggccaagacctcaaatggtgcctctacttccccatttacagttagtgcttgccctccctcgccgtgtctgatgagaacagtaatgacgtccccatataaactgtacctgattaatccctgcttagggagctcagaacaattcccatgagaatcttacagtcaaattgtaatgtgcaccaaaactgactggcggtgggctaaaatgcagatttgattccgtgagatggagatgcggagcctgaggttctgcctctctagtgagctctcaggtgatggtgatcctgctggttcagggcccaccctgagtagccagggtctaaacacagcagtctgcagagtgtctcccatagaccacttgtaacagccccctgccccctgccccagcctgcttgtttaaaatgcagattcctaggttgtgcctgtgatctctgcgcccagaacctctagtggtggagctcaaggatcagctttctaaactggcacttcagacgattcttcagcacattaaaggttttgaaccactggtcttgggaaaatggataggatgggttagaccagaggaagaaattggtcagggggatgtaatgaatttcacacatggttgtagaaaatggcccacttatgtagcgcttacgtggggaagacccgctgagagtctgtactagctgggtgatctgaggcgtagcacttaacccctttaagcctttcttccctaaggtggagacgatgtgatttgatgaatcttttcctgtcccctggtcctgccttatctttccagtcgtccagcatgctctgcccaccccacgccgaggtgcactgaccatgagcctcaactcctccctcagctgcaggaaggagctgagtaatctcactgaggaggagggtggcgaagggggcgtcatcatcacccagttcatcgccatcattgtcatcaccatttttgtctgcctgggaaacctggtcatcgtggtcaccttgtacaagaagtcctacctcctcaccctcagcaacaagttcgtcttcagcctgactctgtccaacttcctgctgtccgtgttggtgctgccttttgtggtgacgagctccatccgcagggaatggatctttggtgtagtgtggtgcaacttctctgccctcctctacctgctgatcagctctgccagcatgctaaccctcggggtcattgccatcgaccggtaagcatgcctcagacttagagaattgagggattactgacgggcgctcatctggtgcagtgtccctctgactgccttagttccctggagagtgtcaggggcccttgctgggggaggatgaccaggtggagttctgcctctggagccatctcttcaaccaaagcacatctcgttttgtctgtggatgttacatacaatattatattttaaaaagagcttccatcgcctaaaataaaacattgtagaaacctctgattcttggtttgtagatgaagaagccgaagccaaggcaggtttcagttccgggcagcactgggtccagggcctctgactctgcttctctttctcccagtgtgacccctgctctgtcttgctttggtgttgactagtgcagcccgaacagggaacaccctcactgcccacagtccaggactgaaaggagagcagggggaaggaagacagccagagaatacaggcagtgacaccggggagaggccgtgtgcatttggaaactcggctgctcccgccctcaacgtagctgatgcacggggaggtcaggcgcagctgatgttcctaagcagcatctcgcgggttcttcagggtcccgca

SEQ ID NO: 3927 - DNA, 6000 bp, Homo sapiens
cccagggtatagtacagtggcgccatcatagcttactgcagcctcaacttcctggactcaagtgatctcccacctcagtcttctaagtagctggaagtacagatgtggtatgccacaacacttggctaatttttgaattttttgtggagacagggtcccactatgttgcccaggctggtctcaaactcctgggctcaagcgatcctctcacctcagcctcccaaagagctgggattatactcatgagctatgacccctggccaattcattctttacctgcttaactcttatcatcatcagtatcaccttttccaataaaattagtctctgtaaaaaatcctctcaatttttctacattctacatagcagattttacagtctcagcacccaaggaatttttcttccaaatgacttctagagctatgggtcaacaatctccataaagatggattgagtggcttaggaaacaaagataatgagaaagagaagagagaggagctaaccatttctcaatttccataattaataaatatctttttggcagggtgtggtggctcaaccgtgtaatcccaacactttgggaggccaaggcacgcggatgacctgagaccaggagttcaagactagcccggccaacatggtgaaaccttttctctacaaaaatacaaaaaacaaaattagccgggtatggtggcatgtgcctgtagtcccagctacttgggaggctgaggcagaattgcttgaacccaggaggtggaggttgcagtgagccaagatcgcaccactgcactccagcctgggggacagagcaagactctgcctaaaaaaaacaaaaaaaaaacaaaacaaaaaaaacttttcatctattatttttcccaaggtaatgtttatattctcacctaattatactgatgtgaaaaacttcacacaacagcacaacacttataaataagaataaaatagatcagcagtataatgttgaatgacagaggcccagtatttccctgtaaaaaatgcccaataactaataatctacatttgattgataagattagcttttaccagataagaaaagccctcctaagtttaaatggtagctagttttaattgtgtccttaggtttagcatgcttctgtagaagactattaagcagaaaatgagtaagtgaacttacagaaagtgatgtttatccttattctaataataaaattcaattagtctgagtaaataaattgaaaatatgacttcaatgactttaaaaaaagtaacatttcagtgatttttttcctcctcaaatattctatttaggtttcaaaataggcaaaatattatcgtcaattaagttggttaacaatagctaagacttggaaccaacccaaatgtccaacaatgatagactggattaagaaaatgtggcacatatacaccatggaatactatgcagccataaaaaatgatgagttcatgtcctttgtagggacgtggatgaaattggaaatcatcattctcagtaaactatcgcaaggacaaaaaaccaaacaccgcatgttctcactcatagatgggaactgaacaatgagaacacacggacacaggaaggggaacatcacactctggggactgttgtggggtgggggcaggggggagggataacattaggagatatacctaatgctaaatgacgagttaatgggtgcagcacaccagcatggcacatgtatacatatgtaactaacctgcacattgtgcacatataccctaaaacttaaagtataataataaaaaaaaaaagttgtttaaaaaataaagataaaaatagcttcttcaaaaaaaaaaaaaccagtggccatgcaaaatcacattaatattattctgtttaagtgattattctcaaaattttgaaatttgttccagtgtttatcctgaaacaaaaaagatgctttccaatgatcagatcaatgctttccaatgtaatgctatggcatgtacaagtttgttccagcattaagtctggctcttaaacacaagacccctaatcgaactgtatatagttgtctatgaaataaatattgactcagaaatctacccactggggcaaaaatataggtatgtttattaacttaaaaaataattgtagctgctgaggtataatttggaaataactatcactaccaaaaaaaaccacacagactcccaatgaaagctccaaatcagaaaggtgtgaatatatccagaataattcttcataattacaaattttaatgtttatagaataattgccatatgcccatcatttaatcctggcaagaattccattagtttttataggctgggcgcgatggctcatacctgtaatcccaacactttgggaggtcgaggcagcagatcacgaggtcaggagttcgagagcagcctggccaacacagtgaaaccccatctctactaaaaatacaaaaattagccaggcatggtggcgtgtgcctgtagtcccagctactcaggaggctgaggcaggacaatcgcttgaacccgggaggcagaggttgcagtgagccgagattacgccactgcactccagcctgggcgacagagtaagacttcacctcaaaaaaaaaaaaaaaaaaaaaagtttttatagctaggaatactgaggctcagggaaagcctgtggcttgctcagaccacaaaaagaagagttgggagttaggaattgaattcagttttttttttttttttttgagatggagtctcactctgttgcccaggctggagtgcaatggcgtgatctcggctcactgcaacctccgcctcccgggttcaagcaatgattctcctgcctcagcctcccgagtagctgggtttacaggtgcgtgccaccacgatcggctaattttttgtatttttagtagagacggggtttcaccgtgttagccaggatggtcttgatctcccgacctcgtgatccacccgcctcagcctcccaaagtgctgggattacaggcgtgagccaccgcgcctggcgtgaattcagtctcttaaagccaaaatgtgctctttccaaatgtcaagtaaacccaaagggagcagagtggtgtgaaagtgccattcacctactagcaacatcaataaagaaaattagtttcataaaacatttaaaattatttgaagcccatcagtatacacactgatagtctttgaataaaatgtattcccagccagtcatttagaaggcaacccaaatctagtgaacactcttgcatcactgttttcacctattaaaaatgagactgtcccgactcattacttttcatcctcctcacttgggacaggaggaagagctgctatctgaaatccaaatggttggtaaatatcattttgcattgtcttaatggggagaggaggaacaaaaaaacacgcctctgtatcctaataattaaacattgtttctctccaagaaaatacaagtaagctctttaatatctaacatagaaatccaatgtctgacacaaacgcaatattatgggcactgggcaaaaattgacaaactgtaaggaggaaaaaaaaaggtgggtccctttcaaagtctgtccaaagccttaactgagaagggtctcaggcagggtggggagaaggaaacgcgctccactccgagaggctccagcaagggcgcctccatatgcggaactctcgcccaatccctgcacaggctgaaatctcgtgaccgccggggagcctgtttggagaaaagtagacagggagcccgcaagctgggttggcagaggacgctggaacctggctggtcggggagaaaatgtctccttggcagctgcagccactgtcctgtggtctaacttcccagagctggctggcgagcgaggtgtgcctgccgctggcgtctccccacccccttcccccacccctttctctccgcggctcctgcactccgcagagctgccgcgaccaaagctacaccacctagccaaaaagaaagaaaagagacaatcccggctgcgcacaggtcggcagggctcgcccttggcttccccggccggtgacagccgccctggcctctgccacccgcccgacagagcgcggccctcggcgccggggcgagcgaggtggcaattgacatttgcacggttcgtccatacagtccgcacgcctgctcctccagcccgcggcctcggaccctggactccgccaagggccgtctccctctgctcaccccgaccctgccccaggctcaagggctaggaaggcgatgcccccagcgggcaagtggcctccgaagggaaccatgttaaccttgcagtgcacacatctgcccacacgcccagtgtcacagcccggccaagcctgacagcctccccgccacggatgcctgcccagcccaaccccgcatcccctcccggccccatgcccggactcctagcccgtccaccccaaaccaagcccaggaaaggggatatgagattttgcttaagcaaatatatctacctggatcaaattcagggatccgagcttggtattcggctccgactctcatcccaacatctgcaaagcaatgccaaaaaatatatataaaaaataaaaaagaagaaaagaaagaaaaaggaagagacacttaaaaaataaaaatcgctagatggaggaaagaagcggcgggtggatgggaagatatcaactcggggcactccgggagatggcagcggattgggggcggggagcgggggggggcaaaggcggaggattggtcgagggcggagggacggggggtcgcgggggtgctgctgcactgcaccgggagttcgaggctaccgcagcgcccaggctctgaggggagggagggcgggagagcggcgaggggagggggctgggggaggggaagagggaggggggcaggcgggctggcggggaggagttcgaggctaccaccgtgctcgtcgtcgctgctgcagccgctctcgggctctgagtagtgcagcccgccgttggtggacgaggcgccgctgccgccgccgcctgccgggctcttggcgctgccgttggccgatcggttcttccccagtaactcgggccctttctccatcatgccgggcatggtagaacaggggagggggaaaggtgaggggaagaggcaggcgtcagggtgaaggcggagatggcttagagcgcgggcgggagggaaaggaggaggaggaggagacggcggcggcggcggaggaggaggaggctgttaatatggagccgccataaccgccccgctccggcagtagcgcagtcgcctcacaacaacccgccccggccccgcctctctcccctcctccctccgccgccgcccgccccgcgcagtcccgggcgcccctcggccgcaccgcgctctacgccgccgccggtatcactccgctccgcagggaggttccggccgcctggggggaggggaaggggggaggggcggggaaaccccgctcgcaggcagccgggccaccccaaccaagcgctaataaaatcgccaccgaggcgtggccgccgctcgggctttcttcctagggggcgctccggagcgcgggcgggagatgcacacgagggagcgggactctttgccctctctgggcggaaggaacgcggtcaccctgagaaaggaccggcgcgacccgactgggcgaccggggggagcggccccccccctctgcggaccgggctgcaggcacgggcctgagcgcggcgttcctcagatgtctggacccgcaggccgctcagtttcccggtgtccgctggcagcctcgagctaggggcgcgctctggcccgcggtgcagtcgcgcagtatagcagggcggccttggggctctgaggcccaaccggcgaaagaagtagactcggccctaaccatctcgacgctacaatttttgtttctggatctctgaagtagggcccagttcccgagagagagtctggggatgacgggatgagtttccggggctgagcgatgcaactgtttt

SEQ ID NO: 3928 - DNA, 6000 bp, Homo sapiens
ttctcagtaaactatcgcaagatcaaaaaaccaaacaccgcatattctcactcataggtgggaactgaacaatgagatcacatggacacaggaaggggaatatcacactctggggactgtggtggggtggggggaggggggagggatagcattgggagatatacctaatgctagatgacgagttagtgggtgcagcgcaccagcatggcacatgtatacatatgtaactaacctgcacaatgtgcacatgtaccctaaaacttaaagtataataaaaaaaaaagaaagaagaaatgctgagtagtaaagcaaataatattttaaattttgctaatttgagagaataaagttagtgtgactgcaatccactccttcaactttctacctcaatggtccccaaactcagtgtttctcaaaatgtgatcagcgaatcgcctaaatgagaagaacccagggagcttgtattacacacagatttcttggcaccactcctctggcattcaacacactgaagtttaagaacaatctcccttcataaaatctcagctccagacaagcttgttcatgctcttgtttcccaaaaattttggacacatttctagctccaaactttcacctgttctctccagggaatccatcccctttccatcacccacttctccctgcttctataatccctaccagctcgagttcttcttgaccatcatgtgaccagcaaggagaaaaccaaaaaggttgccaaccccagtcctgaccacgcaccgtgtcactgcccatcctgcttggtagttgccattgtatccagcattgggctggtcccctggttaatagtagttgaccagttggctgaaggattgaattcagtaggttttatgctgggctagggaatgcaggtaattagcccataaagggtaaccctgacctaacatttcacatggcctctcatgaagggcagtgtatgagtctcctgtggctgctgtaacaaattaccataaaccacatggcttaaaaccaacacacattcatctcacagttccagaaccagaaaccagagtttgtttcactggaccaaaagcaaggtgtcaagagggccacactccctctggaggctctaagggaaagcccattctttgcctcctccagcttccagtgatttctagaatcccttgtcttgggatccctaacgagcactccgatctgcaaggccagcctcttcacatttctctctgctccattttcacatcgcctcatccatgggtgtgaatagcaccctctgccttctcttataatagttcatgtgatagcacttaagacccacctgggtaatccaggataacatccccttattaagattcttaatgtaatcacatcttcaaagaccctttttccaaataaggtagtatttcataaagtagtaagttccatgggttcggacatgatatctttgggggccattgttcagcctactacaggcagtgtcttaattcacagagctgcctcaccagcaggtgcccccaacaccatctggtcaaagagctcaagggtggtgtttacagattcacctctggaagcagtgcttccaatgctggctgcatatgagaatcacctgggagttataaaaacatcttgctcacccccaaagcttctgattctactgtctgaggcatgggtattttttaacctcccagttgattctcatatgtacagctgggctggagaaccacagcacaaaatgccttggggaacccggaggagctgcaaagctcccttcagctgcttgtagctcggcctctctttcctgactagtcaaccaacccaggaatcccagaggccttcttctgatgcccggaaataagatgaaaagtccaggctgacagacaggggctgagcagaagggttcaggtagagcttgttctcttccagtctggctgcctggggctccacactcgctccctcttcccctaactgggctgcagtcgtgattctcccagcacagatctaattcctgcacttccagtaagaaaggattgaaaaggcaatgagaggagcaggggccctgggcagaaaaattattgaagagtacaaccataatccagtaaacccattatgttctctccaggaataaagagagcttcacagactataaacacacatacacacacacacacacacacacacggaattgtcccgcctcagtctcactccccacatacacatacacacacacacatgcacacttataccgtcaaacacatgcgcatacacacaaatgcatagtaaactcactctagctgcctgtcaggagttggcaccctagcccacctctgggaaaacagatgttcaagaaatgaagctggagcaaaggaaggcacaagccagttgttctctcctgtgcccggtatacaaagagatgtttctcaggctccaagggcagggcaatgccagtgcttggagtataatctaactgcctaaataggctcaaggccacgtcacagttttctgggagcaggaccaatttggcattgcagagctcaaaagtgacctctggggtttggcagcaactggctgccatttggagccaggagacccttactgaaaggtggaagggccactctgaggtctgcctcttgctgtaagacctcagacacagcctcagaccctggagcgatgtgtggagaaaggccaagaggcagcagactatggaggttacaagcatggctatggagcacacctggctttgaccttcacccacattctcggggtccccatcagctcagtgcacccgtcttcctgagctaatcccttcctgagctaaggtttggtcaaccagctttcttactctttttttcctgtttctacataatatatttagctagttcttcagatttctagtactttcctaacccttaaagtgcctctgtatctattagctattatcagtagactgctgcttaacagccacaaaaccccagtagcatacaaaattaaataatgacagctcacacacctgcatggagcagctgatgtgggctaagctcactgcagcatctgtagacctgcaggggctctctctgggatgctcagctggggtggctctgccctatgtctctcatcctccccatctctgaggctagcagaccagcccagacacgttcctttcagggagacagcaagacagcaagcagaaacacacaaggcctctcaaggtccaggctggaagcctcagactcccttccaccttattctattgaccaaagtgggtcacatgactaatcccagattcaaaaaataaggaaatcaaatccacaaagtcacatggcaaagggcatggatacagagtgagggaagaatagaggcctttagtgcaatctaccacagcctctctgagacaaggagaagcaccacccaagtcaggccaatgatccatcctcctgggcctgaaggaggtttcgttggaatcaggtacttcctacaaatgtgcaggctcctcttccccgatgatgcagcctgaagagaactctgggctccagagactgctgccttgctccaccccaaatgccagagcctctgggcttcctagggtcctgggtccagggtgaaaagtgtcacctcatggggtgatggagcaaagcagcagaacctgccaggcttgggcctcaaaggctcttggtacctggatctgactggaactgaagaggaggaggctcctgagagacgggtaggagaaccgggaggtaaggggtaggtacagcctccagggacctgcaatgctgaccaaacacctgaccagggtttgatctcagcatcagaaaacctgattcaagtcctggttctgccctaactagccaggggcctcagacaactcattcaacctctcagggcttgtctccatatctaggaaatggagatggtgttatgttccttacaggtagggattaggctatttacatgaaatggactttactaagtcccactaaatgtcctttgaagcccaggcatctttgaccatcctgctctgggagggtaggggagtgatattttccatctccctccgcctcccccagacactgccccatctccgagcactgccagttctcagggtgggttgtggtaccctctacccacttccctgggcactgcctggctggctttcccactgtggcacccactgtttgcaggcctccacaaaagccctctccactcactgggcttcttcttaacgttcaattgctggcttctggagttcttttaatttcctgttctctggctgccctttctacaggctatgcccctggccactccgcccttgactggtttaaatttgccatcagcatctcttggcttgattcctttggtctgtcccagcacgctggcctcacacgcccacattaaaggtcacctcttggatggtattatagctgagcagctggaaaaagtctcagaagctgatttccctttttctagctacgagatcattcttttatccaccaactcccaggtgagcccctgggcctcaaaatgggctgttccctgttgcctcaaacaatggcttattttaaaacctcatctggactcatctccctgagtgatctccacctcccttgagaacacaaactgccaaatctattccttgaggcttgctcagtggcaaatgctcaccattggaggcctcaggaaaagacggagccatgagggacaggagggggtctcctcgacctcattttcccagccattcaggcagaaccaggtgctcaccagctccctgctggccttctcaaagctggtaggcaggggccagagggaaggacaaaggaaatgcttcctgacttcatgagtatatgcacagggcccagagcagagggagagaaggccctgtcctgccagccaagccagctgatggacttgatccagagatgggcacctatcttcagggcgcctcctgcccaggcctctcagacttgggtgaacctcttaccaccaaactctgaggggtatgtcccgatctctcctctaccccaagattaacagattagatatttctgtcctccagttggcaaatacatattaaaaccctgccatgtgacaagtaggggtggggctggggtaacaccacgctcaataaaagagacagggtccctgccctcatagaacctacatctagtggggtcccagagatcataaacagctagagcaactgatgactaaaattatttcagactatgaaacattctgtctagaaaataaatatagtgctgtgacagagtccagcagagcaggagcctactcatgatgggtcatccaaaaggcctatcagaggaggttagtgatatttaagcagagactcccaggataaggagctggaggaatagcaggcagaggcactggctgcacgcacaaaagtcctgaggcagagagcacttggtgtgtcctaggaagtgtaagaggagccctgtgtctagaacagagtgagagaagtggagggcagagactgctggggaggcaggcaggacctgctcaccagggtggtgagtcacagaagattctgggtttctttcaactcaacggggaagcagtcactgaagggttttaagcaagagcaccgacatggttagggttttgaaaagatctctccagttgtgtagagaaaagacaaataaacgttaaatcagaacagaggagccagggtagccagaagagaagtcttcctgataaacaagaccagctagtaaggaacttgctagaaatttctactttcttgaaagaacttaaataagatggaaacatttatgtaaaatggtgtctaattgtctcaccttggaacaatggtctaattctggttcctacatgagctgtgtctcagctgaaatttttgattctataaagcagagaaaatatctacctgttctgcctttttaaattgaatagatagcaaatttttaaaactttaaaaacattacaggaattatgttcaaataagccaacagataggtgttgaggcat

SEQ ID NO: 3929 - DNA, 6000 bp, Homo sapiens
gtctctactaaaaatacaaaaactagcccggtgtggtggcacacacctgtaattccagctactctagaggctgaggcaggagaattgcttgagcccgggagacggaggttgcagtgagccgagatgatgctgctgcactccagcctggctgacagagcgagactccatttcaaaaaataaataaataaatgaaaataaaaataaaaagacataaagtaattttaattgtgtcataaataaagttcaacaagaactaggcttgcaaatataagacttgaaactactgtgtacactccttgttctttctggatagcacatctattgtcagcaatgttttctcatttctagttgagaaatgataaaatgtgatgctttttatactgtacagtaccggctctaaaagatgataaatataacataaatctataattactgattacttatgggagaggtgatattctcaattatggctttgatgatactgctctcttggttcgtatccacttaaatctgaacggactttcattatatatgggactatagctctacattttccagaggtcttgattaaatatggtttaactattgtcaaaaataatgagttgtgtagtagatctattacaaaaggttccatagtaagatactatcttagaaagtatcaaattaggaaaaaaaactaagaccacaattggagactgaaaagtttttcatgaagaattatcatcaagaaaattctctctatgaaggattttgttttattcacttatgtacatattattttaggagtttttaagaaacaatcccttactaagttagcaataagtagatcatcaatacagatttctttagacatgacatttggattatattatccatataattctggatctcgacttatccatttctcaaaatgagtcacttctcaaaagtgactactggtaaaataaaaactctaagaagaaactatagccttaaaatgtctctaatatgtgtcctgaagatgatttattatcaagcaaatcctgctgaaaggccatttataacgtgggtcttctggacaactgaaatcctattaatcctattcccttaacggcctccagggagatgtttgcattttagcaaggctacgtttccgggttttttaaaacctggaaagagtctgtaattgagttaatgaagcggacagacttcaaccagcaaagtgctaggcatttggtgaaaagggctgatgtcagggaaaggccccaagaggcaggagtcgtggtggccatttcagttgctattaggaggcaggaggtatggacattagtgaaatgggacattagtgaaaaggacattcgtgagggggctatggggaagtgcggtacatgcccattccagtagcagcagtgtctgctaagctccagatgatgattgacacgtcggactgttgtcagatattctgatttttctttttttaaaaaaatctttccatttttatttatttatttatagacacagggtctcactgtgttgcccaggctggtctcaagcttctggcctcaagcaatcctcccgccttggcctcccaacatgttggaaatacaagctagagccactgtgcctggctccttcagatttttcaatgggccagcagcttgaatataaatgtgaactgcccttcttgttaaatgttaataactaattcaatttaagcaaaatctgtacgtcaacactttgcaagccaaacaggatggttttgcgtcatatggtgccacgaatttcagaccaccagtttgaaaccctaaggataggacatttcccaaaggaagttgaagaatcttgaagacaaaagttgccctcttctggcccagcatggtggcttatgcctgtaatcccagcactttgggaggccaaggtgggtggatcacctgaggtcaggagtttgagatcagcctggccaacatgtcaaacctcgtctctactaaaaatacaaaaattagccaggtgtggtggtgggtgcctgtaatctcagctactcaggaggctgaggcaggagaatcacttgaacccaggaggtggaggttgtagtgagctgagatggtgccactgcactccagcctgggtgacagagcgagacttcgtctcaaaaaaaaaaaaaaaataccagttgccctcttctcagcctaacctagagctaatgacacaaggaattctcacctttattcttggtgaactatccctgatcaagctttgcctgagaaacgtttctatgagctaggcctgaagatgaagttcaaagccaatattcagctctgtcaacattttcagaacaagcagaggccctgtccttgcccagaagtcacaagtcaatcttctgagttaataaaatcatgggaaatcctgctgctacttcttccagggatttaagagcataaaagttgtgagatacttaccttactcagctctccttccatatattgtatatatagtacagtacttgattccttcaatgacagattgctaggagcctggaatatgaatgtcaggattgggagttgggagttggtactatatacactactaagtcagttacggttctgctatgtttaagaacatgacccctggagccaactgcctggctcagattctgtctccaccgcttagtaactgagcttaggcaagttgcataacccgtctgtaaaattggggataataaaatatctacctcggtggttgttctgaggattgaacaagttaatacttagaacagggcaccatatagttgtttgttattatggggaaaatattactttgaagagctgaggaaactagcgctcagagaagctaattggcttatctaaagtcacactaactaaaaaaaaaaaaagagtaggtgctgacatttgaactccagtttgtctacttcgaaacatagtattatagtattctggtcctttcactccaccacaaatgttcttatatgatgttgggtttatctgattgttctatgttaggcttgtctgattgttcaatataccttttttttgttttcttttgagatggaatcacgctctgtcgcccaggctggaatgcaatggcacgatctctgctcactgcaatgtccacctcccgggctcaagcaattctcctgcctcagcctcctgagtagctggcactacaggcacctaccaccaagcctgactaatttttgtgtttttagtagagatggggtttcaccatgttggccaggatggtttcgaactcctggcctcatatgatccacctgtcttggcctcccaaagtgctgggattacaagagtgagccactgcaccagcctgttcaatgtaacttataagttcaatataagtttatatataaccatgttttgctgcaaatcctggttgcatctgaatccagtatattatagaaatcaatggaggtaattttaggtcaatagccttctaaatgatcaagactgattctctaaagaggaaagcaggttcaagtcaatagatgaacgttaataaggcaaagctggtataggtcctataacccagagggcgggggtaaaagagtctctccagagacagtggattccaaatattaattaaaagttttgttcttttagtggagaaaatgaaaagcttttcacttggtgcttgtttggggatgcggtagaataaatttgagactgggtaataaaccgtcagtaaagcctagaaattgaaagaggactcctgagctgaatggccttgcaaaattaatgtacagcaaaaagttcacccaaaaacacttacagcagttcgacatctctctatcagcgaaggccttctaaacagcaggtgctcagtaatagtcataaaacctcagctaaaagcagcttaatgtgataatttatttacagataaggaaaccaaggccgtgacagatgactgacttgcacaatgtcacccagtgagttagcaacagaatgaaaactagactccaagcccatatacatcagtggatgggcccaggtccctggaatcgaattctatggagccatatcctacattgcctgttgttgcctgttagtttagggtattgtgaactatttctgagcttcagtttcctcatgtctaaaataaaagggagagcagcccttgcttcatcacactgttgttctgaggatgtgatccatgaaaagccttcgccataaagcctggcacagaggaaacgctcagacgttagctcttactgagattgacagcccgcacagtgcaccttcaactgcacaactgcatttaataaataaaggaggaaagtggaataaaaggatcattttattgggttgatacagaaaggtacttctcccccaaatcagttcaaagcagtaaaagctgtggacaacctgcacttgctgggtttaaccaggcctgggactaggcttctcacgaagcaggttcactcaggcctctggagtccattaataacaggtggtaactagcgtttcagtggggcagtcagactctgtggacaggtaaatctgggcacgtttaggtgagtaggctgtgactgctttcgcaggctgaggggagagtcacattcggcctgcctctccctcttgctttgctttaaaggctgcttgattctcaccctttttgagccccaaggtcatgggctaccctggaggctaagctcctgcccctgcttactacccagggctgcttcctctggttgctacattgcatactccactgggtgacctggagacccaagacaagactccaaacaccacagtgcaagacaagccactgcagggccctggcccagggcaaagaagcaggtttgggcatgaaggaggaagtgagggcattgagctttggggccttcaccgagggctactagcagttggagggggatttttcatgtgctttggagtaatcgactaattcttgtctttcattttctgagacctgtgctctagatggggacagcctgagccgtgcagatgtccacatcttactggagactgcagggggtgctgaggggctgctgttgggtctgggcttcttagagcgctccttggaggcacatgtgttggccaaggcacaagcccaggctccagtccaggcacccagcagggccagtgctgctggctggaacctattgctgggtataagttgggatgggggtgggactgaattaggccccttaacgtaatttctctgggggagaagttgatgaggcaggaggacaatgaagtcaatgaaatgcatgagccccagtattagaacttttagttgtatccactttgcctcttaactttggggtgaaattcttcagctgctattctcattcttctatgtaaaacttcttcttccttctccttctccttatccttcttcttctcctttttatagaaatggggtcttactatttgaccaggctggtcttgaactcctggcctcaagggatcttcccgtctcatcctcccaaggtgctgggattacaggtgtgagccaccacgccaggccccaaagtgatttttttttaattgtggtaaaatatgcataacataaaatgtatcattttaactattttaagtgtacaattcagtggcattaagtacattcatactattgtgcaaccatcaccactattcattcccagaaccttttatcatctcaaacagaaactctgcacccaaaacaataactccccactcctttctcttcccagccacagctaatctttgttacactttctgtctctatgtgtttgcctattctaggtatctcatataagtggaatcatacaatatttgtccttttgtgtctgccttatttaacttagcataatgtcctccaggtttatccatgttgtggcatacttcagaatctctttccttggcccggtgcagtggctcacgcctataatcccagcacttcgggaggccaaggcaggaggattacttgagcccaggagttggagaccagcctgggaaatacagcaatcctgtctctacaaaaaataaa

SEQ ID NO: 3930 - DNA, 6000 bp, Homo sapiens
atctctgagtctgttccttcatctatagagtggaaatacacaatagtactttccccagagggcaatggagaggagaatgcatgttaggcccttagtgcagtgcttggcgcacacatacacacatacacacacatgcacacacacacacaaaggccaggcatggtggctcacacctgtaatcccaggattttgggaggcctaggcgggtgaattacatgagctcaggagttcaagaccagcctgggcaacctggtgaaaccccatctctactaacatacaaaaatttatccagacgtgatggcacgtgtctgtaatcccagctactcgggaggctgaggcatgagaatcacttgaacctgggaggcagaggttgcagtgggctgagatcgcaccactgcactccagcctggacaacacaatgagactctgtctcaaaacaaaaacaaaaacaaacaaaaaactttaccctgttgctagctagtgaggggtttgctgtacccctctttgtcatcctcaggtaaaagctatgaacctatttccactgctaggggcaggtagcatattttctcagccagatcctgagtgatgagaaagaaaaaaagagcgagaagcccgggcttcccattccctgagaagccctccccaggatcctgattcccatgcagtccttgttcctcccttctgtctagacagctctctcctgaagaaactgcaaaccacagactgtctaatgacaaagcttgccccagacacctgtccccagacacacgattcatttaaccctctttaaaaaagaataagcctgactcccacctctgaagcagaggggcactctatgggcataggagtggcggggtgtcttcttttttcattaatttatccatccatccatccattcatccatccatccatccatccttggttgaatgcttacaatgtaccagattcagtgctaggcactggggatacctaggtgagtaagacacaagctggcctctagaaactcataatattgggggaggtaaacacaaaatcattgtgaaaagtgtggcatcccaactataagtagagtcatggggaatactcctgaagagcttcctgtgtgcaaggtcctgtgttgtgtacttcagatgcatgatttcaacgtggccctcatcataactaaccccatgagataggtatgcttaattgtgaccattttacagatgggcagaatgaggctcgcagaatttagataacttgtccaggattgcacagctattaaacagcaaaattgagattcagacccagtctgatcactggacttatagttttttttccccaatagtgtcaagtttattcaatggtgagtaacttgaaatattttatttctattaaacattgatatagtaaaacaaaaaattttgtagattttaaaaataaaaatgagatttcaaaataattctgagcttttaatgagccactttgtttcacacatacaagttcctagagttttgtgcttttcccctgatgctggagtactttacacatttttgagatgcatatatagggtaagaaactgagaaaaaccaagctttcaaataaatatattggttataatttaagagggatcttgggcaattgataggaaaaattgagtattaagtttcagggcatcagggattagcaatctgtcctgtctaatcatgtcattcccttgctcaaagcccttccctggctcccatcactctaaggataaagcccagcttcttttcctagcattcaaggctcttcacgtgctggccccttcctactcctccagcctcgtgtcaaccactctccacaactctagtaataccaaaagacttgcagtggccctaactgaattctctttagcctccatgcctttgcacaaatattccttctgccagggaatttctccacgtcccttgctctttctttgcttagatgcctcccactcatccttcaagactcagcacaggggtacccttcccagctgcttcctgactgcttgcccacctcccaggtgctccactctgagccccgtgggccccctgctacctctctcctggtcttccccactgtgctatgcttaactgtgtgtgggttttcccttggggattgtgagcttcttgagggcagggactgtgcttaacacatccacgggcccagggtaagggctcagacgctgaagtgaaccctctccagcagacccagccttttccttcagccagctttccagtgtcatttaccatcttcagtggcttgtattgttcaacattgttagcagatgttttgttagaaggtgctgagatgccatacaagttttttttttgtttttgtttttgtttttgttttttgagacggagtctcgctctgtcgcccaggctggagtgcagtggcacgatctcggctcactgcaagctccgcctcctgggttcacgccattctcctgcctcagcctcccaagtagctaggactacaggtgcccgccactacgcccggctattttttgtatttttagtagagacggggtttcaccgttttagccgggatggtctcgatctcctaacctcatgatctgcccgcctcggcctcccaaagtgctgggattacaggcgtgagccaccgcgcccggccgccatacaagttttgcccaaggttcgccctgaccagggcagcttctggggctgtcagggtcttttcattgaggacacacacccaggatgtgtctgtatttactctgccatttggatttttcaactgcaggatcttaggctaggaccccaacagcagctgcaagtgcttcggctgtgtagacaggaccctttcctccttcctgacttcaacctggggcatgagccgcagtgcctattttgggaaatgcctacatttttcattgctcaaccttcctatttcctatttgggaaaagaacctagggcctgagtagagtggaggccgaggtgtggttgccgataactcctatttgccagtgatttatttgcctgggatttgtgctaagacgaaaagaatgtttgcattattaatgatcattgatcacaggcttccaaaaaagagagagattgagagagatgtaggctccaggccaatcatcaaatggtaaaccaagagggtggggcatgaagaaaggaggggagggctaggtttgtagagagttatgtggagacagaaggacacagaaggacacagaatagaaagtctagatgagctgctgagttttgggtgtgccagatgtccaacagctgtgtgggctgcgaataaaccaatgccggcaggtgctgctggcctctccctacacccagtgaaggagacttcaagacaaagaatgttaccagggacagagggtcatttcgtaatgataaaagggtcaattcatcaagaagaaataacagggttggccacagtggcttacacctgtaatctcagcactttgggaggccaaggcgggaggatcacttgagcccaggagtttgaaaccagcctgaacaacatagcaagaccccgtctctaaaaaacaaacaaacaaacaaaaacaaaaaacaaacaaacataacataacaatcttaatgcccctaactaataacaggcttcaaaacacatgaagaacaagcagataaagacccagtaaggagctgagcgcagtggctcatgcctgtaatcccagcactatgggaggccgaggcgggcggatcacgaggtcagaagatgcagaccatcctggctaatacggtgaaaccccgtctctattaaaaatacaaaaaattagccgggcaggtggcacgcttctgtagtcccagctactcaggaggctgaggcaggagaatcgcttgaacccgggaggcggaggtggcagtgagccgagatcgcgccactgcgctccagcctgggcgacagagcaagactccgtctccaaaccaaccaaccaaccaaccaaccaaccaaccaaaaaaccggtaaggacacagaaggcaaggccagttcctcatgagctgcgagaaacctggacacaagccatggccggtgttcgtgcctcttcactgtcttcagtggaagcctcttgctggtcctgtctttgtgctcaagtcttctctctcccctggttctctgcaaccaggctggttcatctcagcatcccaaacacctgctgggggctgggggctggcactcggaatctgtcctttgaaggatgctgggagctgtccctcccctacctctctgaccgccccccccccccgcccccttccattcatccagcttggacaccatccggctcagggtctttcccaagacccactccttcacctcctaactttgctcaaatgctacttttgcagggaggtgcccctgagccctcacttccactccctaccttctttctctgctttcttatcctccctaccctttacctctataaatattttatgcattttgcgtattaaatgtgttgtctccccgcaacagaacggaagctcccttaggtctacctctgttttgttcactgctgtatccccagtgcctagaacatgcctgacacagtagatcaatcaatatttgttagacgaagaaaacaaaaatccaactaggaatgaacaccggggacccggacggataggggaggctggactttcaccaagtgtctctgggcatggcccacctccctgcagacccctaccccagagccagcccacctgccctcctacaggtgggggccggagagcgctggcccggggccttttccacctcccttccgctgcgcgtacccaccccgggtgctgggcgggggctgctacgagtcgcaggccggggctcggagctccggaccatcccgagcggggaggccgggggccaagccttcctccgggcgggcggggggccgagtagggagggagcccggcgagggaggagctggaggagggagcaaggaggagcggcgggcgcgggaaggggagcgcggagaaggagccgcagggctctgggagaggcggaggcaggtgcgggatcgcgagggcgcgagccggaaagggccccggggcggcggggcgggcggcccccgagttcggcgggggtcgcggcggagacaaggcggccgcgacggggagacgccgcgcgaggaagtggatcgggcgggtacgccgggtgtgcgcacctgcccgccgggcagcgggtaagctctcggggccgcgtctgcagcctggccccagcggccgtccgcggggaactgaggccgggagcggcgcccctcctggggcctcgggggcccggggcgtcccgcctctctgtgccctcggacgggcgcgcgccagggagagggtcccggaggacctgcccggccggagggaggccaccgggggtggccgtccagagccccgggagaaaagggaggactgaggcagcgcccagggaggctgcgggatcccacgcgcgcgttgggggtgcccagcgcccaggcgagaactggaggggcaggaagcacccccgggccggggaccgcgacgccccccgaggggccccgggcgccaagggaagccgggcgctgccccctgctggccaggttcgggcgcggcgccgcggaggggcctcccctctctggagagagttgaagggggtccggtgtggagccccggctggctccgggctggggctgaccggctctgtgaccttgggcaggtcactgcatctctccaagcctcagtttgcacgtctgtcaaatagaggggcattctctcactttgcagggtccctggaaataagtgagatccccgctagatgctttttttagaaactgtaaagttctgtataaatcctagctaatcacataatgccggaactggaagggcactgagaaatctgctttattacaaatggggagagtggggaatccgtcttgcccaaggtcacactaccagtagaagaatctaagactaaagtccccaggtctgggaaagttcgggattaagagcagggctctcagtcagggt

SEQ ID NO: 3931 - DNA, 6000 bp, Homo sapiens
atttctgacagttcccaccccactttttctagtgctcatgcgggctccttagtctgagttactccatgttgcctatctcttcccactgcgcatgtgtgaaaaaggccaggaggcgggaccctctacagtggacgctcctggtccagggtagctcgtcttatcagtgctgctgcaggcactccctgctgtgcaaacctccttgtctgagtatttccaagaagggagaggactgtgcttactggggcccactgtatgtctgtatgtcacacaggaggcccctttctgtgttagaagctgcttttttgttagaagggaattctacttaggacccttgccctatctgcctagttgatttctttctctctcctctcacagagtgtcacagaaagaactccaatccatcaagcaaaagtaattaacagcaattcaaatctttattggactcttagaaaataaacaaggagatctaatttgtagctcccacatagatttttgtctccactcctgttgtttttaattaattcaataatatttactaaatgtctcctatgtgtcagacgtgcttccagtgcccatagagcctgcatgtctccactccccgagttcccctctccactccttggattcaactctcaacttcaaactgagttttgaagtcagtcaggagtgggggagggcggtttttttttttttttttttttttttgagacggagttttgctcttgacacccaagcttgagtacaatcacgcgatcttggctcactgcaacctcctcctcccgggttcaagaaattctcctgcctcagcctcccaagtagccaggattacaggcgcctgccactactcctgggttcactttttttttttttgtaattttagtaagacgaggtttcgccatgctggccaggctgatcttgaactcctgacctcaggtgatccacccgcctctgcctcccaaagtgctgggagtacaggcgtgagccactgcgcctggccgggagggtggctcttgacttacagggcctcccctcccctccaaggtcttctttaattctgcacattattttaattatttctaacaagtaccttgatcttcatttgtgaaatctagtgacccaaaggcagctcccaacctccctgggagttgataggggtggggttgggaagagaggggagagaggaagagctgctcttcccaagaagggtttttgttttgttttgtgtttatttgttttggcttttggtttttagtagatgggggatgtacacgtgagaggtgagggagagagcagactgcaaaccctgtaactgatccatgtattatctgttcttttaactgagtaacatgcttttcaaaagtgtttttccatgtttcagagacagaaaaggggagaaaaagaagaagaaaagggagaggaaaaggtaaaagaaaagaagagaatgaattgcagctgaggaagtggaagagcgagaagcgcttccagataccaggtaacctctttctttgactcctgatttgccactcatctccctaaatgccttaatgacctgtcacacaggtgactcacatgaaggccacatggtgtatgtttctcttacccctgtctgctattgaagacataggatttagttttgggaagatgtgtgctggagaaataaaaagcagacacagtggttgaatgcaaaatgaatcataggaattatccagtaaaatggcttaaaatcatattccaggctctgaagtcatggaaagtctctcttaatgcattggaacctaatctagtaatttcacctgggttccccatccaggcatctcttttctaatttgttcagaagtaaacaaggtaacagcttttaaacagccaattgccatggacattgataaaatctacaggtttcattacttgatgtccaaagacatttcgtcctatttacatcaaaaacactttggaattctgaaagacagcaagcctttatttgaaagaaatacacgttgaagttctttaaggatgaaagcagaactgtcttggagctgatgctaaagcagagtgagaagaccatgtgtattttcaaataaattttgaaaaactcctgagacttgggaaagggtgtaatagaacagtgcctataactgagccttgcagaagcttatcacagcatagaagaaattgatggaaaactcacatgggcatcagaagtttccttttattggaaacttttgcagttttggagactccttataaagacctgagttgttagcaggcatctaaatctggcactagaaacaattgagatgattttacagtgtatctgcccagatcctcactactagattttctgggtgttttcttatttttgacacttgcctcaatcaaattgaggcagtcttttaaatttctgtctaaaattaactggtattttcaggtatattggcatcattttaaaatccatttatttttaagaacatttgaatgtgaaaagagatgtatatgcaaactgttggatcaggcaagtttccttcaggctgtctggatgtgtctatctatagcatttggcacatacctagctgtcactcaaaaaagatagctgatgttcaaagttaatctgaagtacctacttgaagtctgctttatttatttttttaatttggccagttcattcttggggaatggaaaggaaggaaaatggccaggcacagtggctcatgcctgtaatcccagcactttgagaggccgagatggtctgatcacttgaggtcaggagttcaagaccagcctgcaacatggtgaaaccccgtctctactaaaaatacaaaaattagccaggtgtactggcatacacctgtaatcccagctactggggagactgaggcaggagaatcacttgaatctgggaggcagaggttgcagtgagccaagattgtaccattgcactccagcctgggtgacagagtgagactttgtctcaaataaaagaaaaaaaaagggggggggaatgaaaggaagtgtttccagttatttgacttaattccatatactttaaaatttatattgaacattagagagttcttcaagtgaatgtcgaatattagtctgtcattttacattagaagcaatgggcttaagtcctcaaaccacattatagctagacaacacaaaatgttcacccttagtgttaattaacttgaatactcaggtcaaaggtctttattttggcctatgaataaccaaatactgataatccactttggtgattgagattgcaaatctacaggttttgggggattgaagtagggttgttttttgggggttggatctggagtttgtaaaaatctgttatggggctaaaacaactggaattcacctctttgtctctgaaatcttagagataaagcctatatccttagtatatagcctggggtttgaagagaattgatgctgatggactcttggttgcctacctgtatcgtttcttctttgtttctaccagaaccttgattttgtttagatatctcctcctgtcccacatagtaatgcatttcaggggaagctgaccccaatcccacctctaggtgtgggcctgattggcagaaacatgacaatctcatccccttgctcatgtttagttcagtgataggcatggggcgcagctctggccagtgaaactagaggcaaagtttgctgggtgggggcagaagaggagttccaaagaccatttctgagagaggattataaagatatatttcccttattcctctgaatgttgctgtatttgcatgtgatgcctggaactgctgcagctatgttgctaccagcctgaggttaatgttgatataaggaagggagagcagagtaaaaaagaatctggctcttcaatgaccatgataagccactgaatcaactaactacttctagacttctttctttgtgagataataaatttccctattgttaacaccattgggtttcttttattgccagacaaatggaccataactgataaagctgtccgtggggatttggagccttggtcgattcggttgctgaaatagctttcctagtgccacaacttacaataatgtgggctttaactattctatcaaaaatgaaagctgtatgagacagctcagctgaagatatgccattttagagcaagaatcaaagctagtctgtgtgatttggggtgatccaacaaacttcagtgtcacttattaaattgggctgaaagtgcctctatttcccagaagtactttcaggataaattcaattatatagttttaaagtacttttagaagaaagacatatgaatttgaataatgatagccttttctgacatgtctttatatccatataagaacaaaggcttctagcatttcgtctctcctgagtctatggagtaatcaagcatgtatgctattgtaatttcagtggtagcaaagaaaaaaaaataattcacagagaaaatcactatagagatgtacttctgagatccattcccattatacttggacaaaatagccgcccataagtgacacagaagtatacagaatctcagaactagacttttgacaccccagtggagtgcagattctgtaacatcatgcagaaacgaacagaatggttttgaagcaagtttaaagacaaaattaatatacagttattttaagaggagaaacatactatgtttgtgggtagactgattcaagttgaaacatgctaaattttcatgagcaagagaatgaatgaatacaattgaatattatgtagcagtgaaaattaacagacaggatgtacctacatttacatcaatgaactgcacatgtataacaataaacagaaaaagtaagacatagaagaatatatacaatatgttagtataaaaaatagtaccatgtaaagtgagactattctttagggatattacatttatagtaagtataaagaaactcatgatggtgataatcactgcatttagaatacttgctacctcggagcattaggaaagggaatgtgaccagagggaaaagcaaatgggtattttacactttaaattatattgaaatattttattctttaaattgaatagcaaatgcatgaatcttcactctattatttttatagttttattgtttgtgtgaaattttataagatgtttacaataaaacaaaataagactctcagttttatccctgatgggagacacactggtactgaaaattttctcagctgtgtgagaatgacagtctcacttttgacttagaagattctaggttcactactcactgtggtgtttttctaaccatataaagagggaagctccttgatacttatgtaagagagccagacaaatatgtgagtctaaatagagtctctggttagtttattataattgtttttctttcaatccatgtcaaatgtactacactgtactctagcaggcagggttatactgctcagatactcttccccttgcaaggtaattgtcatggctttttttatgcgtcaatgtgactggctcagaagatgcccagatatctgattaaaaattgtttttaaatgtgtctatgagagtgattctagaagaggttagaatttgcatcggtagactgagtaaagtaaatggttctccctgtgtgagagggcattatctgacctgctgaggactcaaatagaacaaaaaggtagaggaagtttcactttactctcagcatctggctgcctaggctaagacatctgtcttcttccttccttacactgggacttacaccatcagagttcctggttctcaggccttcggattcaaaccagagtttacaccactggctttcctgggtctctacttcgcagcttctccaattatgtgattcaatttatatatataaatatgtgtgtgtgtatatatatttatttgtaattaattaatatttattttaattattttcattaatataatttatatatttattttaattaatttttatattttatatatataaaatc

SEQ ID NO: 3932 - DNA, 6000 bp, Homo sapiens
ttcatggtcaccttacttagaatagcaatctctgccccccactatgtttcccttgtctgccttatttttcctgtggcacttgttactgtctggcctgttgtgtgttgtacttacctgtcaccttccactgaaatgtaaactgagggtggtgggaggggtgttttgttcactgctgcatcctggtgctaacacatagactggcacatagcatctacttaagtagtagttgaatgatactgtcgatgttggctagatgcagttgcttttatgaggctaatgtcacaatatatagtttctctgttcacccccttccttagggaaacaatagagaagcctcaagttcctcaggagaaatcagaagcagaaagagaaaaaatgctatcattgtggacacttagaagtgaaatttgaaacaagaaacaacagttttctattgtgtacctacttatattctggacatagcacatcacaatcctacaacaatcctgtgcctgtgaagtcagtatgtggctcccattttacagttgaagaaagaggctaagaaaagtgaaaggctttttaagttcatacaccaagcaagttccacctgactccaaggatcatgcttttcttaatataccacactacctcctttctggatgagaacccaacccaggagtaagggatctagctgtggagctcagcaagcaagatttgtttttattgtctttagcacgaggtaaaattgtcctcagaatttcaatcaagtgttcatcagactaagtgtggctgttaatatttgggtcaggaacaggatttgaataattagtatttctcaattgagagaggaaaacctttgtcaaccaagatgcgttcctaggattcttctagaaaaaggtaaatgggaagcttttcatatctacaattttggtaagcaatattgctaatggctatttttgttctaggcctcgagctccgtttgctagtctagaaattgcatatctgggctgtgtgtggagcattacctaggagttcggtttcctgggttcctttcatctgctctcctgcaatgcagggagagcctagcctggtctccagtttctgactggagttaccatggccaagagaactgctggccagtgagctgtgagtaatttgcttttgagaagtaaatagaacctagccagcagagaacccaggggtgtggccagtagttcttttcccaggctcctccctccccaccccccaaatgaccttaaccttctttcatagctggagagcagccaagtccagcctaaacaatactctcaacctcattggctcttttgccttgcagccactgccacccccaagtggctaaggccttcccactaggcctctcagtggggtcaaggttttctaaccactgaaaggcaaacactgaaggaatggtgaaaaatacctagtgaccatgggctttaaatgatgagtgtttgggtactgcagttggaggcaaggcagagtctttgtccttgggtggatgggcatcttcaagtgatcgggcagaggccaaaaaggatgcttttggtatatgagacctgactggtgtcaccccaagtgtcaggatggatgtaaatgtcacccagcatcttggaaactgccaatgaatgccttttatcccacagcaaaaagaagtagcataaagttctggtaaagtacagcaggccagtatggtcactttcgccccacaatggcatgacatcagagccagcatcccagattaggatcagctattccaatcccataggactggggccatggaaagtttagcttctagaaactgaactgctgagagtagttgggctacttactgggctggtcctctgcccagcctggggccaaggccacttccagaagtggaggcaggagcaaggcaaggcagctacagagagaaatgtcagttgctccagggaagtgagtgttctgtgagaaccacctaacttccttctctacactttcagtgggaaaatcacttttttgttcagtgagttgtaatagcccatctttattgagcattgtatgccaagcactataaatcctatgaggtagatatcatctccaccagggcaaggattgtttctatcttgctcagtgttgcatcttcatcccatcacatagtaggcattcctgtactgttgaacaaatcaaacagataagataggaatttgatggaggaaagagtaggtcagagctgttaagacttggtgtgcccatcttagcatagcccgtaaagactcttacatatgggaaaaatggaagagagggaaagaggtaaatctgtgaaagattaaaatagtgtagagtgggagaaccagcctgggaggctggagacctgaattcaagtcccatcgctaccactagctatgtgacttcttgccagtcacttaccctttgtgatccttagctccctcatccataaaatataggtataggattaaagaaattgatttattgaccagatctttattgaagacacacagtgtgcaaggcactgttctaactggaaatacattggtgaacaaagcccttgctcctccattacactcagaagcttacattctagaatagggaaacagacattgaaacaagtaaaattcatggacaggacaagcagatagtgttaagtgctatgaagaaaacagaggccgggcgcagtggctcacacctgtaatcccagcattttgggaggccaaggtgggtggatcctttgagcctaggagttccagactagccttggcaatatagtgagacctcatctttaaaaaaaaaaaaaaaaaaaaaaaaaaacagaacagactgatgggatagtacagggaaagcctctctaaggaggtgacttctctccggagacccaaacataatgggctagccaaagggtggtctggaagtagagtgcttcaagcagggaaaatagcaagagcagagccaggcaagttcaaagaacagaaatgatgtaaccctcttaaatcctaagcttctagaatagtaatgcattgcttgcattgttctggttagggatttgtatgtgatattgtttcttggtgatgtgggatatgtgcttcttaatggaaatggctgggaagtgtggagtctttctggagcctgggatatggctctttctcacttgctttccacagttctggtagctcagctggctccctgggtagatgcaggctccatcttagctgcagactctacaagaacactgagaggctgcctccgtcactactcaaagccttggagtcccagaatcccctcctatcccacctagccttcttccaatctgaaaccagggagtcagggctttgagagcacaagattcagcttccttgttttcctgtcagagcagaagtcagaaaatgaaacaggaaacagagcggaagaggagggggttgggtagcagagaaggaaaagagaaattgcaggaaagtacagctgaaaatctggataaagttctacctctacagggtgacagctgagcttttaaaaaacattctgacttgtcttgagagacccctggcctttttacaaatagatttttgagagaatttgatgtggacagagggaaccctgagaatgcatgtcttttttccccttgtgaatttacagagcaaggacagttcatttctcagttttgtctttgcagagagagtgctgcttggagcctcatggtggacttctagagattcaagtcacagccttaggccccagtcacaagtgtgtccccaggctttgccacgttactcacaggcctctggagctgagaacaagtgcgtggcactgaaaaacctgggggaagggccatgaaactccattttttcccccttctccaacacacaacgactaaatatgatttgccttttctccaccttgcacacaacagatatctgaaggcaatttaggtctcagggcctgaaatgagttacagagtcaagagatacagtcccaggcccccacagactgatgtgggctggtcttcgcctggagaggtagcaaccatctctttgttcccacccacatgagtagccgttgcagaagataaacccctccctgagccaggctgtggccagaggctaacccggcccctggcttcgtttggagggcagataactgaaaccacataaggctttggaatcctgagaaacaagaaatccaccaacggagaaggatttatcatctgtttcctttaaggagggtgcaaagttgttctaacagtttccgttacaagggtacaaactggccgctccccccaatagacggttttgttgagttcgcctctttttttttcttctttttttggccccacttcctatgagagaaactgcttgggtgagggaggtgaaaggagccctggagggtgttctctgaggttttcttcaccatcctcattagccacctgaggtggggctgaggactaaagtaggacagaaggtctctggtagatagaggaggggaaaatcagggggatcccccactttcttcacacccaggacgcagggtgccgctgccggccacagaaaccccaagaatgtttttctttggctattcagaggacatctattgtgtgtcaggccctgtgctgagctgttgttgcctgacagcaggaagagcgcggctctggtttctgtgaagaggctgcgggtcagcctccgactacaagagcctcggcccacaccgggaactcagtgaacgtcagcgggagctggggcaagagcactgactctgagacagcagcctccgctcactatttgaaggcggggtggcggggggccttgaaggagagcgaagtgcgagagaactcttcaggtgtcaccaaggtgggaaggtgctacgaggcgaggcgccgagcggcgacccccatcccgctcgcccggagtcaacatggccgccgcgcagggaggcggggctgctccaagtccgggcaggagcggggcggggacgccgtcggcggagccagcgcgcaggcgcgggccgcgtgggccccggatggaggagctgaggttcggtccccgccggggaggtcgggacgggcaggggctgaggaccccgcgccagcttgggagccctggagttctggcgggagggaagctgtcaaatggaagccggtagaaatgagacagacgcccggagaagcggggagccccgcccctccgccatagcagcctcgggcgccgcctcttcctttccagcctcccgccctcgtctgcttccggccctgtggcctggtggggctctgcaggctccctcgggagtggtccttgggccgtggcccctctggggtgagcgtggatgattagtacccagaagggactgtgtccaaaaggagccggccagaaacgggttgcggacacggctgggctgacagaaggcagcccccacgaggcctttggctctgaggaccctgggtcagagcgacttctccagcctgcgcagggggtgttagtcttacccagagggtccagagctgccgttcaacaggatgtcccagattctcagatagggcccaactaccctaagcatacctagcaagggcaggctgcggcatggaagtactgggctaggcgtttgggtgacctgggtcataatcctggctcggaaagggcgcgtaccctttggcgagggatgcgggctggtaccgtgaggtttaagaagcagaaaacatgacagcctctttaagtagccctgggtacgtcacttgaccccagtgagcctcagtttccatatccataaaatggcgatggtaattatactagcctcacagtgtctgatgagatctctggagcctatttatctcacgggaaaatttttgaagagtgaaactagttgatctgtaagtgtcctgccagttaagagtctgtgatttggcaaaggggttgttgggaagtgaggtgggcaattagctgagagggagaattgactagctttgtttttacttggtttacctgtaagcaaagtgtgggctacacacatctgtagtcgctg

SEQ ID NO: 3933 - DNA, 6000 bp, Homo sapiens
ggggggctgcggttcaaacctggttagtttgtttccagagcctgcacatttaacttccatgctgtaaggacccactgaagcttctcctttgggttcttgtccccaggagtaaatgaccagaactgtctggatgcagtggtgacagtgaggagtgctccagaagataaaggggaagaaaaagtgccaactcttgtgcatctgtgttgagccaggtattgctggctgctggttgctcaccatagcatttagagggtggtgggagcccagagaagggggagatggttctcagttggaagaatcaaaaaggtcttcatggaagaggtggcattctagttgggcctggacagataggtaggatctgactcagagagataaaggagaaggaacaatgtgagcacaggcacagacagcagaagcactctgcacaaggaaggaatatgggcggtactactggaaatagatgttggagccatttcatggagggccttgaatgccagagtaattgccactctaattgctagtgtttcctaaaaaggctctgatgataagaatcacctgggtgcttgttaaaactataaaagaacaggtacatttcttcaagattctgattcatgagggtgggcgtggagagtgggaacctgtattcctaccaccaagcaagtttgagaaatatcgctataaacaatatggagccacttaaagtttttcagcaggggagtaatctcattgaaattgcgttctaggaaggctcatttgatggcagggtgtgtgcctgtacgtggacgggatgttgggctggaagggagagactgatgggggctataggtggtgaaggtctggagcaagacagagaggagacagggatggatgaaaaagatgtttgggaggtagaatttcagtatttggcagctgattggacatcagagtaaggaaggaagccgttggagatggtgggggtggtgaggacgttggtgcaaagttaactaaaataagggtaggggagaaaggagattgggaaataagccgcaagtttgcatgggggcatatgaaggttgaggtgctccaggcagggcttcagatgaaggcacgtggggggtgatagaaatggggactggagcttgggagagggcatgggccatgggaatcccctgcatggaggggaacactgagccaggagagcagaggagatggcccaggcaggggagctagaggacagaggtctgaggatcctgggtagtaacacctatggtagaggaagaggatctggaagatggcaaggtagggaagccagagagatggagaattaggccgagtagaggggccaggaagctgagagaggaacaagttttaaggggcaaaaaactaacagtttcagatttcagatgccagggggaaaggaaagctggtcacttttttttttgtcaactcagaggtcactggtgtgtcctttgggaaaaccatttccatgtcaggttgagtttggaaataaacctgtgaagcgttgaggagtgtggtgaggaagctgaggcagggcgtaggttatcctctcccaaggggattgtgggagatggaaggggaaagaagactgggtaaactgagacagcagatggaggaagcagtgaacagtagagacccatttagaagtctcctctcctttgccactggtcccactgcgcctgtgggccctagctttgatcataatggggcaccatgacacacatgttttcatttcatcttcacaacaatccttaaaaaataatgagatcggtactctagtaattctcactttacagatgatgacactgaggctagagaaagtgagtaacgggattcaggctacacagctggcaaattcaggtctgtgctgtctgcttctgaaatcccagcccccaagctttttacttaattgaaaacacagaagctttatttcttacgcctgagctcctgattggtaacctggctcatcccctgatttccaggttcgttctggccagtcccctttccccagggctatccagttcaggagctgggatccttcatgccagtgctcagggcctcagtaccagctggattccctgtcaccctgccctgctggctggttggacctctacatctttgttgtctcccagctccttctgaggacaataatttgtatggtatagatgcggcccgcaacatggctgaaggcttgtgctgtggagtcagaatgcccggagaagaaatcctaggtctaccactaattggacacatttttttttgagacagggtcttgctgtgttgtccaggctggagtgtagtggtgcaactgtggcttactgcagcctcaccttcctaggctcaagcaaacctcctgcctcagcctcttgagtagctgggactatagttggtgcccaccatgtctggctcgttgtttgtttttttgaaaaatttttagtagtgacagggtcttgctatgttgcccaggctggtctggaacacctaggctcaagcaatcctccggccttggcctcccaaagtgctgggattacaggtgtgagccactgtgcctggcttgggcaaattttttagcttttctgaacttcaattttttttaacagctctaacttatagagtcattttgagaattacagtgcccagtgaaggttagcaattattttatgcccttgatttccaatgtcctggccttcagactgtgatttctttttcagcttgatctgatctccagcgtccttcccgccctacaggacagaactcagcccttcctaggctgcttaggaagccagcctggttgtttcctgaggggtggaaggttcaggttctgaaataagaggaggaactttctatcagctgtagatggaagtgactagtgtatgatggactccagaggaactaacagtgtccactgtggaggtgacatgaccacaagagaggaagggcccagattccttctcttgtcactcggcatgtcctcacttcctcagtcacacagcaaatgtctgttgagcttctactccttgccaggaaactctgtaggctttggggaaaggcaaaaaagagttaacagtggctttgagaagctcacagccaggatggagaggcagatataaacaagcactgtaattacaatgcagagtgggaaactctaccaaggagctgagaacagggtgcagtgggagcaagggggtgggtcgcgttagcatcaaaactctgggcccccgctctctcccatggccagctcggtcacccccactgttccatctgtttctttgttttttcagagtctttatttctggctttgttttcccttcactttcctaatagagagcctttggaaaaattccacccttgtttcagttggaacagggaaaaggagaattgtctactcttcagccaaaataaccaaggggtgccgggttcctggagagtccaggtggacaagcagaggaagcagggactgtcccgagggagccaggggagagcctgcagcgcggcaggcatggggcagggagaggtgaaaacacaggatgagctgtgcctggctggaaggcccaggtggctgtgtgcctcgagtcctcttccagagctctctctgcatctcctgtcctctgttctgattggaagagagagttgagacttcttccacttcagagaatcctgtaaagcctggttacattgctcttttcccacccaggtagctgtgaagggctgggaccccagagttagaagtgagtctttgacattattcacagcagagggctgtgtatgtgtgtgtctgtgtgtgtgtgtgtgtgtgtgtgtgaaatccctcctttcccctccctctttccccataccaccacacacacaacgctcattgttccctgggccttcaattctgcattcatccattcaacacatatttattgaacactcactatgtgctggaagctggagctgtgtagtggaaaaagttatttcagaaggttgcataggcaccagatatgcatgtgtgtgcctgaatatatgcacatgtatgtatgaatcaatgtgggcaggctagggaaacaggaggaagaagggaagaagaatgtttgggaaactgaagtttgggcatcaggtagcttgcatttgcatctgggtgctaccatttgctagctgtgtgacctcgggtaaattatatgagctttctgtgcttctgtctcccagctgtaaaatagagatactcgtagtattcacctcatggggttgttgtgaaagctgaatgaatgaatgtgcacagagtgtgtgcaacggtgcccagcatgaagtaggtgctctgtaggtattagtaattgttcccttctcaccccactcagagctgggtggagacaaactcgtaaatgactggcagtcacctggtgctacccacctcctgccccctgaggctcatctacaacactcagcccacaaacctctgtctaaccaaaccactgccatctcctgcccttggctgacccccaccccaccctaggctgctcagggtagagaagaagtaatatcacacagtgggggttgcttcagtcccacgctaccctccagacatatatctgagctgtcagttccctcttagcagactgggaatggagaagtgggatgggtgagcatctggggcggagcccaggctcccagcacccacccgatgggactggggaacaaagaacttgtcaggaggtcagaagggagaccgaggggattccagctctgaggaatccatgtgtggcatttgagcgtgggtggcagctggcacgaatccttggttcagaactggcagggccccctcaggagtcagggccaggtcgtgccaaagccccagtggcatcgcggctctgctattcctgaacagctgtgctgctccccttggcatagggttcaagaatgggggcaggagtgtgggcctagccagggaaagaggagggttcagagagtagacacacacacacacacacacacacacacacacacacacacacacagttcaccatgaaggtgcagatgcctggctcagggagaaaagaggggagggagagggtggaaagcgaatgtgtgtgtgtgtgtcgggggggagatggctttgtggttctgtgagtgtgtttggtgtttgggtgtgcataatgtctctgtgtttatctttgtgtgtgcacttctgtttcagtgtgtctctgaatgagtttgttatcagggcgagggtaggtttctgcactacttctgtctctgactctgcttgagcctctcagcaactcagcagagagaatcttcccttctgggagggtgggaaaatatagctcatcagggcagtatgggccaatgctttataaacacacacaaatcacaggacattcttgtgtgtgatccttagctccccacaaagctacggttgatacacatttaaaagagagagagctgagtcctatgtgtatgcttgtgccatttctatatgtctgacagtctgacgagcatgtgtgcttatgtatttgatgtatttgtcactttgtccccacggcagtatctgtgtctacagcttggtgtatactcatgtgtgctaagcccatatttaactgtgtccctagtgacgtttgtctttaagcagcaacataacaggagttagaagcacaggctccacagtgaggcgatccatttcgaatccctgtgtggacagtaactaatgcattaaccttggacaagtttcttaacttttctatgcctcagttttctcacagggataataatagcacatgaggataaatgagatcacatttagtgcctgacacaggtcagcatatgtgaatggtcctgtctttgaacgtgctcctctctgagagctgtctgcttggttgtgactgtggtgtgtcacatctcagctggattataaactgcttttgggcagagcgtgggtctcaattatctttaacaatactcatgacacctcagtgtcaccttggtgtcttgtgtatatgtcatcttgaggtgaaatgagacctgttt

SEQ ID NO: 3934 - DNA, 6000 bp, Homo sapiens
tgactaaaacatcaaaaacaatggtggcaacaaaagccaaaattgacaaatgggatctaagtaaactaaagggcttctgcacagcaaaagaaactatcatcagagtgcaaaggcaacctgcagaatgggagaaaatttttgctatctatccatctgacaaagggctaatatccagaatctacaaagaatttaaataaatctacaagaaaaaaacaaacaaccctatcaaaaagtgggcaaaggatatgaacaggcacttcttgaaagaagacatttgtgtggccaggaaacatatgaaaaaatgctcatcatcactggttattagacaaatgcaaatcaaaaccacaacgagataccagctcacgccagttagaatggtgatcattaaaaaggaaataacagatgctggagaggatgcggagaaataggaacacttttacactgttggtgggagtgtaaattagttcaaccattgtggaagacagtgtggtgattcctcaaggatctagaatcagaaataccaatttgacccagcaatcctattactgggtatatacccaaaggattacaaatcattctactataaagacacatgcacatgtatgtttattgcagcactgttcacgatagcaaagacttggaaccaacccaaaggcccaacagtgatagactggataaagaaaatgtggcacatatacaccatggaatactgtgcagccataaaaaagggtgagttcatatcctttggagggacatggatgaagctggaaaccatcattctcagcaaactaacacaggagcagaaaaccaaacaccacatgttgtcaatcataagtgggagttgaacaataagaacacacggacacggggagaggaacatcacacactggggtctgtcagtgagtgggggactaggggagggataggattacgataaatacctaatgtagatgatgggttgatggatgcagcaaaccaccatggcacgtgaatacctatgtaacaaacctgcacattctgcacatgtatcccagaacttaaagtataataataataaaaagaatagccagaaatttagaaacacctatcacacaaatcatttttataaatcataattaattgcacccaaggccttggtaatctctaattctagggacattagatgccatcagaattagaaccatactcaaggatttggttcagcccttgctgtttggaggttaaaagcaattgatgaaatttaaaaacagacacatggacacatagctcatagtctacatattattggcagatgtgttctgttaggcctacccttttttgtgtttgtgtttttgtttttttaatgtattaatcaacatcaaaaagaatatttcaccagaaaatttggatttctgactcctgaaaaatcagaattcttacagccccgacgttttcattcccacaaggcatcctgcagctgactagtggtacacaccctctcagttctctacagtccccttcccttggtcaagtacatctatacagcaacgcactgcataatgatatttcagtcaatgatggactgaatatatgacagtggtcccataaattcataatactgcatttttacagcaccttttctttcttccttcctttgttccttcctcccttcctccctccctccctcctgctctccgtccctttcttccttccttctcccttccttccttccttccatcctccctgtctcactccctgtctcactccctgcctccttcccgctctcccttcctccctccccttcttccttccttccttctttccttcccccccccctttttttttgagacagagtttcgctcttgttgcccagactggagtgcaatggtgcagtctcggctcactgcaacctccacatcccaggttcaagcgattctcctgtctcagcctcccaagtaactgggattacaggtacctgccaccacacccagctaatttttgtattttttgtggagatggggtttcaccatgttggccaggctggtcgtgaactcctgaccacaggtggtccacccatctcagcctcccaaagtgctaggattacaggctgagccaccatgcccagccttttatggcaccttttctatgtttggatatgtttggatacacaaatacttagcattgttttacaattgcctataatattcagtatagtaacatcttacacaggtttgtagctgaggagcaatggattataccacatagcctaagtgtatagtaggctataccatgtatgtttgtttaagtatactttatggtgtttgcacaaggatgaaatcacctaaagacacatttctcagaatgtatttctgttgttaagcaatgcatgactgtatatttatactgatggtgtcatgtattctgtcttactgttccctgcagtcattctaattgcaacccttgaacaaaaacacacagtgtgggctataggggaaacacttggcctggaaatccagggcctgggtagttgtggccttaatgtcttttggtctcagtttcctcatctgttcagcagggctgaataaacctcttttgatgatcttatgtgattgtcatgaccttaattgagataatgcatgtaaggacactttgaagtgctaacagtgtaaaagcatattaatcacatccatgtaccaaaaatagtcctaactagtcaactaaatttgagtctcctctgttgagaatagtactgacattgtggaaggaataaattagaaaaaggaaaccattcctggtctgaagcagaaatattctatttcacataggcagctagtgttgtggagagagctgggtattgagttaaaagagttacaccgaagctgtgggcaagttatcatacctccacgaatcccatttcaccgtctgtaaaacctagaagacaggacctgcttttcaactcatgggtgtggtcatgattaaatgaaataaagtatgtgaaagtaatgaataaacagaaaaacattattctaatataggcaataattagtagttggtgataaaatatgagcacataaaatggactgaaatatttacaaagtctaatattatacacagtaaacatttgaagacctagaagagtagtttttaattaaataagaggcagctgtttggaagaggaaaactttgagtcagtcttatttctgatcataagtctgagaatgggtctattttgcttattaaaagaaacatgttctttgttttttatttctgatgcacatcttcattgtgagaggaattggtcatttcacatgtttctagattatttacttcaatatattacattatatgaagctatatttagaagggctgaaaaaataacttgtgatgattttgtcactaatatctcaggagctggaagaaatttttgagatgatatcgcacatatcagaaaacagaagagcagagagattgagtgacttgtccaaattctcagagctacgaagttacagggccagaattcacaattggggtttttgacttcactgttctttttgccgcaccacactagtactggggcaacttctgggtggagatattgaattaactcactgaatgtttagacaatcagattgggctgggaactgtactaacctaggaggaggaaaggagaagtgttaagaaggtcactgcgaattaggaagtgcgtttcggcggcaatctcagctgcagcatataaaaaaaattcgatattgtagcctcttcccacagtggcacaccctggtaacctctccctaccctaccctttaagcgtttctttttaaggtccgatactcctttatattcttaaactttcgcctgcccttgcagttctgggacgccagcagaacttcttttcatcccttatcagcacgcgaggggaggacagctcctccaggaacatgagaactttccaaagcaaacccccaatcagagagagaaagaacgtggccactgtaaccaagtttctgctggaggccaagaaatcacacctccggcttccaattcctccaacatctgagagcgtgaacttccctcttttcccacagccccaagggaactatcctgggccctcactattaagaacttcagggccagaacacagccattcttgcaggtgtctgcccgtgggctgcctctggaattccatttctctcccctccatcagactcctgtttccctctcccctctttccttctcggttcgggaggggcagaggcaaccgcgcgcttcggggctcatcgcccgcgtggaattcgggctcgctatcctcgaggaggctgtggaggaggacggctcctgggccgggtcgcaagggacagtgccgtcctcccgcaggtggccagagttctggttggcctgtgaagacgggtgtctttcttgggcccagcgcgtcctggccttttgagagggggcttcgaaggcccagaggaaggcaggccggaggcagactccatcagactctgcctggctttctccttcccggccccagatggccgcggtctctccgcgccccccagcagctccccgccgccgccaccgttgtctttccagtagaggctgctggatgacggcgcggtagccggttggatgggggctggcggctcagacgggacaccgggggtgggggcgtgggggagggagggtgtggagaagggggaggtcagcgctgggcgggcgctcaggggacccagcgctgccccctccagcagcaggagcagcacagcagccgccgccgccgcagcagccaccgcgtccacagcagcgcaagaggggggccagcggcgcggccgagagcagaggggcggcggcgcccgccccagccgagccgagccgagctgagcgcgcagcccggccgccgctgctgctcgcagatgccatcacagcaacaaagagctcgctgagctgagagccgcggcgagggctcgcctgggagctgcgcggcagccggaggaagcgcgtggggggtccgggggagggaaggggacagaagatggccaagaagagaaagccccccagcatcaagggtgagtcccgctccctcctcccctcgccgcctcccctctctcacccgccctctgcccctcgggccggcctgtttacatccaggcgcggccaagtggaaggctcctgccggggaagagtttgccgtgtccggggagggggtgggggaaaccgcggcgccgctgcacctcccctggcctccggggacactgacaggagtttgtgccccttttgcaacctggggaaacctggagactcctctctcaccccacccctttgctactcggcgagcttgggtatctatctgttgcacctcctagcctctgggcagtggggagagaagcgactgggctcctagcatcttgtcttttccggaatctctctctctctccctctcgtgtgtgtgtgtgtgtgtgtgtgtgtgtgtgtgtgtgtgtgtatgtatgtgtgtgtgtgtgtaagagagagagagagtttttcatggtctcttctattcttttcttccaatcccccctccctccgccccttcgtccctagggtgacaagttctgcatccatttccccaacctccatcctcaggaggagattggagctggctgcctctccttttccctgcggtcaaggggacttgctaccggccgagtccctgcaggctacttcctgctccccaacctgtcgagacgggcagtggctccggctaagcagtctccctgttgctcctttggaacccgggcttccaaagttggaaagttcgcggagagaagcgatggcggggaggacaaggaagagcttgttgctggggtgacgaggcattgcggcgtggtccggggcgcgactcgggagggagcctcctgggctgcgtcttgcctaggggtcgcagagccggcgcgcggggagcaggtgcaagccacccgctcccgcagcgcggactcgcagaggtcgcagcttgtcggctccctagctctcgctgggggactcgca

SEQ ID NO: 3935 - DNA, 6000 bp, Homo sapiens
acaggccatggcaatgaaaatcagaaagtagttgccggaaggattgtctggtaggaatggggctccctaggggcacccaagttacatgcttctgcagaatctgaattttgtagaatgagcatgcattatttctataaattcccccaaaataaaaattctttaacaacaggcttctcagcttacaatacacattcacattcagttcaattcgacagcacttactgcatctaatgataggcggggacctggcctggggtggaggcagctgctgtgtttcacatggaggcagggggacaacctgctgtgtggccttgggaaaaccacctaactgctctgagcctctctctcctctctttcaaacacagatgtgacggcaattgtgagataccaatgaaggaagagatgcagaggttctgggcacgtgggcatcgctgggtatcatctcacacaagcccagaacagtcccataagatgagtatctccattttacagaggaggaaactgaggcttggggaggttgactggaaagcccagatcacactgagatcaggtgttggcgtcaggatgcaaattccttgtgtgtgggtctcaggtcagaaacccccaatctagccctgtctgtcctgccattgttcagcccctcctgtttcccgatggggcgttgctgtctagcacacccgacaattacctttagggctcatgtatgtattatgtgtctctagactagaaagtcatctccctgagggcagggactttacttctctcattgttatatccccagcaactagaactctgcctggtccgtggtaggtgctacagaactatttgctgaatgaatgaatgggaaaatgaaagaggtccctggtaaagaaccaaaggaagtggccctggggcccacggagatggtgccaccgttccaggtcacacggctggcaagggcagagcaggacccgggccaggtcccgaattcccactcagtcctgcttctcccaaatccagacggctctgttcatcaacacccctgtccatggccaccggagaccacaggagcaaatctgtctggttcaggaagggatcaggacaaaaatgaagctgcctgcattctgatcctggctggacttctgcctgctagtcctgcttatgcctcagtttctcaatctggaacatgggcacctgcctctctgctgagatgggtggagaaggattcagaaggagtgtgcagaggtggtccttcctgccatccttcctccctcaggaggggccgggctgccctgaggcactggggccaaggcatggcggtgttgtgagaaggcgcctctgccacagagccacagggtcagggctgggaggcaccttgcttttctgatgccatcaccgtagaatggacgagaaagcagaggcccagggaagggaagggccgtggctcaggacatgcaggagttaatggtgggcccaggcagcacaagaacctgggtcctgcctcccagctcagggctctcccctccctgagcacagagagaccagggacagaatccaaccgctccatcactgtcctgcccaagagagcccaggtctacaggctgatatggatgacaggccaggcagggccccggctctgaccccagccctggcctcccagtgcaggctctgaacatcaggacgcaggcttggcttcctaaagcacctgctctgcacggaggcctgaacccatgggtgggaagccagcgagagccccgccctctgggtcccacaggctgccatcaagagttgggccctaggggcaccaggcctggcttttcaggactcagatgaggctgataggagaggtggagctggcagaagcaggtgtgagagcctgggtgtgggcagtgacaccacagcgaccctgctattagatcccatggtggctctggggccaccaaccttcaggggcctccaaacactgagagcatcctggtacgtgtctatccaccccccacccaccccgccccacccagcctcagtaattaccagttaaagctactctgagacagttctactagtgcagttagcacagcagaataaagaaggcctttctgacagctggctgcgcccacccacagcctgggcttccactaacaacgatctgcttgttaatcccacggcgctggaggccccgagtcttcatgaagtgctcagagctggtgtgggaagaagctgggatttggaatccacagccatggatgtcaccttggatgtgctgtgtggccctgggctggccatttaatctctctgagcgcatgaaatggggctggcaaaacagtctcacatgaattaaatgaggaattgtaaggctgtgaaagttcacacgtggccaggcatggtggttcacgcctgtaatcccagcactttgggaggctgaggtgggaggattgcttgagttcaggagttcaagaccagtctgggcaatacagtgagactccccgtctctacaagaaatatttaaaaattatctgggtgtggtggtgtgcgactgtagccctagctactggggaggctgagggaggaagattgctggagcccgggaattagaggttgcagtgagctataatcgcaccactacactccagcctggggaatgcagtgaaaccctgcctcttaaaaaaaaaaaaaagaaaaaagaaaaaagaaagaaagaaggaaagaaaggaaaagaaaagaaaagaaaaagttcacatgctacttttcattttaaaaataagtacaaacacctttgattggcttttagagttcatttctgggtttcacgtgtacaagacatgtggagatgttcctgtcacctccacactaaggctgggccacagctgggaggccaacagtgcccaggtccaggttcaccctctgaggggagcagcacaggctttctactcctgcccctctaccaatcacacaacaaccctgaggacagatcaccaggcacctccttttataaggagcaaccaaggctgagaaggtgaggaacttccctaaggtcacacagaggggtgggccctgcccaattcacagcaacagccccaccaggctgtgcatgccttgacccaggggatgccaggggaggtcggatgtgggctgggtggtgacgcattctgatgggcggctccctggggacattcttggacgactccatccacaactcttcttggtcctgagcccagtgtcagcctgtcctgatgacagagccccagccccagcttcacagatggtctcctctgtcccacatccccaccctgtcctctaactacaaaggcagcatacagatcccaccggctagagtcctgtccctggcactgggcgctcagcgatggtgaatggctgccttctgctgctcgcctccaccaccagctctgggttgcgggaagcagaggcttggccatgccctcttctgctctagtgtaggaagcaaatggctgatggccccacaagacctgctgcagctcagtaccctgtgttcctcagcccagactcctcagaaagctctctgcaccctgaaagcctgacctgacaacagaaatgtcatctcattgagccctggatggacagtcaggcttcctgggcctgtcctggctcagcaacatagaggctgcgctgtcctaggcatggcgctgcctctctgaacctcactgtcctcatctgggagatggggatgaagaccgtggctgttatcagggttgtcgggaggatgaagaattaatgatgctgtctgtggagggaggctggtggctggggcaggtacccactccctgctctcagccccacagctcccccacttcgggctgagctgtggtccttggctcccagaccccggcctgtcactagccacagacaggaggcaaagcagacgggggacctgaccaacagtaactacacgagcatagaccaaagagtttagtactggaaaagaaaaatctgagatcttaaggaataaatagctccagggtttgatacaagatgtttgcagacaggaaaagcccggctttgcctgggagaacacagtgggtccagctgcccactgggccattccacaggaccggacactcaccctataccaggccacatgctaagtgcagggcccagggtgacaaggccacagtccctgccccagcgagctgagtctgctccttccccagccgctcccctgacagccgcaccccacccaggctccgcacagggaagagcctgctgtggactcagggcacgcgactcagctctggtcactccgatgatgtgaccacaggtttccacgctgaactttgtccctctcctcagtactgtccttatcacagtgacagcatcccggcctctgtttactcacctgtctccccaggaccaggctgtcttcccggggcagcccaggtgggcaaagacatcacctaattcttactcctgggtgtgtctggggcagggtgaaggcagcgcctgggagtccacagtcccccacactctgctcctgaccaccccgcagcccagggggcccccatgacccttagaccttccctaaccacggcggtcccactcccctgtggttcgcgtccaccgtctgtgattccccgttcggccagggcccggcaccgcccgcggatgcgcgcccctcccctgcagccagcttactccgagggtccccgcgcgggcggccgcactcacccatgttgacgaagctcatgaccaggtcggcgcggcccaggcgctgctccgcgggcgcgccgtcctcgtcgtcgtcgccagccatggcgtggtacaggtccagcatgaagagcggcgcggacgcgggcagccgggaggcggcgggtggcgcgcggggccggggccgcccgggtagcccgagcaccgccaggatctcgcgctgcacgtcccggcgctcgcgcgcgcccagacgtcgctggggacagccgggcgggggtcgcaggccggggccgcccccgcccagcgcgcacaacgtcaggcccagaagccagagcggtccggggcgcgcggccatggcgggccgggggcgctcagcgggcgcacatcagctccgccgccgcccctgggcccggggacgccccgacggcgaacggggagctgagttcggcgagcagggggcggggctcggcgggcggcgtctgcggcctcagcgcggtccctggagcgccccccgcgcgcacctgccccggctccgggacaagcggacgctgacgcggacgcagacgccaacgcttcgaggccggggctgttctgagggctgggactgtcagccaatccgtctgtcgccgccgttcccaccagtccggctgtggctgcggtccgcgcagcgcaggggcgaccggcgagctccggcagcgacccgggcggcgcgattcccgcgagtccttgccccggctcagccgtctgtgccgcccgcccacccccgggactgaccaatgggggcgcgggggcggggcctgggcgcggaggccgcgcccgctaggagccccgggcggcggcaggtgttgcgggtggggcgaccccgaggtgcgacctcggcgtggctggcggttggtccgggcgaggagcccgcagcctgggcgtcagcgtggtcagggccgtcgtggctcccgccgcgggcctcggcgcagagatcctaaggccgcggcgccgtcccggtcccgccagtggtgccacccggctgcctcgccgtggtgtgccgtggtcgccaccgggcccgacacgcggccgtagccccgtctggagagccgggcggtgccagccaagccccgcgggtggggcctgttcctctgcccgcagcagccggcccgggttccggccaccgcggcccctcaccgcctcctggcgccttccccgtggcccctgcatgcgcttctgcgggcgcctccttctcggcacctgctcggctgcttctccctgcgtcccccacctggctcccgcgtgagcccaggcagcgccccagtcgggccgcccccgccagccctagctgtgcgccctgcg

SEQ ID NO: 3936 - DNA, 6000 bp, Homo sapiens
caggctctttcaaatcttcagaagacacttgcactgccagtggtgatgattactcgatctggccatcctgaaaacctaaaaagtggtccaggaagaaaggtgaggaaggagagggtcaggaatttgtaaggtaggcctgcttgtttagcattactgggcaacagaagagagttctattgcagcataaatttgggggttaccctaaatgagtgggtctcaactaaaggctgccccccatgggatactgagttgctacaacttagggggcagggtggtaagctactgacatctaataggcagaggtcagagatactgctaaacatcctacaatgtacatgacagctccctacaacaaatacttatacagcacaaagggttaatagtgctgagatcaagaaaccctgggccaaaccaaagcttatcaccaagaattctggtccagtctgtggttcaggaagcacttgtgatggaagaactaggaaagagtagagcaattccacataacaggaagtcagcataaagaggtaaatgatacaaatcactacagaggcatattcaaagctccctgtcccagaggtcagtatttcgtgcagcagccatccattcattcaacaaatatttattgagtccctcctgtggcccaggtgctttctgggccctggatccactcaacagatgataatttgaagaattcccaggaatactgccaagtggtttggttcaaaaacatggaatgtggagcttggaggacttttgccactgagaagaggaactgggcccttcttacttccttgtttacagtttaattctcagttgaatgtttcacaaaagccatccctttcagacccaggagcctttgggatttttaaaaaagaatcctaggctgggtgcggtggctcatgcctgtaatcccattactttgggaggccgaggagggcagatcacaagatcaggagttcgagaccagcctgaccaacatggtgaaaccctgtctctactaaaaatacaaaaattagccgggcatggtggtgggtgcctgtagtcccagctactcaggaggaagctgaggtaggagaatcgcttgaacctgtgaggcagaggttgcagtgagctgagattgtgccactgcactctagcctgggcgacagagcaaaactccttctaaaaaaaaatactattatttggggaagctgggcaaattttaagccaggcacggtggctcacgactgtaattccagcactttgggaggccgaggtgggcagatcatgagatcaggagttcgagaccagcctggccaacatggtgaaaccccatctttactaaaaatacaaaaaattagccaggcatggtggtgctagtcccagctactcagaaggctgaagcaggagaatcgcttgaacccgggaggtggaagttgcagtgagccgagattgcaccattgcactccagcctgggtgacagaataagactctgtcaaaaaaaaaaaaaaaaaaaaaaaaagaatcctttacaaaattctcttgtctagagcgaaacttgcgaatccaaatgactgagttgagaatactgagcaaaggtaatttctgtactgttcacaattacctcatttatcttaacaacccaaacaaaatctaaaaatgaagaggatacaaatgaatattgggtcattcaaatggtttcttctgctacaagggcaaatgacttacatccagaaactttcactggcaactccttcagttaggacacagataaatcactttgaaagatgactgaaaggtgacataatagcttggagcttccataactcactctggagatcatgagaattttttttttttgtctttgttttgttttttttgtaaccatcatctctccccatttatagagtacaattaccaaccaacaaataaagcaactaggtgatacctacaggtaatagataagcctctttattattatcaattgagtagaaatggcaaacagcaaaagttctgccttaaaacctcttctgggccgggcgtggtggctcacgcctataatcccagcactttgggaggccaaggtgggtggataacctgaggtcaggagttcaagaccagcctggccaacatagtgaaacctcatctctactaaaaatacaaaaattagcaggatgtggtggcgcacgcctgtaatcccagctacgcaggaggctgaggcaggagaatcacttgaactcaggaggtggaggttgcagtgagccaagatcatgccactgcactctacactccagcctgggtgacagagtgagactccctctcaaaaaacaaagaaaaaaaaaacaaaaagacaacctcttttgctgcattaatacattaataaaacattaccttctctaaatttaaacattacacctaattaattcaccaaaatgtcagttgtcacctaaagcgttatagtaacaaggaaataccttggaataaagaagaatcctcacaggaatagagagagtggaatgagctgattttattcatatttcaatgatcactgtagccttccctgctactatttactcttccagtgaagcctcagagagaggcatttaagaattacctccagtgatgcaagggactccatttccacatggcccttctcttgtcttaattacaaaacatgttgtaccaaacagtcatcactgctgtaagctctctggcaagcccccaaatcacaaaccttggtgataacttccacaaagcacatacagccagtcacaaatagatttataaagataaaacctttttatgacttcaagcaccaaagagatgactttatgaaggctgtcatttataccactgtcttttgttattaaggaagcagaaaatggaaataagaatagaaaattgctattttctaatagaaatttagaaagcagaagtaaaacttgagcgttctatccatgcccataagaaatatggtttccaatggggtttaatttttgttatcccatgcccagggtttttcaaccaaaaagagaatttggccccttgtcttccttttgtaataagctacaattttagcagcagaggcaagagattggaagagatacagacaatttttttaaaggcttatacccaatgaaacacagtcttttaaaagcaagttgcatgaaaacaaaacattcaaatcctgtttcttcctgcaaataattttaaactaaccagctaactgctagcataccactgacctttgccttggactcgcaggttttaggaataatctaaagatagacatttttttttagtgatgaatatgattaaattacaaacgcccgttttccccttaaagaccaataaataatgtttcaattttaagcaataaaaggtcgaaaaaaactcaaaatcaacaagctattaatctagtctttattacaaatgaaagacgtcaaggcccatttctcatacggactgaggtggcaaatggcaatctcttatgtcaaactacagtgatgagaccacctaattatggttatatttatagatatctggatttcatcataatcaacctctctcttgcaaagtgagaaaaagaaatgtccaccaaattagtcctggtgacataagataatgtctgtctaattgatcacagcatcctcaaagccattagctaggacccacggaaagaaaaacatttcagcttctccacctgacaccaaacattcaacttgcagggaccaacaccactatctagaatgatccctatagaacctccttactgaagaccgataaaatccaggggagaagggcgtgaacggcatccaaaatgaagaccccaagaattgtcctctatcatcagggctaggagatgcaaggaagagttaaaatcctggctatgtaagtcagcatctccatctgagcctggtgagacctgaccgagggccctgtgagactttcagatccgcggggaagccacactgtccgggatactttgagtttctgatctgtttcccacggtctgccacataggagtgtcctccgtatttggcagtggagagataaggatacagagagatcctgtgtgtgggagaggaaggggtgtaagagaacgcatcagaacgcctcagaggtccaggagaactccgtctccgggcctcttcctcgaagttgcaaacctgggtctgtatcagcaggcagggcgggagggggtggctggacgcctcactgcgtgcgctccccgaggctgctgtgacaatggtaagaagatggaccagtgaacgggaaacatgacgtgagggggtcttacttttgcagctcgctgcccagggctggtagccatagtagccagtgatgcgcaggatccgctcctcgatggacgtgagccccaccggcccgctggtgagatcctccacggagcgcgaccatttcagatcctccttaatcgcctcgtccaccaccaagtacttgagctgccggagctgggggctgatgtcggacagtctccgggggctgacgtccggtgacctcctcatgccactgcggtcgcaggcgccacgggcaggtgggtgggcagggggagcatggacagagaggaggggattcgtgaggagcagatcccagggcgagagcaagagcgcggccggggccctccgggggcgagcgccgcggcagagcccgcgctcctcccttcccgccgccactcacccacttccccgggcagctgtccccagtgccctatcctgggcgtctcggggcagtgcgggttggggcgagtggcgagggaaagaatgactgaaacttcccgagcagctccaccgcgcgcgccgcccttccccgagcctcagactgcccagtgtcccagctgcaaagggctaccccggcgctccggcctcccgcccgccggctcgctcacccacgcccggggcgctactcacacggcaatgctcttgcccctgggtgcgccgctgggaaactctcgaatccccataggcaaagacagagtgggaccggcagctcccagacttgaggcggaggggccgcgggccggagctccctgcagccgctagcctgggaagactggagtgcgctgcccaccgagggtctgcgccgcgccggccgccccgggccgctttgtgcgcgcccgcgcggtctgtacccgagcgcctccgcggcgtgcggcacgatgcaggcgcggcggttcagcccggtgactccaggccggcccgcgcgctcgccgcaacgacccggcagccgaggcagcgccgcgccccacgcccgtcaccgtcgccgccgccctagcacaccgcaggcgtgagtctcgccgcgaccgggagagccctcccagctgtgcgctctcgaggcacctggtcgggcggggaggcgtcgggtcggggcgcacaggggccaggcgggggcgctgctgcccacttcccgcctcccgggcgtgcgctccgccccggagcccgcacctcgcgcccgcgctccgcctggaagccttggggcaccggacgcgctcctccacccttctcttttgactcaaaccctgccgctcccagttcagtacttttctctctctctctcacactctctctctctctctctctctctctctctctctctctctctatgtatatgtctgtctctctctttctctaaattagcaaaactacttggaaagaaagaaacctggttccatgctcagcatgccaagtgaataaatggcgtttcataggcaacgctgagacacaaaatgtattatctattacgctgtggggatctctcagtcagacctggtcctcagagagcttactttcccactgatgatgcaattacgaaatcagttctctcttcatagatttccattttaaaagcttctcatctttttccttaccaccccactgcccccgacggccgaaaggcattctcttcagactacctaatcacctttcctaatattatttttcatcggggcaaatttagaaaagatagaagtatgtggagaagaaaatatccattatccagccaaaa

SEQ ID NO: 3937 - DNA, 6000 bp, Homo sapiens
gcaaaatgccatgcaaaggcaagacaagattttgtacattatctgtgggccagggcaatgcgccagtaagtgtggggacaaggaccttatggaaggaccttgatggaagcccagctctgtgcatgaagtaatagggtcacctctgtggtgcagctgatcctttctgtgctgatgctggcaatcggtcctcagctttccggagtaagctgctcattctgtcctctgtgggatgagagcctgtctgtatttactttaagtcagagtggagaaggctgcctattatgccagagccctctgcaaccagagcatatgtgacaaagccaggctttgtctaaaatgaaggaagccgaaaagaggttttctcatttttacagtgtcagtaaggtacttgttttcatatagtcaaaggcttggacagggactcacatgatttacctttttgtttccagaaaggttcttactctgctttccacacacttggaaatctaccctatatttcaaagtccaccagggaaggaggttatacaatctttttggaaacaaattcaatttcttgtcagccctcaattgacatagattgagcactggctctgcacaaggaattaggagccaagagaataaagaaaaggagctgcagtttctgttttcaaggagctcatgagggacatgaaaagaccgggtgtgacaagggctaaccgaaaagcacacacattaaggcctgtaggagtcgagaagaggaagtttggggctgcattggagaggaaagatgtccttcagtaggtgaaatttatctggtcttctggggttgggtagtggggagggcctggtgttgggaaatcccacctcacgctctcccttcctctgcaccccatctttgagttcactgactacagcgtttcagcataatacaaggcaccacagttacaaagatgagtcaggcttggtcccagcctctaggaattcgcaagggacttataccaattgccagagagttgttcttccatggagatatggcttgtaactcactcactcattcaacaaggacctactgaacatctgttctgtgcctagtcctgctcttgatgctaagaatacaatgggccacaaggcagatatagccctgcctttataaaggtcatggtctagaggggcaggagacagtaaacacataattacaagtgtgataagagttatgaaaaaggaacaacagtgtgctaaggggcagatagcaaggcattcaacctggtctgggagagagaggcttcttttcagatgtgatgcttaagccgacactgaaatgccgaatggagttatccaggtgaagggggagaggagagtgaggggagaagaatatgcccatgagaaggaagacacagtgcaaaagtccaaagtggagagaatatggcacctttgaggagctaaaacatgtccaagagggctgcagcaggaatggggctgaagtccaagagctagggctggcccttctgggctggaaagtgaccactttccacataaagtggaaaagtaattgtctgctgggctcaatggtcaaaacaaatcgaagctaaagcaaatattctctcttctcttccattttgtgcaggaaagcaggctcccttcttgcacagttgcagagggatagtgtagaccatgtgcatcctcactaagagggtccctgccctgatccttgtacccgtcatctcacctctactcaatcagccttcagtgcaggacccatggacaccctccatctacaagctctgtcccaccagtccctgctagtcctcgaggacaggagtctgccttctttgtctctgtttctgcagcatcaacacagtgcctggcacccagggtgctcaatgagtgcacaactccactgtgccaggggaagtcttatgatgggctgagtcctgaatacctgaggaagctccaagaggtagtcttctgtttttttgttttgttttgttttgagacggagtctcactctgtcgcccaggcttgaatgcagtgacacgatctcggctcacagcaagctccacctcccaggttcacaccattctcctgcctcagcctcccaagtagctgggactacaggcacctgccaccacacccggctaattttttgtgtttttagtagaaactgggtttcaccgtgttagccaggattgtcgcgatctcctgacctcgtgatccacccacctcagcctcccaaagtgctgggattacagccactgggttggttcacaattgggcttctgcctcagtttctctgcttaatattccagtgacctgatgaggctggagttgtgcctggaaactctagccactgatgtttatggagtacctgctgagtgtagagacagtgtcagatgctgttgaggatggtatataacaccatttgtgattaaaaaatacactagaagacatgacccctgatcacatgcatctaagcatttgcaataattaagtatgctgggttttcattagtactttgaaaatgtgaaaatcatcttgtttcattacttcaaagaataaggtgattctgactgtaaatatgacacttaagtaatctcatgttttaaaaaaattggtctttgtagctttgtaggtgccaacacttacttcctcctttttccagttgacagctgttttacattcattacatctttgtgttatgaaatctacatgaggtaaaaagtagcactggtttcagagatggaatagagttcaaaggtctttgacatttaaagcctttcaccatcttaccccaacctccttccactgttccttttcatattctctttcatgaagacgtctttttttccatttgtgcttgctttccctcttcctcctccatctctgacttcttcctctcttcctggttcctcattttccatgttctttctcgtctttcacctggtgccctgatcagacccatattctcatacatcagctgtgtatagctaacaatttttgatggctaacttagaaagctaaccaaaaatgtcctcctgattgtacaattaaaacaattcattttcaaatttgggaaatatggaaagtataaaggacagaagggtcactgctgactgtggaggagtggtcaagagcacaggcttcgagcctcagctttggtgccttgtaaccttgggtaagttaccctctctgagcctcagtattctcatctgtgaaacggaaaagacaaaccccatctcatgggcttaccataaatatcatgaaaattacctataaaatgcttagtactgtttctggcaagtaataagcactcaatacttgatactattaatacttaatactagtgttattataataaccattaaacattttcagactactatttataatttctattaaaaatactttgcgaatgccaaccaacaatcttacaagcaaaatttggacccattctgttatcaagctgtggactgcttctccttcccagagtggaaaagtgatttgccttacattacagaagagttcacaggtgccaccaggaaatggaacaagcatacttgactcccttatctgtgccataagactgtgtcatgcaggtaaacacagtcatgttggtgtgaaaccagcagaaggcaggtgttggaggctgagtcatcactatgtgctgagagtgcatgctatgtttttttttttttttgttagacggagtctcgctctgtcaccaggctggagtgcagtggcgcgatctcggctcactgcaagctccgcctcccaggttcacgctattctcctgcctcagcctcccaagtagctgggactacaggtgcccgccaccacgcccggctaattttttgtatttttagtagagacgaggtttcactgtgttagccaggatggtctcgatctcctgacctcatgatccgcccaccttggcctcccaaagtgctgggattacaggcatgagccaccgtgcctggccaagtgcatgccatgttatgtcccaatggtagacatggcctttgattcagacaatgcagtagaacaccctggattgggcatgggctccttcttatcctgcccaacctgcctccctgtgccactaagcctgtcaagataactggctcacatcccattaggaagaattaccatgatcactaatgggtagttagggacagcgttccagtttaaaggctttcatgggccgtgaaagctggtgagtaaataatcgtttatcaaccagtcacttaaaggacaccacacagaacgatgttctaggacttccaaacatatagaagccgtatatcataatggagcataaaagttatgtgtgaatagactgtaaaaccgaacaactgtttacctttgtgaaggttttatttactcgccctgcaatagatacttagatgtgcttcatacgaaggctgccgatcccagctgcaagcagagctcaactagatggccatgcatcggttagatgccaacagcagcgtgctttcaggggcccagggaaagcttctcacactccttgcaaaactcagtttgcctgcctgatgcttcaagtttcttgaatgagaaactaaagctttatttctatgagtccagaaaattcaatttaacaatttcaacattggattcaacatggaatagtgcttaatgcacaaatagccaacatttataaagctacattctttacagagaacttccgtatgtgtgctcttctttatcctcaaatgctccaataaatttaaccattgctcccaattatgaggagggatctgtgacttgaaggagttaaatgccttgcctgagggcgcattctgggcatggcagggctgggactggagtctggtgcttctgatgaggccgccttgtcagtgatctttctacgagggtgggggcttgcattaactgccatacaggagccagttttgaaaggcagtagatgcgaactggagaggggtgccagcactccccagttggggcatgtccggagggccccttctctgcagtgctccctgctcactcctggttgatcctgcccagggccatggtgttctgatgagcctgcacgtgtttcctctaagcttgctgagttgaccccattcgacactcgcattccctgttgggattgaaaccccattccgatccccagcctccttggctgaagtcctggaaacctgctacttccttgccagccctgtcctccaggaagctgagctctgttccccatgctcccttccccagctggggttttgttcctgtggacagacctgccagaactgaatgctgattgctgttcttttcccttggtctcctgctatttcagggaactgccatttgttcatttttatttctatcattatatgcatttttattgagcatctactatatataagacacaatccaggattgacccccttaggctctcaaggtcaccctaatggaactagtttgccacacacctatagaagttctactttgtgttactgtggtctatctcacaggaggccttaaagttgggctttggttctctacgcgtcccccagctggtcaacacacagtaagtggtagcttaggggagacaccagaggtaagggtgggtcacggttgggaacagaacatgggaaatgggttttaggagacttttaagacaacatagggattcctgaatattaccaaggcctgactggccctggctccaggtgagtcagtgagcgagtgactctgctgagtgacagtcaatgagccaaagaagaggtgggatcatttatagaaaagggtaacaaggaatgaccttcagtgtcattgtttaatgacattaccttcccaagctgcaatcctttagtttcacaggtatcagtggcaatatttgaatgaatttgatctgaatttctactctatttatttccccaccagcttcattttgaaaatcaccttttctgaatgacaactcaatcaattcaataacatgcaattttacacagtaggaacctattcccgtatcccacttcatacttgtaactg

SEQ ID NO: 3938 - DNA, 6000 bp, Homo sapiens
ttaatttcccagtgctagtggcagttgctttttttttttttttttttgagacggagtcttgctctgtcgcccaggctggagtgcagtggtgccatctctgctcactgcaagctccgcctcccgggttcacgccattctcctgcctcagcctccggagtagctaggacttacaggcgcctgccaccacgcctggctaattttttgtatttttagtagagacggggtttcaccgtgttagccaggatggtctccatctcctgacctcgtgatccacccgccttggcctcccaaagcgctgggattacaggcgtgagccaccgtgcctggccttttttttttttttttgagacagtctcgctctatcacctaggctggactgcagtggcgtgatctctgctcactgcaacctctgcctcctgggttcaagtgattctcctgcctcagcctcccaagtagctgagagtacaggtgcccgccaccacacccagctaatttttgtatttttagtagagctggggtttcaccatgttggccaggatagtcttgatctcttgacctcatgatccgcctgcctcggcctcccaaagtgctgggattacaggcgtgagccactgtgcccagccccccccccttttttttttaagcattttctcagcagactagctaaggacaatagatggcatgtcctgacacccatggggcactctgggtgttggggcagaaacttgagagggaatgagcttctgcattggtccctttcctgctgaaggtgtctcccagtagtgtccatcccatcccatttccatccccagttcctcttacccggaagctgttacagcccagtccgctctgggctccaatcctgtccatcctgcccccgaagcagctggatctccgcaggctccgaggggcagtgagcagcgccctcagcttgctttttaggagggcagatcgatcagaggagtcccaggggccccgcccgagggcacctccatctctctgggctgggctgacttccccggtccagggaggcacctcagggagggggctgagagcagcccccgcttcttcattcggctcactgagcacttgtgggggcacgacctcatcttctaaaggcatcttttcttccaaatggtccagcaaattctttagaaaaggaaaatacagggaaagggataaacctcactgacttggaggaaatcaagaggagtgagcacagcatcagaaagccccctggccccagactgcacccgctttcctggccctaccttgaaatccatcaggtctgcgttggacacggcattgtacatgggattagctctggtctgacctaggagctggaatgccagtaaaaggaggaagctcacggtggtggtggagaaggagctcatgctggcgtcgtcaaggagcaatccactgcttgctgctctgtctctcccctctggttcctctctggttcccctctcttggcctacgtctgtccctgtctcccagctgcccagtgccgcctctttttatagccccccagctctccaagcacgcaggagagacagaaccctccccattctgtcacttgcagtgataaagctgccaagtgagaagccagcaggagatgcccttttaaagttatcatcccgcagggcttgtcacagcccctctctgccttgggcagccccaacagccccccagaccctcagctgcaagagccgcattcttactgatttgactcaagaggctcccacttcaaaggtgtgagaagagtaaaaaagagtccttggttatctcaccgccgtgcctcaggattctttctcctcgacgctggtacccgtgcggggaaacagagggtgacgcttggctggtgcccagctcccctggtttgtttgtggctcagctgtcagggcctccaaataagggtggagaggaggaaatggcaggcagccagcagcccgagacaaatggatccagatgctcaagctggcctcacacctgcctcatccgccacgtgggcagacctctggcctcagacagggctgccttcacccctggcagtccctctccatggtcaggcgaaaggaagttattttttagtatataaagtcagctgagaaccaaatgtgatgaagctcccaggaatccaacccccaaatagaaatagcaagaaaaggcgggggagcacaagcatcctctctccaaagctcctcctcttccatgtcccccgcgaccctcctccagcatgctgcggggacaggcttagaggacgcagccaatttcatttcttccgttgctgtttatagatgctcagactcttcgtgtctgaagtttgttaacatccccctgcccttcctgggcttgtgcccgtggcaacttgaccgatggaggaagggaggtgggggtgaaggaggtatagtcagtttccctcaatgccttctacatccttccctgaggacgtggcaagtggcaagtgaccgagccaccaaggtcacaatttccctggcccccaaaagggaaataacaggcagcaagtctgtctatgtttaatgaatggcctgtttgctaagcactgaactcagtgttagccattaccattcaatgcaacgtatactgggggaaaactctaaatttgaagggctgagagaccagtactgtagcccaaaacaaaccagttgcatacctcttcgcagccttactttccttgtgtgtaaaatgagaaagaatgttaaaaaccggccgggtgcagtggctcacacgtataatcccagcactttgggaggctaaggtgggtggatcacctgaggccaggagtttgagaccagccctaccaacatggcaaaactctgtctctactaaaaatataaaaattagctgggtgtggtggcatgtgcctgtaatccccgctactagggaggctgaggtaaaagaattgcttgaccttgggaggcggaggttgtagtgaaccaagatcgcaccactgcactctagcctgggcaacagagtgggactcggtctcaaaaaataaataaataaatgaatgaataaagtagaaatcttccctgcctaccttgcaggattgttgtggagcccaagtgagctgagaacgtgtcaacacataacaagtgtgcagtgctgagtccctgcaagatggccatcatagttgtctttattggttgcttgtagcatgcctagcactgtgctgagaactttatggaaatgattttattttgatcaccatccccaggtggtagatagcattgtccttgcttacaagggaacagaactgagcccgagaggctatgccacttgcccaaggccactaggtgcctaagtggcggaaccaggactggatccccaggtctgacgctgatgtctgtatcctagcctatttcacgtagagagctgccaccttacctcttagctgcattccccaattaaacccccattccccatctttcagatgccccaagggagctccttcaccttccccatgcccctggggctgtagcttttttgtgcacttaccaagtctgtgtgtgttggctgctctcctgatctatttctacaccgaatgtgttttaatccactccttagaagctcagaaaatgtgtgttgagtgaccagctctgtcctggctggccagatctgtccccaggtgtgctgacctcatgactgaccaggtgaacaggacgttgtgcagccataaggttggaaatcagggcagcaagtgactagaggtcacaagaggtatccagggtgatattattctaagataagataaaagggaccctctttggcaagccttggggtttgtctgtaggtggggatctaatatttcatggggtggttagaagcagcctgtaggagtgagagagaagaaaagtaacaggcacagaaagccaggcccacctccatccccacctcttccacggctgaaaaatcaaaagccttttatttccttatcactggaaagaagtcatcttagtcatacaacgggtggagcactgcaaacgggtgggagaatccagaatccgggtgttgccagattccagcccagagtttggcttcacgattctctgggggtatgccttgggctgctgcagggagccccagagtgtgcagtgtcacccgcgtgcagagctggcacgaaatccccaacacattcgtggcatgattctgcgggacccagatggtctaaagcagaagccccagttgggaaaaattggttcatacttagggatgatcgttgctgactttgaaaatgatgttttgtttctttggtttaatatggaggtcactaagggctgaagactggggacagtttccctagaaaacaaagcccaaggcaaaaggtcactcgctaaagttttgtgggggttcctattcaaaggaagcaagagtgaggcggagtgagaggctgttttagttaactactgccgggtaacaagtcaccccagactgggcgtggtgactcacgcctgtcattccaacactttgggaggatcatttgaacccaggagttcaagaccaccctgggcaacatggcaaaaacccatttgtactaaaaatacaaaaaattagctgggtgcagtggtgcgtgcctgtcatcccagctaccctggacactgaggtgggagaatcaccacagcccaagaagttgaggctgccgtgagccatgaccaagccactgcactccagcctgggtgacagagtgagaacctgtctcaaaaagaacaaaagccaggcatggtggctcacgcctgtaatactagccctttgggaggctgaggcaggaagatctcttgagctcaggagttccagacaagactgagcaacataaggaaccctgtttttaataaataaacaaacaaaaaacaaaacaaaaaccaagtcaccccaaaccttagcaacttcacacaatgcacatctattatctcatcacctctgtgctctgtggatcagggatctggccctgcttggcctggggcccctgggcaatgaaggcgttggctgcggctgcagtcatctcaaggcttggctgggggaggataggctttcaggctcactcctgcagctgttggcagaagccacaggttctcgctggctggtggctggtggaaacatcagtttcttgccacgtgggtctctccatggagacgcaactgtcttctattaggtcaggcgagaaagagaagttacggaagaagccacagtctctttgttacctaatctcagaagtgacatcccattcttcatgttgtactgttctgtgtcccttagaagtgagtctctgggtctcactcacactctaagggagggggttacagagggtatgaagaccaggaggttggggatctctgggggccttctgaaagcactgcccacacaaatagagaaggaaggaaagcaaatgtaaggtgacattggctgagtgcagtggctcatgcctgtaatcccagcactttgggaggctgaggtgggtggatcacttgaggtcaggagctcgagaccagcctgaccaacatggtgaaaccccgtctctactaaaaatacaaaaattagccaggcatggtggtgtgcacctgtagtcccagctactcgggaggctgaggcaggagaatcatgaagggcagggctctgcaggaaggttgacttatttgggagtgtcttagtttaagttctcttgaaccggagacagatattccagtattagtggctgatcttggagacaaacccaggaaatgtcagtggagagtggggaagtgatacagaaaaagtagaagtcagtgaccacctctggcagtaggtgcttaatcctcctcccacagagaactccaaacaggttctctgtttggagaacagagacacatgccacctatgactcaagggagctgggtgtttgttttattttattttattttattttatttttgaaacagagtcttgctctgtcacccaggctggagtgaagtggtaatttcagccttgacttcccggctcagtgat

SEQ ID NO: 3939 - DNA, 6000 bp, Homo sapiens; identical to SEQ ID NO: 3559

SEQ ID NO: 3940 - DNA, 6000 bp, Homo sapiens; identical to SEQ ID NO: 3560

SEQ ID NO: 3941 - DNA, 6000 bp, Homo sapiens
ctcctgggaaccccaccctgtgtgattccagactcaccaggccccctccctccggcctcacagaggaggctgggaagctgggcagggcccacccttagtgccccccaacccaacaatcccagcctccacttgtcagaaaaggccatgcctctcacatggacagagccctccctcactcttaccagtgcaaagtctcttcctccaggaagtcctcccagatctcctttttgggggacccttggtttccagcccctagttatcagccggttcaccccagatgacagctgcacaccaggacccctcatttcctatcagcgaggtcatggtgcccagcacccctccccaatcccagcgacaggtagagactgggacacaggtatgggcaaactgacctgggattcaccttgtgcctgccttggaccaggcatggcctctctggccatcagtttctcaactctgccacaggcccatgcccctctctccacagacccctccccatttctctttcctgtcctagctccctcaaggtcctaagagcagcccagagccccagagccccagggcccccccaggctggctctgctgtcagacccacagttctgccaggaattcattcctgctggtccccggccaacacagggacacaggcagagccccggaccacctgcccgagccccaaaatcacccaacatcacttcccaggccagcccatgcccacaccaaccctctgcactctgcacccctgtcctaacctcacctgctaaaccctggcccaggcactgtttcccacggaggctccaggaggccttcatccaccagcacttcctgcctctggctgccgggccccgccctccccatcttggctctggggcctctgcctgactgtgcccacccagggctcacttcccctccctgggcccagtgccgcccgctgcccaccctccccagctcacactctgcaggtacctccaggtcctgggtctgccacagacgggtggagtgcggctcccagggcctccagccaggcagacgaacccgttctcctggtttgtggctggcactgcgaggggcttcccgagggccgcaccctacagtccctgtactcggggccagcttgtgggtggcccttcctcaatccccaaacccatgtatagctaaagagaagggaggggacactgccacacccctgaagccagaactgccatgctgggcaggagccactcccctcaagcagcaccagcgcccactttgcccacccagggaccccgacctgctgcgtccagctcctgggcccaccctgccctcctcggggtcctgagcgaccgctgggtgccaggcagcaacccaggcacagcagtcccctgttccggtggtgctcacaccccaccagagggggcacagggggcagcacctgctggtgcgtcagatcacctgcggggctgcccaccgcactgggtgttggtggggggatggggatacgaaccgtggggctgcaccccgagctccctctcctccccggcctctgagctccccacagcaccggaactgggtttagcggaggagcgcaggccctccagaggaaggatgtcggacaacacacctgctgctgctgggcggaagtgggtgagtgtgatgggcgaggctgagaaccctgctccggcgcaggcttcatctgggagcttgttggaaatgcagaactggacctcgtcccaggcccatccacccagacctgcactgtgaccagaccccagacgatgtgtgcactgggcaggagcaaagcaggctcttaataaataccagctgattattacccagtcccattccacagaccagaagacggaagcccaggggagttcagatggaatgggtgtgagagccccctgtaaatggcagggccggcggagggcacagcaggctgcggtcagaggccagccaggaagcactgctgtgcagcgtccccagcagcctggttttgaagccgggcggcacataggctgagtggcaagagatggtgaggcatatcggggcttattgattcaagagcaggctcctccagaaggatgtaaggcgctgccaacaagaataacgctcggtttaaaggctgtggtgatcccctgctggggccaggcacatggctgtcaagagacccaagactggggctgggccctgttggccacttctgcccaatgcctgtggttgctctccctaaaatccacagccttggccaggcacggtggctcacacctgtaatcccagcactttgggaggctgaggcaggtggatcacaaggtcaggaggtcgagaccatcctggctaacagggtgaaaccccgtctctactaaaaatacaaaaaattagccaggcgtggtggcgggcgcctgtagtcccagctactcaggaggctgaggcaacagaatggtgcgaaccccagaggcagagcttgcagtgagccaagatcccgccactgcactccagcctgggcgacaaagcgagactctgtctcaaaaaaaaaaaaaaaagaaaaatccacagcctccaccttcctgacctcgatccccaaagaagagagggacagagtttgtgaaaagtcccaagggctcaagaggaggctgccacagggaggcaagggtgctaagcggcaaacgccccctcccctggcaggacccccatgccccaccccagaaccctggaaccaaccagagctcccaggttgcctggtcagccaggaaggacatggagacctgactcccgccccacctccctgagaccccctccaggcgcttccttccctccgctgtttcgggcagatggtcgctccacttcgccagtggttctgatctagattcgattccctttggggcaaaactcaccgcctaatcccctataactctaccggggagcccggtggagagcagacgggctgacgctgccacctgccggccatcccaggataggaccgccgtattcaagtcgccctcaggaaggaccctcggggcaccagaggccttcgaagccccaatgagtgaggcaactgagggtcgcgggtgccattacaaggcccagccaaggcctagagccaaggcttgaaccgtgggggacccccaagccccacctgcccaggaacagcagacactgggacactttgtttcaggtcctgcccaggcccctcccactgtgaggctgggatttgtcgcccagggtgcagatgagaagagtggggaaagcagtcctgagccaggacagcggtgggggatgcctcctagagcaggccctcccgtcaggggcccatcatagaacccagtgtgaatccaaaggagccgaagcctcctcctcagaatcagacgtggagccatgaacccaggggccagagcggcatctcaaactgttatctaagcattgaccagaacacatgatcacctcagcggctccacgtgggcgatgccgggttgcctggtccacggatgaggggttcagcccaaggtgctcaacccaatcagagggcagcctctgtgtccaggagacacgggtgcacccgcggggtcagaactccaaaggggcgcgggggcgctgggaggtttggtagccagagggcctgcggggcggggccacccaggccatgccccttccctgtaagaggggccattcctgcagtgtggggctctggctttgtgactgggctgtgccagtctggggatgatcccacagctgagctcctgtagatggaaccagaggtgaggcaaggaactggaggccctccccactgaggtcagcggggcgcagacgcccccttgtcgtgccctgccttcctcctgcaatcctgcaggactctccagggccaagtgctgcccttggggccaaaaaacagggccttctccttcacctgccctgcagccattcaggtatgtaccaggcatctcctgccctccctggccaggcggccccagaggcacaggccgcagacaccgcaggcgacctgcgtgggcctccagttcccgccccagcccttcccacccccagctcagggcaggtccagctgtggccagcggctggggaaggttctgtcccctccaggtgtgcggccttggcaagtgcttcaggcctccctccgctcgtcccctgggagcagagggatcggagcgcctgcgatgtggttccccagagcacctgcggggctcaggccaggcagggtggagggtggagggtggaaggccaccttccgcccgtcctggaaccacgcggcggcttcccggctgccccccacccgccaggccctgcctcccgtgggcaccaggggggcgtccacaccaagccggccgtgtgcttttcgcgcaggattactggggaaggcggctgctcggggcctggaaggtcccgggtctcgcctcgtgcccctctggcccccaaaccgaccggctccccggaactggccaacccgcgctgagagcccgcgcagctcaaagggcgcgagggcgggaccgccgcggccggcgctgggagctcggcttcccgaagacccaagcgaaagcctccgtctccccagccgtaaatgggcctgcagcgtctccactccgcagcgctgtccccagtgggagggcggcccgtggacgtgcagggagcagagcaggggcccctggcagcgtaggaccccgaggtcgcagcaaccacgcggccgcgagcccatcccgctgcctcgccagcgcccctcgcgcgtgccccgcccccacctcggctcgcgggccccgccccgctccgctccgccctgcgcctccgactaccttcccgctgccccgccccgcgctgcgctggttcggactccagccccgcttccgcccgggccctggccccgcctccagccccagtccggccccgccccagcaccttgacgcagaggtctgcgccgcacgcagagccacgtcgtgccgtcatcagttctcgcccgtctgggcgtgggcgtggccggcgtggctgctcgggaccacccgaacccgcggccatggccccggccgccgccagccccccggaggtgatccgcgcggcgcagaaggacgagtactaccgcggtgggctgcggagcgcggcgggcggcgccctgcacagcctggcgggtgagggccgggcgcggccggacgtcctcgcgagcggcccagggggtgttgcccctcatggaggcggggtgtctgccgtgtgtggtcacggtcgcctgggcccgtcccacaacctgggacccggcagtctccttcgcctgccctgcggccattcagggatgtgcggggcacctcctgccctccctggccaggtggccccagaggcacaggccgcagacaccgcgggggacctgcgtgggcctccagttcccgcccaagcccttcccgtccccagctcagggcaggtccagctgacgccagcggctggggaagactctgtcccctccaggtgtgaggccttggcaagtgcttcaagcctccctccgatcctcccctgtgagcagaggggtcagagcgcccgcggcgcgaacgcctcatacctcggtccggttcacactgaccccggcctttcctaggcctgagcagcagcccaggcccctcgccctgctgaccccagtgtaggctcagccaggccctgcctgcctcaccaggccgggagctgagtacagaagccagtgtactcaatgaagcagcacctgtcatcccagcagtttgggaggcagaggcgggaggatcgcttgagcccaggagtttgaaaccagcctgggcaacatggcaagaccccgtctctacaaaaaatctgaaaattagccggacgtggtggcggcgtctgtaatcccagctcttcaggaggctgaggcaagagaatcgcctgagcccgagggatgaggctgcagtgagccatgattgtgccgctgcactccagcctgggcgacggggccagaccccatcaccgattaaaaaacgaaaaaaaaaagatgccgggtgtggtggctcacgcctgtaatcccagcac

SEQ ID NO: 3942 - DNA, 6000 bp, Homo sapiens; identical to SEQ ID NO: 3562

SEQ ID NO: 3943 - DNA, 6000 bp, Homo sapiens
tttcttgagtttgacaaaaaaaaaaaaaaaaaaaaaaaaaaaagaacattatgtcaggtctggaaccaagagtagggagaggttttcgggccccaggacaagagccctacctgcggcccatcccagaggacagccgtgtggctccgtgtggcagccccttcccttctgtacttccagaggtttcaaccagtgctaactggtgagtgccgcacaggctactgtggatgcaggtgacgagggagaaatctgttgtccccctctgcagatgcatttcaaagtgaaatgaagtgattgctccatgtaattaactattgggacacacagcaaaagctctgaaatgactcagccaattgtctccagatgcggttggagaggctgcgattgtttaactctctttagctgtgttggggctcccaatagcccagcagacaagggcccttcagaggacaaaggccgggactccagcgagtgcatcaatgctgacctggcccagctcggggagagtgaattcagaaagacccccattgccctggccttttgtgtttctccccagctggctctaatctttaaatatttacccggcccctttgtgcatatatgacttgtgcactttgggctgatggtgctcataaattacatatcgtttacctgttttccagcctagagagagggagctttcattcctttagcctggaatggccagaggaggggaaagaaaacttttggatgacagggattccctcctgggaagagctgcggccacactggacaggcccctccctgcggccctctcagcttccatatggacaggggatggggcagaggcctgtgaatgactgggagctgcaggtgattaaaaaaaatcaccaatctggccaggcatggtggctcactcctgtaatctcagcactttgggaggccgaggccagcggatcacgcggtcaggtgttcgagaccagcctggccaacatggtgaaaccccgtctctactaaaaatacaaaaattagctgggtgtggtggcaggtgcctgtaatcccaactactcgggagggtgaggcaggagaatcgcttgaacccaggaggcagaggttgcagtgagctgggatcgtgccactgcattccagcctgggcaacagagtgagactccatctcaaaaaaaaaaaaaaaaaagagaaagaaaaagaagcctaatttcatctcggcctggagtttaacttggaaatagcacagtggttctcagggttctctaaaacaggaggtatccacactcgggtcccagaaataaagccacctcagcctgtaggcggatggcaggaaggggagggaagggggaggttgcagagggaccttcctgcatgagaaagggctccctttgtgcctgcctcgaaagctcctagaacaaaacacattcaaatgcttatttacaagaaaagtcaagcaaggcatcccaggcagagcagttttccttttttttcttatatttttgtaggtgtgttgtccccaagcatggagggctgggtgcacagtgggtctgtttgatcagattgctttcctctgtggcgggaaagcaggtccctgcatggggtctgcgtgtttctgtgcatctccgtgtgtgtgtttccctgtgtctatgtgcagccctctgcatgtgactttgttcctctggtttgatgcccatgtgtgcttagatctgcttcctctcctttctcctccatcactgctctgtgaaccctgggccctgacagattcggcaactccagcaacttctgaaaattctccttccctggagtccggccccacctgggaggagactgctgcctctcccttctttctcccttctccaaaatggggctgatgaagagggaggggccaaggggaggtgatgggcagaggagagagcattgctgtggttctccagtctggttacatattactctacaaccccgagtggcaacagtccctgggggtaaatcagggctgtcatacattgaggagagcagaagccaggaagggcttcccaggcacagtgggttttggccccaggaccagctcccttccaggggtgaaggtgcgatgagtgccctctggtggtcctgaggtgtcctggagcagagggagatgtcctgagtctgtgggagaccacaggaaactggcgacagtcacaggagctctcagctcccaggaacattcacatccaggcctccttcccatgtggcactgcagctgagtgactttgatttttaaaacattaaatctcttttcaattcccatccaccaagtttagcacgttttctgagcaccgtttaaacatggtactggagctaggcgcagtggtgcacgcctgtcgtcccagctactcaggaggccgaggcaggaggatggcctgagcccaggagtttgaggctgcagtgagctatgatctcgccactgcattccagccttggcaacagagtgaggccctgtctcaaaaaaatcaataactaaaataaaataaagtggtactgggctttacagaacaaataccaatctgtgccagagaaataaggatccccactgtacaggaaatggaggtgcatagaatggatttgccaaggtcacaaagctaggccgcagaggtgaggggtccgggattctggcccaggctctccatccagcttcccaggtaccagagctcctgccaggacctgcagggacaagagtggagaggggctcagatgcagggctcacagaccgcctgcctctctcgctgacccaccacttgatgccagcctccccgagggcctgtccccatcccttctcagcctttctccctcccgcctctgtgcctttcaaacgccaagccctcactccctccttgatctcatttccaatggagggcaggctgtccatccccaagggccccaaggcctagctctggcgtctgttcctcgcagcctcctcgccctgccgccctccaagctgagggcctcccctggggtccctctttgctccccatccttgctctccttctgcccccactgccacccctgcagagtttattccagttgttcacttactggcttttctcctccagcgcagctctctgagctacctgaggtgagagaatttactctttaaaaagtaaagaaaaacttgattataaaagtaatctatgggccgggcacggtggctcatgcctataatcccagcagtttgggaggccgaggcgggtggatcacctgaggtcaggagtttgaaaccagcctggccaacatggtaaagccccgtctctactaaaaatacaaaaaaattagctggccgtggtagtaggctcctgtaatcccagctactcaggaggctgaggcaggagaatcacttgaacccggaggcggaggttgcagtgagccgagattgcgccattgtactccagcctgggcaacaagagcaaaactccatctgaaaaaaaaaaagtatcctgtgttcattgtaggcagtatggaaactgcaaaaacagataaagacaataaaaatcaccaagagtgccactacctaaagataggccaggggtggtggctcatacctgtaattccagtgctttgtgaggctgattggaggatcacttgggcccaggagttccagactgccgcactccagcctggccaacacagtgagaccctgtgtctaaaaaagaaaaaaagaaaaaaaaaaggtacatatatagtcggcgttataccattttggctgatagcttgatcattttcccaggctcagatacctgccctttttccccaagtgaagtcaggatcacaccgaaaagctttgcctcctgctatttaaaaacctaatataggcagggcgcggtggctcacgtctgtaatctcagcactttgggaggccgaagcgggcggatcacgaagtcaggagatggatcccggctaacacggtgaaaccccgtctctactaaaaatacaaaaaaataagacgggcgcagtggcgggcgcctgtagtcccagctactcgggaggctgagacaggagaatggcgtgaacccgggaggcggagcttgcagtgagccgagatcgcaccactgcactccagcctgggcgacagagcgagactccgtctcaaaaaaaaaagaaaacctaacatatcctgagcattcccatcaccgtccagccttgttccacaacaggaatttaagcgggcggtggtcccgttgcatggatgcccaggtgccgttgtccaggccggtttccagggagccgcagagggagggcaggaggtcgccgcacttggccccgcgccccagggcgtctggttttcggggacgacgcagggccggcgagggtgcggccgtttcaaaatttttttttttgagatggagtgtcactctgtcacccaggctggagtgcagtgacacaatctcggctcactgcaacctccgtctccccggatcaagcgattctcctgcctcagcctcaccaagtagctggggttaaaggcgtgcgccaccacgcccagctaatttttgtatttttagtatagacggcgtttccccatgttgcccaggttggtctcgaactcctgacctcaaatgattcgccagcctcggcctcccaaagtgctgggattacaggcgtgagccaccgcgctcggctcgtttcaaactttacattgcttcttgggacaggaacctcctgagtttgggactaagtttggacagacgcgggcggcgacttctcccaccacttcccggcccccgcccggcacagagtctggctcagagcccggatgtccccgaggggcggggaggggcgggcgggcggggcgctcccgccaaattccggacagcaacagggcgggccggagttctcgcgagaactggcaggcggcgcgcagctgcgggcagctgcccttcccgggccggcatcggcggcacagtgcgcaggcgcagccggcgcgtttctccgggctacagccggcgccgccgcccgctagtccgccgcccggcgccatggcgggctgcgcggcgcgggctccgccgggctctgaggcgcgtctcagcctcgccaccttcctgctgggcgcctcggtgctcgcgctgccgctgctcacgcgcgccggcctgcagggccgcaccgggctggcgctctacgtggccgggctcaacgcgctgctgctgctgctctatcggccgcctcgctaccaggtgcaggccggcgggggccggcgggggccggcggggcgggcggcggtccgcttggcgcggcgcgtgggcacctttctccccgggcccgcagtggcctcccacgcgcgcgctcttcatccgcgagttcaggtcgcaggaggggaccctctctctccgggctcgggcgccctgcacccgaggagtgggttgttaaattgcagcttgtgcagctcagcaggtgcgcgtggggtggagtgagcgagcccgcgagtgcttttatgtaacttaaggtgcagagacctacctgctgccctgtctcaggtcaaaggccccgcagtgacgtgggtggggctgggcgcacaggcccgggtgccctgacctcataaactaggcttaagcagttttcctacagccctgaatagtaatcacgaataataataataatgacagctaaaatgtaggtagcagttagtcttaagtgttttacgtgggtaatccttactgcagtcctaaaaggtaggtactgttatcccctggctgtagatggggaagcaagctcagagaggttaaataatttgggaggccacacagccagagagcggtgggtgcagaatttgaacccaggtcgcccacttctccctttcaacctcagcaaatcggctctatctgcttgcctgtgggttgcctattccgggaaggtcagcagcccagatctgtactctgaggactgtgaatgactgagcttctcttgggttcctttcagatagccatccgagcttgtttcctggggtttgtgttcggctgcggcacgctgctaagttttagccagtct

SEQ ID NO: 3944 - DNA, 6000 bp, Homo sapiens; identical to SEQ ID NO: 3564

SEQ ID NO: 3945 - DNA, 6000 bp, Homo sapiens
aggttaagtatccccacaagtagctactctgtgttcacctcactttatgtaaagtgctgatttactgagcaagagacagacatgtaattgctgattcctctacttgtaccttttctcttgtaacatgtaggttaccatactctccctctttcccctccagccagcttttctttaaatatcgacgccctcaaaatcatctttggagaaaggcacagaccacagactatttctgagattctgcttttttcttctgggcatgtccttaaccttggcaaaatagacttctaaattgattgagacctgtctcagatactttttggtttacagttgctaagccttgctctttcattgagagaatgcttgcccccctccgctccaccaccacctcaaactattatatgaacatgctgctaagaacacaaacacaatttctgcattctactgacgtatttttttttttttaatttttggagatggagttttgcgctgtcacccaggctgaagtgcagtggtttgatctcagcccactgcaacctccactacctgggttcaagcgattctcccgccttagcctcctgagtaggtggggttacgggctcccgccaccaagcctggctaattcttgtatttttaatagagaccgggtttcaccatgttggccagtctggtcttgaattcctgtaatccgcctgccttggcctcccaaagtgctgggattacaggcgtgagccaccgcgcccggccagcattctcttgtttaccatctgcaaatgaactaactaactcacagtacagaagcatgtactgagtgaggcagaagagactccaccatttgcaccaccaggggctttggtagaatatcttcctgttttctgtcctaacagattttcaggcatccatttaatagttctaccagtgagaaacggtttcagctgcaagtgacagaaaacaaaatgaagtatttttcttccctactaagtcaagttggtggtggggagctgggatggtgctccacagggtaaggggccccagctcctcctagcttggtgctctgtcctgtggggcttcaatctcaaggcccaagctggtggcatctacattccaggaagcaggatggagaaataggcaaagctaagagagcaaagtttctggaagctgcctgccatatggcatcttgcatacactgcattaagcggaactttatgtctgtactgactgcaagagcaatggggaaatgtctttattttgggcagccgcaggtcttgttcccaattctattactacagaagaggcactgaccaaatggatttatggatggggaggagaagccattagcagcctgtacaaaagaggcccgtggcaaaactttaaaattctagaacattcctagcagaggtgaggccagtagtgactgaagtcctggtatcattgtctggtcacagaacagcccggagatgtgccagcttgctttgtggtatggtgttaacccaatattttgccctggttaaatttttcttatataaaacatttgcttttcattctgattcagaaaagtaacttttatttctgttttactttttttttttggagacaagagtctcgctctgtcacccaggctgaagtgtagtagtgcgatctcagctcactgcaacttccgcctcttgggttcaagcgattctcctacttcagcctcccaagtagttggaattacaggcgcacaccaccacgaccggctaattttttttttttttttggcatttttagtagaaacggggtttcaccatgttggccaggctggtctcgaacttctgacctcaagtgatccacttgccccagcctcccaaagtgctgggtttacaggctaccacgcctggcctagttgtgttttattataacagtaacagaaacgctcctatttcctctcccccatcctatcaccaagtgattgtcaattttccatcctaaatatccctcaagtgtatctacttctgtcttctccatccccatgctggtccaagtcacattgttctttcacctgggctacggcaaagaccttccactgctccttctccccacttccaaatccagcggtctcttgtcccctcatcagttcacctctggacatccagatggaactttaatttttaattttttttatttctagggacagggtcttgctctgtcacctaggctggagtgcagtggcatgatcgaattcctgggctcaagcgatcctcttgcctcaggtttgccaggaccactcccctccccccagtcccacctcaccgctgccatccccctcctccatctttgagccactaggcttctcacagtctcccaccccgccctgctcgcggagcctgcaggcctcggcctcatggcggcctgaggcaggggcctggaggctggtccgcccgccacgaaggttggggggtccctggccagaagcaggacccgggcgaggctgagggggactctggcagaagctgaaggggacccgggtgaggctgagggggactcgggcaaaggcggaggggaacccgggctgaggctgggggggatctgggctgaggcagagggggaccgaggctgagggggacccgggctgaggcagaggccgagggggacccgggctgaggcagaggccgagggggatccgggctgaggcagaggggtcctgggcagggacaggacccacccggagcccgcaggcccgccaggcagagggactggctgagcggcccgcagcctggcgtcatgacggcctcccgccacgcccccgtccccgcgctcggctccctccagggcggaagcacgggtcgagcgttggtgacgccatggctgtgcttgcgacgccctgtcactggcaggaaccgggtactgcggcccgcagctcccgggatgatcccctctgggcctgagggcctggctcactgtccccgcttccccgggctgggccgtcaaggcggggactgggagtgtccgcgtcccccccagcgacccccggttttagttaccccctcgcccaaaggcagggagaagtggaagatctgggcctagatagaagcaggtgtcatgcacttgacatgactgatgactacaaactttggacgattatttttggggggaggatgggggacggagatgagtctcgctctgtcgcccaggctggagtgcagtggtgtgatctaggtgcgctgcaacctccgcctcccgggttccagctattctcctgcctcagcctcccaagtagctgggattacaggcgtctgccaccatgcctggctaatttttgtattttcggtaaagacagggtttcaccatgttggtcagactggtctcgaactcctgacctcaggtgatccacccaccttggcttccccaggtgctgggattacaggcgtgagccaccgcgcccggccggattcttctttgtgttggattgcacacctgtacccgtctcctcactcccccatcgttgatttcctctccccaccctacccctgcaattaaagtgcattttctttggaaactttttctagatctttgaaataattggaaacctctggtcttgctatgcgttagtcacaagtcagtgtgctaggacagtgatacgcagaagaaaaagacaggcagtagctggtgaaagggaatgctgagttctcccttgtgaatagggacccccccgaccccccaacacacacacacacacagacggccacgctgctaggcttctcacagtctcccaccctgagcaaccctggggatttgctgctaatgcaaggaacagtgcctaacacaggctcccagtctctgcttgtttaaagatgcatgagattcagaatcaatcactaaagtaactggatttacgccacagcaaatagaactgggagtatgttctgtaaagatgaaaacctgtgggacttgtgagactttggattttggccacttgcgctggtgtgccctgtggcagctgaatgagtgccaaacatggggggctgacagtggcctggccttgagatggccggacccggaccagcaggtgtgactcattttccctgccctgcctggaaaggggttcgaggtatttaccaccttcccagtagtgatgaatacacagaaagtaacatccctaggtcattctgagctccttaaaatggaaaataagaggccggacacgatggctcacgcctgtaatcccagcactttgggaggccaaggagggtggatcacttgaggtcaggagttcgagaccagcctggccaacatggcaaaaccccgtgtctactaaaaatataaaaattagccgagcgtggtagtgcacgcctgtaatcccagctactcaggaggtggaagcaggagaatcgcttgaactcgggaggcggaggttgtagtgagctgagatcatgccactgcactccagcctgggacaagagcgaaactccgtctcaaaaaaaaaaaaaaaaaaaaaaaaaaacagaaaatgagaaactttccccaaacagtattacacggtgacttgggcaaaactgactctccaccaagagacacttgactgtagttttcctggcagggagagcatctttgaggtctctagtggcccaatctgttgccctcagattacctggtgtcatgtagggtggaggacagctgttgtttgccatgcgttcctgacagaaataacccttccagtcattcaccatgagcctgactggtagagactttagcaatggggaaataccgtagactgttccatcaggacaatgctgggcctgcagtccccagggggcacccacttacttagccaaaccccagacgtttcatttaaaagcagaagtgaaaggaagaccaggttcctgaaagggttattctgacttaatctggctataaaaatgctattggctgttatttggcatggccaaagtgcacccagaatgtcttctctctccattcagtgcacgcgttactttggctaaaaggaggtgagcggcactctgcccttccagagcaagcatggagcaacaggatcagagcatgaaggaaggggtgagtgtgttgctcagggaaaggggccaagagcaggcttggctgccagggcctgtgcagccttcctggagagtcgctggggggctcctggtgttgcagagggaactctgtgttgggagggattatggtggggagagggggaaagtcttgtccagcaggtggtcttttatagggaggagagaggtttagagacaagtgctctgtggaaatcattctactggaacagcctttaacagcaggatctgtaactgaatggaagagacccaaaggattcatttgtcccaacttgaaccaaacatgttagctgcaaaatccttctatggttggtgagatgtttcgctctgctttcgttttgcttttggcttcagggcagttaattttttcagcaagtaacatagctgagctgcatgaaagcaagataaactcagaaaaggcgttgcttgatttgaatttagttcagatctgtcacgtaggtttcctgccttttagatcctgaggctcccttgttttagagaggaaagattttcatggactcctgcaacgtaattgcagtttactttctagattcccttgattgaggaaaatgcataatgtcagaaaagtaacactgacttattaacactttataagaatttgcatttattcatcacaatagcatctgcttatatttggagtggaggaaggatagtgcacatttttgcaaaacagcatttgttcaggcatggatgtgagaccctcaccataggcagactggaaacatgctctgtagcacatagattaagagtgggtcttgggaggctgaggtgggtggatcacctgaggtcagcagttcgagaccagcctggccaacatggtgaaaccccatctctactaaaaatacaaaaattagccaggcgtggtggcaggtgcctgtaatcccagctactcaggaggctgaggcaggagaatcacttg

SEQ ID NO: 3946 - DNA, 6000 bp, Homo sapiens
tgtcacccaggctggagtgcagttggctcaccgtaacctctgcctcctgggttcaagcgatcctcctgcctcagctcccgagtagctcggattacaggcacctgctgggctaattttttttttttttttttgagatggagtctcgctctgttgcccaggatggagtgcagtggtgcgatcttggctcactgcaacctctgcctccctgggttcaagtgagtctcctgcctcagcctcccgagtagtagctgggactacaggtgcccgccaccacatccagttaatttttgtatttttagtagagactaaacttggagttttgccaagttggccacgctggtctcacactcctgacctctggtgatctgcccactttggccttttttttttttttttttgtatttttagtagagactgggttttgcagtattggccaggctggtctcaaactccagacctcaaatgatctgcccgccttggcctcccaaagtgctgggattacaggcgtgagccaccgcacccagccaaatatttaatatactataaagcaaaattaaattgaaattttaccaaaaggaaggaagtggacagaaatggatttgcaccattctgtccaaccagagtccttgctcctaagcacagcatcattttccttctcgttaattatcccttttaacagcaacgaaatgacctggccggcacacgagaacacagagatgaggccacaccttgtaatttctggggttctgagggggaccctggtggtggttctgggtgctgcggttctttcagtaaagaacttccaggagtttctaatcagctgctttcatcaagattctcataaccttctcctgctgccgctttcaagtgggtttgttcccgagcacattattaggaaagcggctataataactgcttacctgcctccggctccgctccacaaacacccgccaagcccacactgtgcaaaacagtagtaacacgcccgcctgagaatggctccgcggctccgcattgctgcctaagagctttcctgcatgtgatctcatttcatcctcaccgcaactccgggccggggaactcatgtccccggtgaggaagtccaggcttgagatcggcctcaacagtcggaggtggcaaagccagggcttgctcgaagccccaccttctcactgttggggagcaggctgactccaagctgtggaatcctgtgcaggggttattttggtatctgtggggtaatttcacactgaggctaagtcaccgttttgggttcagatggacatgaaattgaatctcagggatccaactttctagcaatgtactctggagcaaatttggtattttcctcatctgtaaaataggaacaataaaagtacctttttttttttttttttttgagttggagtcttgctctgttaacccaagcttcagtgcagtggcgccatcttggctcactgcaacttctgcctcccaggttcaagtgattctcctgcctcagcctcccaagtagctgggattacaggcacctgccaccgtgcttggctgatgtttgtatttttagtagagacaaagttttgccacgatggccaggctggtctcaaactcctggcctcaagtggtctgcccgcttcagcctcccaaagtgctgggattacaggcatgagccactgtgcctggccaaaaataccttctggagagtgttgctggagttacagatgatatgttattgtgatatggtatcagcaacagtcatctcagaaggtgcagcatcttggaaaattttcttgtgtgcgcttcatctactgtctcagatagagtcactatacattcaaaagtacagatcttcctccactagctaacaaagtcacctccttatcctcaagtctatgttcccagttcaggatgggcctgggtgatgcctcattccccatggctccagggcctctgatgctgccactttgtcagtggctggctcagctcaggcaaggcccctctcccagctaaccatagcataagcctgaatcgatccctgtctcagggccatttggaggattaactaatccatcatgggggaaacctttgaaatgtgccaatgtggctgaggctattgtcaggcagagcagaaactgagtttactggttcccccgtttccgagactttcaagctggactcactctcatgtgggtgaaatcccagcaggtgcaggttgcactgagctcaccaagccgtctatctgccccacctgacgctggatctttttgacctatctctgtttctttaagggacagtaagggtgagaagataaagggatcaggattccagacactgaagagcttttgtttgtgtttttaatagaactgaacacattaaatttccccttttggcatcatcagtctatggactgaaaacatagttctgagattatacctttccgattttatgttttgcaaatctcgaaggtccctggaaatctacagggtacatcttttttcaccctctgagatgtgagctccataataataaaacctaactcagcaattcattgagttcatcactatttattgagtacctactctgatcgctggtatactagaagcacagaagccttcttcttgaagggaaaaagaaactcatgtatctagaaacaccaggctctatgtggcactttcatttatttgccacataaagcctggtatttctagatctatgtggcatcatttcatttaattctcacaactctaagaagtacatattgttccatttcgcaggtgaggagattctgaaagttccataacctggccaaggtcgtttgcatttgcagaggccagcactgaagtccagtcccgtctgactagaccatctgggtccttcccactagaatacagtggggaggagaaaaggacactgatggattagtcagtcgacagcacaggcagcagattataaagctgaactgtttggttagagcagctcggggctggagagggagggctggcaggaggacttcctgaaggagacagcccagaagctccttgtaaggacctgaggcttgggtatgggtggaggaggaagtgtgatgttggccctgggaggggaatgaataagaagagacagtggcagacagcatgccctgaggtcagctgggtggaggatgggaagcccagcagagatgtctggacctgacgaggtggcagcagggaggcactcactgagtttataactccaggaggggcagaagcaatggcaacacccgtcaccaggggagaggatgactcaaagccttggctggaaggagtggtgggtgtggcttggagcctgcccgggccaggcaggtgctttgggaagggtccagccaaggagagtccggtcttcctccacgcaggggagggggagcaggggaaggaaggagagacattaacaagatggaatctgtaggctttggtgcaggacgcttacggggaacacggctcagggagttggattccagattgcttttgaagccttccccaggtcacatcacaccgctgttcccagccgttccaggtcttcctgttgactgtaggatcaagtccattcccccaatctgacctcagtctacgtttttgggctctttgcccactagtctcctaaataagtcctctgcgccccacaaaccagtctccacccagcctccagtgctgccagcctcctccacccccacctggagcagtgacattcatggatagctcctccagcggtctcgaaaaatgaacattttagggttccactttttgctgttggtgtccccctaatgcgaacatcctgtccttgagggctgattctttttacaatagttgtcccaacgggggaagtcatttcacctttctgacttagtttccttatctgcaaaatggagccagtagtgtctcatagggtacagtgcctgcacacacgcccatccacggctgttccaggcctttcctccactgcgggggggtgccaggggtccagaggcgaggaggagggggccgctggacgctgggaaattgggaggaccccaagatccctgtagggatccacggtagagggggagggcttctctgtcctctctatccattcggacctccgcatttctaagaaccagcatcgcaccatgtcactgagaaagagcgcgcacaccagccgccttttgaaagtcacaaatagattccttcagtgaattcaggacagactccccgggggcaggtcccggggcgggagccggtgtgggtagtgctgcgcggcccttaactgtttaccaggcgcgtttcgctgacctcgtctcctggaccccctttcgtgacccctctcaacacctctactggggagacgaggaccccgaggttctggggggcgacgcgacctgcccgaagtgacaagggtcctgggccgcactgctccgccggggtctgcgctcctcggcggagcgggtgggaaggatgagtcctcggggtggagaaggaggagcgggtccccgggtaccgctcacccggccttaggagcccgggagcgcgcgtagggacgcggagttgaggctctccatctgcggccagggaaagggatacagtcccccgggcccctcccggccgctcggaacccaccccaggcgcgtccccgcgggcgcgcgctccaggcggggccgacgggctcggaggcgcgcgcccgctgccgggtccgccgcgcgcgctccctccgctcctctcccccgcccctcccgggcccgcgcgctcccagggtccgccgcgcgcgcgcctcgcgtcgctccccatccccgcccctcccgccgccaccccgcccccggccgggtaccctcgccggacccgagagagagcgccgccgccatcttagttgctgccgctgccttcagcaagacgctgctctgaggcggggagggcgccgcgtcctgagcgcgcggcccagcgtcacggcggcggcggcggcggctcctccttggacccccggagctccccgcgccgcggagcagctagccccaggcccctagagccccgagagctccgagagctccgctcggcgtcccgcgcgcctccctgccgctcccgccccgggctggcgatgctgcgccgccccgctcccgcgctggccccggccgcccggctgctgctggccgggctgctgtgcggcggcggggtctgggccgcgcgaggtaagccccggggctgggccgggccgctgggtcggtgcgggattcgggtccgggtgcaggattcgggtcccggtgcggggattcgggtccgggtgcgggagtagggccggatgccgggattcgagccgggatgcggggagtcgggtccgagcgcagggagccgggtcagggcgtggggttcgggttgggggtcgggctcgcggagccggggccagggcgcaggagactgtgggcgcgcgctgcaggcgtcccggggaagccaggctccgtcccgggcggggctcctgagcctgggctgcccccactgcagcccatggtggtggctgcgctgatttgggggaacgtgcagacgggccgaagggtcagtccgccctgctcagcggcgcacgcaggctggggctgcacccctgggtgagatgctctgtgtacgtgtgctcagatgtgcatcaggcggggggtgcacgcacagttttggtgtgtgcttacataagagcccactcctccgcatcccgtttccaagatcccgattctgtgttgctgcaccgcggacaccacgacttcgcccctttccgcctcctcccagagtccttcagacgttgtctgtttccagtggagccgaggctgaaacttagtgcttccctcccaccttttcacccaaaggtgaaatcgcgatgagatttgcgaccgcgggctcacccagtgttagaaatctccgtctctgctacccctggtgccttggtgctgtttttctgacggtcatttagaccgtggagggttagatgttctctacaaaaacgagaaacctctctggtttt

SEQ ID NO: 3947 - DNA, 6000 bp, Homo sapiens
acctgatgcctgttttctcctctctgttgcctctggccaggcaaactgcccagtcggccatcgcatacaactcatgttttcccaggagcctgtctccacgaagagaccctccagggcagctgatgttaaacttcgtggaacacttttttccactagaccaggcagttttccaaatctccctggctaaacactgccagcttgttctgctcaggggaaagtagccaattgtcccgcaaagccatgtacgtgtgtgagtccacgtgtgtctgtgtgcacatgcatttgtgtgtgtcaatcacaccaagtcattggtattaaaatcctgctcaagagctggaggaagggtcaggaaggaggcagaacagctcagcagtgagcacagacctgctgggatttggctccggtgactgcagtctcttgggaggggaggggagaggaaggaaggggccccccatccccaccccaaagtccctgagctgggcactcatggcagcagagctccaggtgtcactgttcacccatcatgagctggtggcccgtggccatccctggcctgagtaccaatggcctcctcactgttctcccgacaaccactcagtacccagagctatcctggacccagcagcctgagcagactccgaaaacagagattccatcacatctgcctttgctccacagccccctcccaaaggccctcatcgcactgcagatgaaacccaaagtcctcctcctgcctgcgggacccagcctcagcgcttttcaaacctcagtgagcaaaggagcacctggggatctcgttcagtaaaaagcagagcctgattcaggagggccagggtggggcctgggattctgcatttctttttgtttttttgagacagagtcttgctctgtggcccaggctggagtacagtggcacaatctcagctcactgcaacctccacctaccgggttcaagcgattctcctgcctcagcctcccaaatagctgagattacaggtgcatcccactgtaccaggctcatttttgtattttttatagaaactgggtttccccatgttgcccaggctggtctcaaactcctggcctcaggtgatccgcctacctcggcctcccaaagtgctggaattacaggcatgagccaccgcacccggcctggattctgcatttctaacaggcttctggtccaggaaccacagggtgagtgtggatcctcgctgcaccgggggagctgagccacggaaaaagttagttctcccaactgcagctcgcctcttcccttcaagcccagaaagcctcctttcacattttcagggacagacctgggatgtgaaatttcaaactctgccctgagttaaattccaggagagggtacaagagcaaaggataaaggctgggggagggagggaaaggcagagaggacgtgtccctgctgttctcactgaagccaggccacacgaccctcagggccagcctgctgaactgtgcacacacacatcacccccacacaaggtctccttggccccatcttcccagggacctcgggggagggcaacagaggaggtgacaagtttctctctgagcagttgatgctgggagaaacgtgtggcttgcagagctgccagtcccacaaaaaccacatcctgaaagatggaccaagtagaaaaaaaggccaccatccacctcaggccagcttctggaactgtcagttcctttggggaatgtctgacatgttctttttccctctgatttcatcccaaaccttttgagaagcaggttgcgtggcattgcacaagttacttagatttactgagcctgtttcctcctgcaataaatgggcacgagcctccctgggctgttaaggaaattcaatcagaaactgtgtaaaggccctgaggcactaaaggccaatttgggttcccgacctccttcccaccgtctgccctccatcccaggcacacaaccagagagatgtaagagggacctaacggttacccagccggtctggcatctgaccggggtgaaaatgcatctctgtatatgagttgcttcatatcttttggctttagtttccccagccataaaagtgtgtttggggtgggggaggaggactatgaccttcacaagcccttttagacttggggtgttaaccttacatgagagaaatgcctggaagaaaagcatggctagttagcaggaacgccgctgggttggaggccgggcagctcggaggcgcagtatcctatctgggccaccaggcggctccgaggacaacagatgagcaaagcccgcttttgcagcctggttctgtcttcagatctttccaggcttcttcgcaggcctggcggacaccagccgctgctgggtgggaaaggcctgtcactcccaggctggaatcgctttcccatttttacagacctcgaagatgagaggaggccgtcaccacaatggattccggccctggggtctgatggagacattggtccgcccttcggtcagactcttgggggcgttaggggggtgggggggtctctgctctgcaacccttagctgaaccccatcctccacttctctcctcccgtctggtcagagtgggaagaggtttggattgggatcccccctcctgcacttcctggctgggtaacctggacgatgggataacagtcccccgattgcaaggtcaggggaaggactgtgtcagaatataggccctcagtgcaggacagttgctcatcctaagcctctcctgccttttgctcttccagtggcttttcacccagaaggaagatcctcccctgcagaacctctccccagaactaggtctttgcaggtgacgaggtaatcccagcctcccctccccgcagatcagcgtttttcgaagtgactttctcaccaggcggagcattgaaagtaccgatcccagcgcacccagccctgctgaatcagaatctctgggggtgaggcccaggaatcgccgtctgaacaagtcgcgggctggaaacggctgccccagattacagggcagctccctgcttcgctctcgctcctccggccccgggaacgtgcaggggggcgggaggcaagtcccatcagcactttgaactggggctgctttttagtgactcacctcccagacttcctgcaacagacaactctaaatagctcggtcccaccctccagcaggggagacattccggtcgggaagggcaggaggttagaaggtgggtgccccgccagggcagtccagggagacccaaggacaggagacgctggctgcacagcacaggggcgcacgaataggacgttttgtttacaggcttttgttattaaggaaattggtgtcagtcaaggtaattctagctcagatgagcaataaatatgctcccagctaatcttgtggggattttattggcactcggagcagaggttcctttaccttgactactccctcccctcaaagcaaagtcctgctccccagcggcttccccctaagcatcgtgaggcacttgggtcaggcttttaaaagtccactctacgtgaacacagaagaggtccgagcaaaggtgaggagtggcttcctgatcctacctggaggccgaggatgaccaaatgacctgaaataaaaccctgggtgacctggttggatcaaggcatacgcaagctcccccgggcctgctccacactcggggtgatcacctggcccgcgggcggcccgggcaaggaggaacgtctcgagaaggcagccggctcgccggagtcggttccagcgtgttcgagttacagctgcgagccctcagggacaccggcggcaagtcccggcttgcagagaggggagccagtcccgggagagcgcgagtcccggcgagcccgagtgcgcgccttatgcgcgctccccgcgacggcgcagggggaggggaggccgcagcagccactcagaggaacggtagtgaagcctcccaacaactttaactgtcaatcagacttaatggggtattgaaaaaatgggggaaaaaggggccgccctctccgcgacgcggctgcccggggagcgaatgaatagggccgcgcagaccaaggcgtccgatccacgcgcgctccacacccggaccctctccaagttggaaaggacaaaaagaaggcaataaatgctaaaaagggagagaaggggagctggatcgagcggcaactcccagcctctgctggaacagagagggagggagggagccggagcgagcgagcgcgcgcgagggcgagcgctgcacgtaaagaaactgacacccggaccccccacttctcctgcacgttgctggcaatcagatcgcgtttaagcaatttcctgagcccaagaatagcaatgagtcgggagactttcgcgggctgaaattgggagctccaagcactttttccccccacttttttttttttttttttttctggagacggggtgggggtgggggcgctacaatttggaatcagcttttttttttttttttttttttttttaatcttgcactttgaaaccgcgggaccgaggcagggtgcgcgcgtgtggttggtgcctttttttttttttcttcccctccctaaactcctctgtcagtctgtaaacattacctgagaattccccagccgaaacggctgctggggcaagaaacttcttgttagaactttccacctccggcttccccctccacctcttttaccgtcccaaccttaggagacgctttttctcccccagaggagaatttatctttttttttttttttttttttctttttctcacccggtgctttgcatttgggaagaggtgatttcaagagtggccaggtgggacgcctctctcctccttattcggtttactatttattgttcggggtgttttttaattcctgtattgctcggcccggggagtttcgccccctgcccggctccgcggcgcggaggatggtgtggaaacggctgggcgcgctggtgatgttccctctacagatgatctatctggtggtgaaagcagccgtcggactggtgctgcccgccaagctgcgggacctgtcgcgggagaacgtcctcatcaccggcggcgggagaggcatcgggcgtcagctcgcccgcgagttcgcggagcgcggcgccagaaaggtaccaggcactgcgactccagggagtggggggccgcaggggcgggggtaagcccacctgctgccgctgcgggatcccgcgcccgggagctgagagtcgccggccaccccacttctccgcgccacccacgagtgctgagctagtcggtttcaccttgtaaatttcccgggcaccggactgtcttttttggcaggttcagagttgatccgctcctttgggatcggtggctggctgactggctattcacccccaccctgaaacctaagagacccaccatttcccacattcctgcctcccaaaggaaggtgttgtgccccccctcccccgccttcccccctttttcttgccgccaccctggtgagtgcagggtgtgcgcactcctgggtagagctgggagccgcctgctagctggcgcctcgtattttccttggcaacccgctacccagccccaacctgggcggctgcagctctgaagacacgagagagggtacttggtttgggtttgaaaagggaagagcggtcttgtatgcagtagtctggccggaccgacactgagaggcccaggtgtttggaaagcaggaaagaggaggccagggtaagcagctactgataaagagcccttgttctcaccttcaaccctgtcccctcccccccagtacaccccccagggatccctccccatttagctggaaggtggtgctgcaaggagggtcctgcccaccaaacacggcctttaactttttggtggtcctggcaccccttgctccaggttttggagacctggtgccagagtggggagagtgggcaggctgtcacccaactcccagcccaggccaggctgactcacgcggtgaccagagccat

SEQ ID NO: 3948 - DNA, 6000 bp, Homo sapiens
actttgggaggccgaggtgggaggatcacttgaggtcagaggttcaagaccagcctggccaacgtggtgaaaccccatctccactaaaaaatacaaaaatgaactgtgcatggtggtgtgtgcctgtaatcccagcaactagggaagctgaggcaggagaatcccttgaacccgggaggtggaggttgcagtgagccgaggttgcgccactgcattccagcctcggtgacagagcaagactccgtctaaaaaaaaaggaaatgaatggaggaaactaatttagaatgtcaccatcaaatgtgagcatctaaggccaagcacagtggcttacgcctgtaatcccagcactttaggaggccgaggagggcggatcatgaggtcaggagttcaagaccagcctgaccaacatggtgaaaccctgtctctactaaaaatacaaaaattagccaggtgtggtggcgtgcacctgtaatcccagatactcaggaggctgaggcaggagaatcacttgaacccgggaggtggaggttgcagtgagctgagattgcgccactgcactccagcctgggggacagagcaagactctgtctcaaaaaaaaaaaaaaaaaaaaaattagcatctattgagcagaatgtgtggggaactgttctacctgttgctggattcataccctgcctctgagggatttacagtctagttgagaagatagttcagaggctttgaaaaacaaaaaagagttcagttggttgagagcagggtgctggtaggcatgtagcatggaggcccctggggctctagggggggcctgatccctgggggtttcacccaagaggtagtaattagactgaccttaaagatcccagctgcggagagttggcacattccaggacggggcactgctctccaggttcagtggaattcagaggcaatggttgaggcaggtacccatgagagtgcgcgctggatctagcctgtctgggccagaatgccagctccaaattttacttccaaatttgctcttctgcaaaatgtgggcaggagcagtggccacctccctgaaggtgtcatgagaactaagtggatcagtacagataagtgcctagaactgggcccggcacatagtagtgcttcataagtattggctacagtttttttctttgcttttctttttttaaaaaaattttgttttgaaacagggtctcacttggttgcctaggctggagtgcagtggtgcaatcacggctcattgcagccttgacctcctaggctcaagcaatcctccttcctcagccgcccgagtagctgaggccacgggtgctcaccaccatgcccagctaattttttttcttttttcttttgtagagatggggtctcactgtattgcccaggccgcattattttttttctgatgctcttggccaaaggcaggcacagatcaaaggtggggtaagtgaggccatggcttcagcattcacctttgtcatctccttgcccccagtacccagccccagctaagtcctagcaaaggtgggcccctaagcaggctggtgggccggaggcagggattggcaggagaggcagtcacacacaaacacacactcactcgggctccacctgcctgtacaggagccttgtctgctgcagtggcgctgaggccctgagggctccttggggcctttatggggtaattccatctccattagggctgattatgtcactataaataccgcgttttggtgccgctttataagactcactgaagaactttcctccttagcacccagtcacctagagcgggaaagactctgagtcggacaggaaaagagggaagggtgtgtcattaaatgggtgactaaaagccagggaaaagccaggtggaacaccctcttgccaccacctgacataccactcctttccataggcctctgttcacgtcacatgctgcagatgagcaacaccctgccctatgctctcagcccccaacttgtgcacatactgctgggcacacgccccacagccatcagggcctgcctgcacccctgccgtgtgtgtgcttggattcaaccttttgaggccacacatggaaacccacacttgccaccagaaggaccaaccaacactacacacagagactttcacgcaacacagaactcgcaacactgtcattcactcattagttcattcattcagcggaggcttgctgaatatctagtatgtatcaggcactgtctgttttctttttttgtttttggctctcgctctgtcacccaggctggagtgcagtgccgcggtctcggctcactgcaacctccacctcctgggttcaagcgactttcctgcctccaactcgagcagctgggattacgggcatgcgccaccacgcccggctaatttttgtatttttagtagagacggggtttcaccatgatgacaagcttggtctcaaactcctgacctcaagtgatctatctgcctcggcctcccaaagtgctgggattacaggcgtgagccaccgcgcctggcccaggcactgtctgttttctacaaacatccctgtcctcctgcagtgtgtcctctagtgacacatctgacagatggagcctgcaagtggcatgtaacacacatgtacaagcagtggcttccacacaactcacatggagtcttacacacgccagtgtccctagcccagaggctccaatacaacatgcaaaacacttatccaaaccacgtactacacacatgctcacactcatccacacaccccatgtgcctgtccacagagccctgggcacaacacatgccctgctctccacggatgtggcttcctgttgctgaaccgcatgtaacccagtaacagctgagatttcatgcgtgctttctgtagtcctggcccctgtggtttacatgcatgactttatttgatctttacagtaactctcctaaataggctttacatctttccaggagcaaactgaggctcagaaaagtgaaataacttgttcagaaactcatgggctgactccacatctactgtgaagtatggcacactcacaaatacatgcatacacaaatccacactcacatgcactcatacacaaatctctcacacccacatgcacactcatacacacatctagacacatccacacaatccacaaaaacacacacagacacacactcatacccaaatcctctcatgcccatgcacacacacttatacacacatataccaacacttttttctttttttttttgagacagagtcttgctggcccaggctggagtgcagtgagtggcgcaatctcggctcactgcaatctctgcctctggggttcaagtgattctcctgccttagcctccttagtagatgggattacaggtgagtggcaccacgcccagctaatttttttgtatttttagtagagacggggtttcaccatgttggccaggcatgtctggagctcctgacctcaaatgatctgcctgcctcggcctcccaaagtgctggaattacaggcctgagccaccctgcccagtcacatacaacacttatgtccatacacacactcacacacagtcatacatacatcaacactctcatgtctatacacacgaatgcacattcaacaaaatctcacaccctcatacacatgcacttattctcacaggcacttgcacactcacaggctctcagaggaccaaggctctcctcccatcctcttggtcaaaggctttaattatccccaacgcctgtaattaacccttcctctcttcctgcaggagagatgtctggacccgcttcccaagagtaggcaccaaggcgagaggccaagatgtccacatccggcagagaagacccacgtacctgggtagcaggtcccgggcatcaaagcgaggatggggtcagagaggaagaggtaggcaaagggagtctggggcctcccaggaaatcaggcctgccacagttgctcttcctggactggtcaaatggtgattggccaacaggcagccgtgggtggctgggcaggcgggccagagcaaatttcccgtttgtttcactcacactagccgcttctgtcaggaagggagatgagctcatgtctgaggaagttttgtgaagaggccttatcaaggggcaggtggtaggcaggtgtcctccaaactgtcaaaacctatcaacccatgccagggtcgggggccaggggtgccccttgcccccttccccaaaaagaagcagtggttcaagcagagaccaccaggattcaaatcctgcttctactacccgtgagctgtgcaccctttgggcatgttgtttctgctcttggagcctcagtctcctcttctgtaacatggggatgatgacccctgcctcccagatgagaattattaataaataagatagtgcatgtctgatccattcccagaggaaatgaacctattctcagatcatagtaggcttataggcttctgaacagagatactctttttgaccatcagcagcttgatatactcttcaagggttttaggaaggagggcatccaggtctatttctgggccactctctcaggcctgctgcttaggaggcaactgcttattggacccccaatccatttcagctcagaccttcaggccagcgttgagctcagtcgcattgagctcagtctcagaggtgaagggcagaatgggtatggctcagcgcaaaaccattaaacgtttccaccgaggataccaggctcagagatccctgggggctaatccgtaggggcgctggcgctttgagacgctcaaactttggaaggcctgcggggagcccgcgagtccagagggccccaaggtcctcctccaaacccctccggacttcccctccctctcctccgggtgccagcccggcccctttaaagacattcctgagggcgggcgttggtgacgtcacgcagggcatgaatgaacaggagtcggttctcacccaacttccattaaggactcggggcaggaggggcagaagttgcgcgcaggccggcgggcgggagcggacaccgaggccggcgtgcaggcgtgcgggtgtgcgggagccgggctcggggggatcggaccgagagcgagaagcgcggcatggagctccaggcagcccgcgcctgcttcgccctgctgtggggctgtgcgctggccgcggccgcggcggcgcagggcaaggaaggtgagtgcgcgcggcgtctggacccctggcccccgggccccagtgccccctagagcccggcgctccttgacgcgcgcaactttggaacctacctggtgtcgcccagtcccggcgaactggagtccggagggcgcacgggctgcgatcgaggcgagccctggcccccacccggggtcataggggctccggagaataagcggtttcagcttggtcgcacgggcctcggaggctgcggagaagaggacgcggcgcaggccacgcggttgcagtccaggcggcgacttcgggaacgcgtcccggcggggggcgtggggagtcccctagagaagggggtgtttgggcagctttccgcgggctcagcttcttagtgacctgaattcactaacccgcttgccgaggttttgcggagaaggcatactgtgcaggcctcgcattttggggagggggctcgggcgggcgggagccccctgtcgaagcccctgttccctgagattttctccacgccccccttcacctccagtcccgggggagagcgtggagataggttcgggccaatccctgctcacacactcctttccctccttcccaagccgcactcccgggctcccggggcaggttaggggccgcgagtgcggacaggaagtcccaaagtcaagcgttctgagcaagggtgactcagaacgaggaaatgcggcaggtgggggtgcggcctcccaaggtgtggagctgtcagcccagggccaccagggagtcaggacacccgggggtgggggactgaatcacccacccccgccccagtgtt

SEQ ID NO: 3949 - DNA, 6000 bp, Homo sapiens
gcctcccaaagtgctgggattacaggcatgagccaccgtgcccagccaagacctcccttatctgtgtgtgtgtgtatgtaaaaatttttggaactcctgcttaagagcactgtggcatgggtgtacccttatttaaccattcccctactaaggcacattcgggtggtccctattcaccttttcatccaaggctgcttttttaagtcgtagctggaaacctctggatcatccggaaaacaaaggtttcatgcatcctgaggcaagcagctgagaaaacgtgtgactcaccgagaatgagccttaatgagcattttctggcttaaagggctgattcaacaagcatctgtctcaggcattatggaaggtgaggtgctggggacaaggatgaacaagatttgttgcctgcctgccacctaggagccaaggtcacaaaggaaaaaggaacaaacatcagaaatttcaagaacagggccgtgtgcccctccctacagcatcttggaattcttgactatctcagtgagacacacagtacatggccctgcggcgctgaagcctaagattgtggagtgcactggcttcttgaaagacagtggaacttgaactgcgggccatgtctgtggatagcttctgttccccagctcagacctaatggctttctatcagcctggggaaaggtcacattccttggattcatggataatttgacttggcttctaatctccagatctgtagggaaagatgggtttttctcatgaatgactttttttttttttttttttttttggagtctcgctctgtcaccaggctggagtgcagtggtgcaatcttggctcactgcaacttccgcctcccaagttcaagcgattctcctgcctcagcctcccaactagctggggttacaggcgttacgcagctaatttttgtatttttagtagagacagggtttcaccatgtttgttgagcatactgatctctaactcaagcgatccacctgcctcgacctcccaaagtgctgggattacaggtgtgggcaagcacaccctgcttctcatgaacaacttaatgctttgtaaagatgggtccgcaacaactgataagaggcagggtgtagcttaggagtcgccacttcagatcagcgtcatcagaggctgggttgactctgatggtcactctccgcagttgaactccaagttaaattggtatatgttatcaactgatagtttaatttactgcttaatctttcattgaattggagacaaatgttctattgcaacagtcacaaaggcttttccagtaaaactgcagacctgtgtggggaacagtattttgtcctgtatgctacttctgtgcccagtgtgccttcatttacaagataatacttccagcctggccctgtggctcacgcctataatcctagcgctttgggaggtgggaggattgcttgagcccaggagttagaggctgccgtgaactaggatcgtgcctctgcactccagcctggatcacagagccagaacctgtctctaaagaaattaaaaataaaaatagaatttcgtaggactgaagccagccatcccttcttacctagctctggacatgttgaacatctgtgactctattttcctatctgtaaaatgggaattaacagcattcccctctcagaattatggttgaagtctaaaagtaaatgtgaaagcatcttgcctgcagtagagtaaatgctccataaactcaagtgaacggatttgtcttgagtacctactatgtgaaaggccctcgagtgaatgctgggaggctgcaagagtaattccttcccaaccctgagttgacagctggcatgtttctgacatgactggccagagctagaggcctccctgttgggaggatggtttttccgtgcaaggctaatattgcttatttctcatctctcccgtcacactgctcaggtcagggagggactcccattggtcaaattctcttcaggccccttcccttcctggcaccaggataactaccatacaaagtgctgaaactcggccaggcacagtggctcactcctgtaatcccactttgggagaccaaggtggatctctgaagcacaggagttcgagaccagcctgggtaacatggcaaaccccatctctacaaaaaaaaaaaacagaaaaattagctgggtgtggtagtgctcacctgtagtcccaggtacacagaaggctgaggtgggaggatcacttgagccgaggtgggaggatcacttgagcccaggaggtcgaggctgcagtgagctgagatcatgccactgtgctccaacctgggcagcagagagagaccctgtctcaaaacaaacaaacaaaaaaaacaaaaacaaaaactgaaaccccactttactgtgtgtctagacagccataatcctaccaacagggtttgttactaggtgaaaaaaatcctcttttgttgcaaaaatctagtgaaactagagaagtcgaaaagtaaagcaatgctctggaataaactcgcccaaattagtgatttctcaagctttttgccactgggaccaggcctattacgccctctccgtgggttcccaagagagccacagcctagaagggaagctgttcagtcggttctcacccacgtgggactggaaatttcagacacggttatccgggaagacagcctgggccacagacctcctcgatgaccacacaccgagagccacttccccaaaggtaaccccaagcagatggcaaggcctcccacatgctctgtggtttggaaggaagcttcctctggcctcctccctcattaaggagaagggacgagctgcaggtgcggctccttcccagctggctcagggaatagagcccctttaaggccaggcagccttagcaataaaaagaatgaagggggcacccttgcaaggcagtcccccatgcagtccccaagccctctgcttttatttatttatttatttatttatttatttatttatttattttagagggagtctcagtctttcacccagactggagtacctctgcttttatgaagccgctaatccagtgccaggatctaaagcaagcagctggcttctaccaagttcctgccatctcatttcatcctctccatgccttccattttgtaggtgaggggaaggagagccttagagaaggaaagtgacattttaaagctcacacagctagaaagcaactcatgcatccatgtctttctgatgccagaacccagccccttgccactgtaccatactgcctcttgccaaggccacctgggctagccatttccaaacccagccttcctgctgccctggaggctgggttcctgccagaaattgagctaagccctgggggaggacatgggagttctgaaaagttaagcagcctgcctcccctggaagtgtcaccggaagatgaaagaactcttgtcacctgacccaaggaagccagtcccatggcccaggtggtcaacaggaatgacccgcaactggttggctcgggcagcctgccccagctgagtaaatggctccactggcacccagctgctcaggccaaaaccctggggagcatcttgaattccacacattcctgcacccccacatcctatccaccagcaagtcctgccaacgtgtgttcctgtaccaaatgttcactgggatcttgctatgaatcaggtgctgctttccctcctggggtctatcccctacccacaccctcaccaccatcacagctgtgtctccttccagccccttccacaatagggatcgttggagttttcctttccttgactagggctacttcccagtagacagcagtctccgcagggacaggggcatctctgttttgttcactctcacgttcctggctcccacagtggtgctggcactccataaattcatactggacaaatgaccagtgatcctgcccacgtctatccttggccctaacgtgaaccttcccttgtttgccctaggatctcacagatccactctcccctttggagctcctctgtccagaggtcctggagacagggaacactatgcctgtgccggtcactatggggtagcaggataaatgctgcacgcaggtaagacatctctggtgcctttcaggggtcttcatgaatccccccagtgcaggtgtgtctgcaggtcacgctgtgaggcttctctttctctggcatttcaaggcctccagtgcatcatggcagactctccctgggtctctgtgggcccacatctgaccctgtgaatctctgggcaggtgtgtcttccttctttgcattcatcaagcagcgccaggcactgtctcaagtgcttgatacgcattttcttttttttttttttttgagacagagtttcgctctttttgcccatgctggagtgcaatggcatgatcccggctcacagcaacctccgcctcctgggttcaagcgattctcctggcttagtctccgagtagctgggattacaggcatgcgccaccacgcccagttgacaagcattttcttgtgtgatcctcgcagcagttctctgtgaagcaggcattgctatcctacaggttgggaaaagagggccagagaggatcagtgacttgctcacggtcgcgcggcctggaagacatggagagctggaccagcacgcacagtccctaaccactgggacgtgctggcgggggctacctccgtgaggtgtgtgtctccggtcgccccgcccccggtgtgtgcggaggagcaggcggggactacaagtcccggcagccccggcgcgggcgctgcgagggccgcagagggccgggcggggcttgcggcgcgcacggagggactgcggcagtgtcggagccgcgccgagcctggtggcccaggtgccccgcccgcgtcagccctgctccagccccgcgctagcccagcgcccctcgccccgggccgtccggaccgcgcccccgcccagggccttgcgcacgccggggcccaggccgagggccgcagcgccggggccggcgatgagcgcgaggagccggcatgagcgcaggtgagtgcggagtccgggtcggccccgagcccggcgcggtccccggcccgccagttgtcgtcaccccttggagggagaggggaggcgacgccccccaccgcggggtcgcgagcccaggaagcgggacctggttggggatcctggcccgtcccctcccttttgacggggactcggccccggtttcttcccagagacgccggggctggggatggcgccgccgctcgcagccggtccctcccctcccctgcacccctcagccgcgggattggaagccgggcgcttgtgcaagagggtcctggggccgtgcggggacggggaggccaccccacgcccacttaatcggatcccaccccgagtgacggatgtccaggtgggggagacggctgcatcctcgggcctctgggcaacccctctgggctgaatgaatgaatgaatggcgttgggggagtcgggactccatttcctgggtagatgtcctgggccacagcgccactcctgacctcctgcctcagaccccagagaaaacccgtcacacccagggccaagggccacaccctccatgcaacccatccctggccagatgtcctacgcccactcctccagggtctaatttaaatcccacctgccgggaatggggccagtcctcctcccctatccagaaaggtctcatctcagtgtctgtcactcagcccccagccccacagcctagagtgcaccccccggcgagggaggggaaggaatgaggaaagacagcccctagaatccagatccaaagatgggaagatggttcacacacactcccgcctcagcctggcagaagacaggagctccccgccgccgggaaccacagccagggaggaggcagccgccctgggccgctgccaggtcaccagcaggaagccaaggcttccgcaggaaataagaggtcccaaatggctctagcccctctgatccac

SEQ ID NO: 3950 - DNA, 6000 bp, Homo sapiens
cccggctaatttttgtatttttagtagagacgggtttcaccatgttggccaggctggtctcgaactcctgacctcaagtgatccacctgcctcggcctcccaaagtgctgggattacaggcacaagccactgagcccagcctacaaaattctttttaaaagtagctgggcatggtggtgcatgcctgtggtcccagctactagggaggctgaggtgggaggatcacttaagcactggagtgcgaggctgcagtgagccatgatcatgccacagcacttaaacctgggtgacagagcaagactctgtttcaaaaaaaaaaagaattaaaaacaaacttgcagatagcaataagttatatgaagaaaatcaaatagagtcaagtgggtcaagccctcaaattgcccatagtctggggaggcagacatattcatgggtcattgttaaaacaggtgttgcatgcatggatggcatatgcagaggatattttgatagggacaatcaaggagggacttcctaagggaggaaaaagttggagctgaatcttcaatgatgacaagtcaaccacatgaaggaggaggaaaggacactccagatccaagacacggacgtacgcaaaggcttggaggtgtgaaatgaggcggggaatagagcaggctgtattacagggacagaagtaactggaagggcccgcgggggagccggggagccttggagctatggtgggagttgatggttgattggatatggggtggggagaagaatcaagatgacatcgagtttctggcttggatatccggtagatggtggtgctaataagacaagtataaactcctcaggtgagatgtaccgtttgggataggttgggtttaaaggaccattgggacgcccagatggagatgctcaggagacagccagggagacggaaaggacgaagcccactggccaaaggcaaataaaatcctaaattttggctgggcgcagtggctcatgcctgtaatctcagcactttgggagtccgaggcgggtggatcacgaggtcaggagatcgagactgtcctggctaatacagtgaaaccccatctctactaaacaaaatacaaaaaattagccgtgcgtggtgacaggtgcctgtagtcccagctactcgggaggctgaggcaggagaatggcgtgaacccgggaggaagagcttgcagtgagccgagatcgtgccactgctctccagactgggcaacagagtgaggctccatctcaaaagaaaaaaaaaatcctaaattttagatgagaaggccccagagctccaccacagcaatctgttgctgtgggtttttcccagaggcaaatgaatctcccaggcaacatctgatatttcctcctaaatccaaccctccttcaccctctggctggcagaaatcatccaggttgccctaaattacaagacaccagactacaattgattgtacaaatgacagttgatacaacataatgcttttttattttgttattttcatttttttgagacaggttcttgctctgttgcccaggctggagttgcagtggtgtgatcacagctcactgcagcctcgacctcctgcactcaagcaatcctcccacttcagcctcccaagtagctggtactacaggtttgcaccaccatgcttggcggattttaaatttttttgtagagacagggtctcaccatgttgcccaggctggtctcgaactcctgggctcaagggatcgatcctcccacttcagcctcccaaagttctgggattacaggtatgagccactttgcccagctggttttaattttcaattctggacatgatttccagctcttaggggagaaagacctcctaaagcaaaacgctcacctaaggctgctcagttttcctgctgtccaaagactgagagagtctggaaaacaggagcagcttttccaacccaaaagtgtggttatgaggactaaatgagactgtttatgtaaacacctttgcaagtgataaagttcagtataaacatagtgtctagcagactgtctggtgaaaagcaatatgtcactctctagacgaatggaaataaaccaaaaaaacctagggtcttatcatgaggacatctttggaaaatatgtcaggatcaggccatgaaaatttctaagtccttctgcagctgtgactttctggcatcccaaagtccagggcggaggtacagccgcccaggaatttattcctccataactttgagctccccaaatccccacgaagcccaggaatgatgtgactgcagggcatgtgggcccattggcaccaacagcccctccataaatcaaggtctcacttatgctggcctcagactgctttttccaaggtgacctgggcaaactgaaagggtagttgcttatctaggggtggcatctgcctttgagatgaaagaaccctgaaaatgctaagaggaccaattctctagaaatacattcctttcaggaagagctttcttcagctcagacgacaattcagttaggagttagagacagagcggcagtcttcccatatctcagccagtttgggtgacccaagaggccccatggggcagaccagaggggccctgttccagtcctgggtcagcaccagtgaaagtcaaggtgacctcagcattgttaccagttatccacaagacagccacgtgaatcacagaatcttaaatcagagggcccaacaccctaatggttcaggcaaggaaactataggtcaaagatggggaggggcttatccaaggtcacatggccttgaagagaatattccaggttagacctagaggttcaggcctcactacacaccccctttaatgaggccacactggcggtatagcggggttccagtcaaggactccagaaacagcccatccagccaattgacctggccatctcaatgtctccagtagcatccacatcagctgtgagagtggaaaccaaagactatagaaaggcgcccttcacatgtccaaaacaagcagacagaaaggggaaaaaaaaatcactcctacgaaaccccgggacctgcaaggttaacaatctacacaaacgcgtggagtgactgaagaggcaggtgccttggaggctccaggccactcctgcccaaggtaagtcccaagagtgaggccagctctgagcagatccatggagggggctggaaaaagaagctgagatgtctaaaatggaaactcagtaaaaaacaaaaccaaaaaactttcttcacagaactgctgtggggattaagtgggataatggaccataatgtttggcacagagtagaaatggtttcttatattaaatggctaacaaagccaccaaggactgggtgtccttctctgggcacaccctctcgtacagaacagagctcacagtgtctagctgtctgctcacttgccgtctccaccactagagagtaaattcaatgagcagtgaccacctggcttgctcattccctgcagcatcccagcacttggtgcctgccacatagtagccactccattcgtatttatgaatgaatgaatgaacgaacaaaagaatggcacctttgccagccacccttgaaatcacctcagctcattcaccaactgcccagtttgtttgggactctcagtgcagaaacctgggcagcctcgggcaagctgcacggtatgcgacagaaagggctgactcaagccagtaagcgtcagagatgaataataagactgacaaattcttagggaggctaggtgtggtggctcacgcctgtaatcccagcactttgggaagttggagcaggatgattgcttgagcccagcctgggcaacatagccagactccatctctacaaataattttttaaaaaaattatccgggtggccgggcgcggtggctcatgcctgtaattccagtactttgggaggccgaggtgggtggctcacgaggtcaggagttcaagaccagcctggccaagatggtgaaaccccatctctactaaaaacacaaaaaaattagccgggcatgatggcggacgcctataatcccagctactcgggaggctgaggcagggaattgcttgaacccgggaggcggaggttgcagtcagccgagatcgcgccactgcactccagcctgggagacagagcgatactccatctcaaaaaaaagaaaaaaaaaaaaactacccgggtatggtggctcacacgcctgtagtcccagctactctggaggtgggaggatcgcttgagcctgggaagtcgaggctgcagtgagccaagactgcacaccggcctgggcaacagagtgagaccctgtctgaaaaaaaaaaaaaaaattggccgggcgcagtggctcatgcctgtaattccagcactttgggaggccaaggtgggcggatcacgaggtcaggagttcaagaccagtctggccaagatgatgaaaccccgtctctactaaaaatacaaaaaattagccgggtgtgatggtgtgcgcctgtaatcccagctactcgggaggctgaggcaggagaatcgcgtgaacccgggaggcggaggttgcagtgagccaagatcgcgccattgcactccagcccgggaaacagtgcgagactccatctcaaacaaacaaacaaaaattccaggaataaagaggttgaaatcggggcagggacccggataggatggctccgccccatctaagtcttagccccaccccctgaaagtcgccctgcctctcagactcctcccctttctgagaaggtcacgggggaagccaaatgggcatgcgccgctactgcgctattgcgcacgctcgctgtgcttgccccgccttccctccgcccacccgggaaaccggaagccgcctcccacttggttgctcgtacgcggctagtgggtcctcagtggatgtaggctgggcgccgcgatgttcgacgggacaccggcggagagcgacctcggggttaaggggtggggctgacgtcaggagccaagatggcggcggtggtcgccctctccttgaggcgccggttgccggccacaacccttggcggagcctgcctgcaggtgagtcctggagcctcagagagggaaaagtcaggaaagccacagagactgcctggagctgatggggctgcggagagactgaggaagcatagggcaaggcctcagggagatggaggacctcctccccctggtgcagtgctttggtttggcttcgagcatccctgtcaagttatctttctgcgcctcgcagcagcttgtgagttagggcacgggcaattttttacagctaagggtgcgggggggggggacgttcagaaaggggacttgaattgctcaaggtcacatggcaagcgaatgactgctggaaccagaatttgaatccagacattggagttccaagccctttttctgccaccaaactatcgcctctgtagaaaagggagacctgcggggtgtgaaggatgggaattgggaagcgaggtaattcctcaagggtgcgaggttgaggaccgggatgggtgaggaaaggacatgtgaattgttggggacagggcaggggaagggagagatggagggaaatgcacccagccccctacctcgaaggatcccggaggtgggtggtgggggttgcaggaaagactgggttccttaaagcagtgtcaccacagtttcactagtatcctctcagtgtttctgactctaaaggtcatataataatacggacctcatagagttgacatggaatgacaggtagagggcttggcgctgttcttgtttattactatgccgtgtgcagtaacagattttcccacgccccttgtatggccaagaaacaacacatttctgacctgccttctaagtgggaacatttagaaggggaagggaaattgcttttgtatacataagggactaaggatttgcaaatcctttctaagtctgttcctcttctgggattctcaacaacccctttaaggtgggcaagcaaga

SEQ ID NO: 3951 - DNA, 6000 bp, Homo sapiens
cgctacaggctcatgctcagtcggagcaacagtgaaaacattgccagcaactacttccgatctaagcgggccagccagatcctcagcacagacgccaggaagagcctcagtgagtgtccctcccctgtccccaccctctccacacaactgggagaggcgtgaaggggatagttttgaagtcagacaggcctgggttcaaaaactcctttccctctcggagcctcagtttccttagctacaaaatgaggggggtaacaccaacttcttaggattaggtgatacgaggtgaggaaacggcccagcccgggcgctggtgctcagtacagagtctcctctttgctccagtcttgtctcccctggcccctagtaggcactcagtgcatggctcaggggcctggctggggatgcacgggtttaggcctcactagttacgcgccagcttcctggcgagtcacacgccagcattgtgacttcctccaaatgcagattgacttcacttatcaagggccacaaatgcaacacacgcttttaagaattaagcatcacttcattttatctgcttttaaaactgaaagcaaagcccgcagagcttccaataaaatagcaataaaaagcaaatcttggccaggtgcagtggctcacccttgtaatcccagcacattggcaggctgaggcgggtggatcacttgaggccaggagttcaagacaagcctggccaacatggtgaaaccccgtctctactaaaaatacaaaaattagccgggcggtagtggcgtgtgcctgtaatcccaactactcagggggctgaggcaggagaatcgcttgagcttgggaggtggaggctgcagtgattcgagatcctgccactgcattccggtctaggcgacagagtgagaccctgtctcaaaaaaaaaaaaaaaaaaaaaaattagctgggtatggtgatgcatgcctgtaattacagctacttgggaggctgaggcatgagaattgcttgaactcgggaggcagaggttgcagtgagctgacacagtgccactgcactccagcctgggtgacagagtaagactttttctaaaaaaaaaaaaaaaaaaaaaaaaaaagagcaaatttgagttctatatattgaggttatttaagagacagaatgggtggggcggggggaataggattaattgagtgcctggcattgtgcccatgttgcagatgaggaaactgaggctcagagacgaagcagcttctctaaggttgtaggaagcagtggagctgggctttgaacccagacttgtctggcttgagatcccaggctgcctcagtctgatgctttaaaaccccagctccccagcccagcctctttggatgcagacatagttgctgggtctgagacctcagccagagcagcctcgcagagcctggggtcccagctgcagggccagggcctctggctgggcaggggggcgggagtggggtgggccaggctctccatcctacccacttggggcattttctctccatccctgcgctcctggcttaccagcacctctgccctcttccccacagcacatcacaactcgccaccaggcctcagctgcccactcagcaacaactctgccatcccacccacccaggcccctgaaatgccccagccccggcccttccgcctcgagtccctcgacatccctttcaccaaggccaagcgtaagaaaagcaaaagcaactttggcagtgagcctctgtgagcacagctgcttgccattgcctgccttataggcatgtagagactgccaggccctcccagggcagccccaaccaggtctcctcccacctgccacacagcgctccggggcctgagggctccctcagccctgggaagacacattcccttccctgttccccagagagcccacctccgccctgggcaggagcccctcggaggctgtatagtcctccttagagaggcctgctccagctgttcataccacatcagtgtttccgtctgctcacctgccacagagcccacacccatgcccaccagtgttggtctttgcctcaaagcctgagacctgcttcacggccttcaccagccctgatggagagggcagcagctgccacgtggaggaagctcaatatcagctgggaaggaactgtgcctctgtctgactggccccacttcctaagcactgccctgccccatggggtggcacaggggtcccacagcaggtcttcctgcactgcccacccctggctggtctgtggcccaaggaaggccactccacattaagctgcccaataaactgcttttaagataagctccccttctctgaccctctgacagtgtcacttggggcccctccctgccattgtggcctggctattccagggaagttctttctggaaaaagggttcttttgcctgggacctccagggtttctgcagctccctataatagtgagtacattcttctgggaagagcgtctgaattttcattagattctcgaaggacctgtgacccaggaaagcaagaccccttgttgtggaaaatagggccatgtctcactgaggccagaaaagggcccagcttttgacagtcctgggggctgtgctgggactgggtgtcctgatatagccagaaatgaatccaggccaccctgtttgtgcccacataggggggtacctaggacacagccttccccttgcacactctatcccaggccagtcctgtggggggctccacaatctaagggaaaaggcttggcctttggcacagtcctggaacctcatttcactctgagcctcatctgtgaaatggggataacgcccacctcacagggttaatgtgaagattaaatgagatagtatgtaaagctcctggggcatagcaggtgctctgtgttagtcctcctcctccctattttgtatcaatttctatggcaggccccacaagccacatgcctgggccaaggagcacacactcttgagaagctggggtgggggtgtttagacaactacagagatatccagccagaggcaggcagcagtacgtcctgagtcagagccggtgagatcaggtcttttaaaaattatttttattttctttgagactgagtctcgctctgtcacccaggctggagtgcagcagcgggcaatctcagctcactgaagcctccacctcctgggttcaagcgattctcctgtctcagactcatgagtagctgggattacaggcgcccaccaccacgcccggctaaattttttgtattagagatgcggtttcaccatgttggccaggctggtcacgaactcctgacctcaagtgatctgcccacctcggcctgccaaagtgctgggattacaggtgtgagccaccgcgcctggtcgatatcaggtctttatggggaacaaagagtgcctttctgaagggagcagtgctgggtggggctcccagaaaggatggagaagatcccaggaggtttaagatgggggtgtaaggagggcgctcctggcggagagcgctgcaaagcaaaaggcaggaggtgtggaactcagggtgttaaaggctgggccattcctgttccatggaagccctgagcaaggactgagaggggacgaggctgctgagatgagtgtaggtggagacctgagagcaaagagccttggggtgtccctgtgccgtggccgactcttaacagtttaacactgttggctctgaattagaggcgggcggatgtggtactgtgtgtcgagggtggaagggcaggagttagggtgcaggagccaggagctctgcagaggcttaacttggggcagagccagtgggaatggagaggaagtagagtccgttaagaagatgtatggagggaggttttgatttttgctccattcttgggttggtggacaagtgtccgaaaggaactgctaccttctgtctctacagttgccgtcaccattggcctcaggattgtggttgggacccagaggacggtggaagtcttgctgcttgtggtagtttttacttaaacccctggtggacaaaggcaggtctgagatgaaccgggtggcctctgtattaacctagaagaggtgggagccacattattgaatggatgttcactctagcccggcgctaagtgcttcaaaacctgccatgttcctcccaagagcccagagatgaggtaattaaatggctgttcctaaggcacacagataaacagcggagctggacctcgtccttagtcctatttacagccagggaaactgtcctggagagaagtgcaatgcccgggtaacggctagtgagagatgcaacttggaaatggaaccatcgctaggccagtctactgcccatccacagtctccagcgtgggccaccgagctgggcagcacaggcccgtccatgccatggcccctggagccgtgagcggcaggaaggaggctccaagtgccctgaccctgatcttattcttccaactcctcctccctagaaatggtggaggtggggcctagttcctggtcccgagccttcccaggcccagtgaagaccccgccagcaagaaggtggccaaacaccctgtccaggacgcgacggtcaagcccggggaggaccccgcaagctccagagggaagtgggctccagactagggggcgggaggccggcctgggcggagcaaagggcgctcggcctcgttgattggccgcggctgcagagctgtctctctaggattgagccttttctttagggggacggggccttgattcactcccaccaatagggttcaaggaatccacctcccaccagggcacttccggcggcgctctccgcgccttatcgccaaagctgcggctctggacgcccagccgcggcgtatcccgatcacttccgggtagtgctccacgggcacgagccgcgattgggctaccgtagatggggtacttccggtgtgcacgtgctgggtccttcggcaggaggaggaagatggagcccagcaccgcggcccgggcttgggccctcttttggttgctgctgcccttgcttggcgcggtttgcgccagcggaccccgcaccttagtgctgctggacaacctcaacgtgcgggagactcattcgcttttcttccggagcctgaagggtgagagcggggtccgagggggtagcgtgtgggggcctggggttggtacagcatcgagggcattgaccactctccttccctctccctttcctggagcaggccgcccgggtctggcctgccgcttggcgtgcgggtccgcgatgtctgcagcaggggtttcccttcgcgtcccgtcttcctcaactacctgttttttcttgtccagaccggggctttgagctcacattcaagaccgctgatgaccccagcctgtctctcataaagtatggggaattcctctatgacaatctcatcattttctccccttcggtagaaggtaagggttccgcgtcgcccctagcactggaattcgagacccgggacttgatggattgctttcttctggttcttgggcatgtcctgggtcacaggatgggttgccagtcctggatggtgctaccacggagataaggaaaatgctcatttctgacctgaccctaggagggtacatctttctaaaagaaacagctaaggattgtggagtcaagtgttgctgcagaccgtggaacccagggccctgctgctctgctgagaagggagtttactctgtaaagggcctgataaaaagatggaaagctcctgggttgggtttgcctgggtggaaagaggaaatggcctgttattaatatggattgctataaagaggcattgtgcattgtggcagttgatcttaagaattcagatagattcatagtctcgggctgaaaaaagagccttagcaattatctaccaccccacccctcctcccatttgaggctggataaatatgtccagcagccttgcagtgggctagtcgtttaacagaatgaatatcttggccagattatccagttga

SEQ ID NO: 3952 - DNA, 6000 bp, Homo sapiens
ttaaaaattaaaaagctcttacagcgagtctcattctgtctgcatgcctgtgggtcgctcagtgtgtccagcctctgtctgacttggcacgtggtattactctcaaagcaaaaaatcagccaaacaaaagggattctctgggcacctactgtgtactagtcattaccaaacacctattctgtacaagacgatgacagaggcaaagcggaggaagaataatgccagtgatagccatggccacatatattgaacgtctgtgactcatgtctctccacacattctgggagattccttttggatcctggtgagtcctgaggctgcatggctggaaacccacacctaaactacaatgccaggtatctccagggtctcacttcctggctaatcagaacccttggccacagtgattggcagaggaattgacacatgtctcagtgacagtcgacaagactcagttttgggaatgttaattagaactgtaggaaaaagtgagtccctgtttccgctgggagttgataagagagtaggatgtgagccactgctgagggcagccatcttgtcatcatgaggccaagaggtgaggccagcagggagggaagcggtcttcagagatggagtaaatgagactgaatcctaatgtcatcatctgagctcctcttggagccatgcctaaagctagctctgcccctgtactttgtagttacacaggctctgtgtaactcaattggctctggccaattcaggttggttttctgcgtttgagccctgatgctccgatggggcagaccctgtgcccagaggcttgagtatttggaaggggcaactccccacatctcatccagtctccagcagtctaacaggggacaccttctcctgtcatgaaaccacttgtgtctgtcagagggcatggcgagcccatgaataccaacagaagcagctgcatgccagcaaaggagcaaagcccctcaaactagctgtgtcttctcgggcaaatcactttccctctctgaacattgattttctcacctgcaatatggaggtgatgtgggaatcctagcacctaccacatagaattgtgagaatcactcagataatgctgcaaagcacctgccaccatgtctggcacataataaatgcttagcatttgttatggctggccgttcccagaaagctgtttggatgaggtgatctctgaagatcctggaggagttggaggtaagggtcagagtcggcagcaaacctcacttgcttgcttccgtttgagcagcataagaccaggggctgcgttttctggagcagcctggtagaatggaaaagactcagccatcaccttgggaggccttggttctagtcctgattctgctgtcaagccgggtgagtggctttggagtgggtttgggcatgctgcccctcactccctgcccgccccgccccatccttaatgtgcccctttcagaagcaagaaagccacagcctttctcctctgctttcttcatagagccaggagaaccacaccttactcaatatagtgtccccagtactctgccctgagctgatacagcattccagaatgtccattttatgagtgattaaaatgtggtcataatacctatacctgaccttctgatttttttttttttttttttttttttttttttttgccggattctcactgtcgcccaggctggagtgcagtggctcgatctcagctcactgcaacctctgcctcccacgttcaagtgattctcctgcctcagcctccggagtagctgggattataggcacccgccaccctgcccagctaatttttgtattttagtagagatggagttttgccatgttggccaggctggtctcaaactcctgatctcaagtgatccaccactgagccctgcctttttttttttttttttttttttgaaatggagtctctctgtcacctaggctggagggcagcggcgtgattcagctcactgcaacctccgcctcctcggtccaagcgattctcctgtctcagcctcctgagtagctggaattacaggtgcccacgaccatgcccgggtaatttatttgtatttttagtagagacgagttttgtcatgttggccacactggtcttgaactcctgacctcaggtgatccgcctgccttggcctctcaaagtgctgggattacaggtatgagccactgcacctggcccttttttcttttggaaacttcttgttagagagtaacagagacagaaaagcacatagatcctaaggagactgctcaatttttcacaactgaactactccctcctccgtacctaacccttactagcacccagaagcttccctggtgcccctttccagtcattccctccccaaagataacacaaacctaacttctgacagcacaggtctaattttgcttattttttgaactttttgtaaatggagcaatgcttaaaggctttctagcggtttgttaagttacaaaaggcccacgaggtatattaactccttaaatctttacaacagtacagtgaggtgggtaagaattatgaacaccattttacagaggcaaaaacgggagctcagagagaagagaacataatcacattgctggcaagtggagtgccaggataactgggtttcatttttgtgtgtccctggatcttcaatgtctctgcaggcatcaggctatgattcttaggaagacacttgaggaatagtcaggaatcggacaccaggccagggcagctgatagtttaagtaccccatgatggaggggggctctggaccttcaggtctggtcaccttgcagacacggccagaccctccccccttcaccatgctcccaactgctgcactcaaggagcttttcgacctccctgagtcctccacactgaagaatttggaatgctgctggaaggaaggagcaacatagagttatttccacagagcccctccccgccctccaggttcccaaacaaactgcccaggaacagatggtccgctttagaatgactctgtgtgcccagacgcatccagggccactctgggtcagcacctgggcaagggttgcagtcagttgctcctcctcttccttgctggcagtaggttctgtttccaaattcaccctggtcacccaccactacagcctcctcacccccgttggctgataggcaggattccccggatctttccctctggcctcacgagcattctgtctggcctaatgaactcttagacatccttcaaagcccaaatcccaatgccgccaggatgtctttctcctgaacatacactcattatgccccctacacagtagtttctctttctcagcccaacccaaatatagatgatcacaaaagtcacacaacagtcacacacaaagaccacagtgtcaccacacacacaatgtttttatctcgatgtctcttgcaaactgggttacacacaaagttgtaccaaatcacagccatgtccctcttttgtgtgggcacgtacaacacacgcaaactacaccacaaaaacccaggattttttcacaacttgtttacaacagggacaccacatttctttctaccacattaacatgcatgtacaacaggacccaaaagtggagatcacacatcacacacacacacaggcaggctgtcttctgttccttcctccttcccttgacctcacaaaacctacacgtggagacagtgtctctcctggacctgcaaattcacacgcctagagagccacggctccttctctctgctttgctaccattccctccctcacccctctatcacggggacacacacacacacagcaacaaaccccaaatacagcggacacacacacacagcaacgaaccccaaatatagcagacacacaaacacacagcaatgaaccctaaatatagcggagacacacacacagcaacaaacctcaaatatagcagacacacacacacagcaatgaaccccaaatatagtggacacacacagaacaaaccccaaatatagtagacactcacagcaacgaaccccaaatatagcgacacacagacacacggcaacaaacctcaaatatagcggacacaggttgtcctgaagtccctggacggcaacgaatcccaaataaatcagtcagggctttccttcacatataaacacacgggcacgcggaatccacccctcccccactttctgtctcctcatctctcttcctctcttacacacacacacacacacacacacacacacacacacacacggcaacaaaccccaaatataccggacacacacacacagcaacaaacctcaaatacagcggacacacacacagcaacgaaccccaaatatagcaaacacacacacgcacatatacacacagagcaacaaatcccaaatatagtcaggactttccttcacacataagcacacgggcacgcggaatccacccctcccaccgtttctgtctcctcttctcctccctcttacacacacgcgcgcgcgcgcgcgcgcgcgcacacacacacacacacacacacacacacacacacaagcagctgcagcgccccgggtcacactccagtgcaggagccaggcaggagacaaaggtcgccgaggctcccggcggccccaccggacacaatcgagcctcttcccggttctgctagctcccaacgccggtctcggcaaggtctggaccctgcgccccgaagcaacaactcccgcctgctcctgccctccaggttccccgcgcagcccgggcagccgactcccagcgcgccaagggttaagggcccgcgcgggcgcggggagtgcagcctcaggccgtgattggctgcgccacccaggcccccgcgccctgccattggccccgcggcggccccgcccctccggcactcggcgccgaagccgcgagctcgcccgctggagctgagcgcgccgcctgggccaggcagccgagccgtccgagcagctgggctgggagcagggaacccggagctgggaatcgggagccgggcgcggggagctgcgcgaagccggggcggagcacgcgagctatggtgagtgctgcgcgcggaggtctggtccggtccagcccagcctcgacggtcgcgggcagcggtgccgcgggtggcacccggggccgccctggctcgcggggggctgggcgccggctgcagcagcagcccccgcccggctctcggaaggcgtggagtcggggagcgcccgggcagagcgcggctctcccggcggcgctgcgcttggtcccgtcgggggcggccgcgccgagcttggttctggtcccagccggatgtggggggctcggggtccccggttcgctttggggacggttgctgcggtctgttttgggttgttctgaagtccctggactcagcttggcttggagacccagggcagccgggctgggtcgggctcgcgggtggcggcgatttcgaggtgcctggatgcagctggacctgagcgtcccgggacactgaggtcggtctggggctcgccttggggcactgtgggtggccacgcccggcgcattcggagggctaggttgcggccctctgggactgctgatccagctgtggcctaaggggtgtatgtggtggcgacgcagctaggtcggtgctgtcagagaccaggggacactcaggggccctgcacccagcgatccggtctccccagcatctcccggtgatgggtcctcagaggaggggcttgctgaggccgagtgctgactgcgataggcaggagtaccagggagaaagggaactggggaggggcgtttcatggggctctctaaagccccagaagagaaatccatttgatccaggctgggcttcctgggggggggctgttgggaggggcattgtccctggaccccaagagcaaaggccctttgtccacttgtccagggccgggtgccggcctctccatcacgggaagggagccatctacttctctttggtttctttccctatagacgagccactcgg

SEQ ID NO: 3953 - DNA, 6000 bp, Homo sapiens
ccttccccgccaagaaaaagaaagaaagaaagaaaaatcacaaatacatcattccctacaaagcagtacaaacacacacacacgaataacaattaatattaatgtactcaccacctacttaaaaaatacaacatcaggctgggcatggtggctgatgcctataatcccaactttgggaggccaagttgggaggatcacttgagcccagaagttcaaggctgcagtgagctatgactgtgccactatatctgggtgacagagcaagaccctctctctaaaaaaaaaaaaaaaaaaaaaaaaaaaaaaaaaaaaaagaccacacatggcggctcacacctgtaatcccagcactttagaaggccaaggtgggagaattgcttgagtccaggagtttgaagacaagcctggacaacatagggagaccccacctctacaaaaaaatttaaaaatcacttgggagtggtagtgtgtatctgtggtcccagctactcaggaggctgaggtgggaggatcacttaagcccaggaggtcaagactgcagtgagctgtgatcatgcccctgcactccagcctaggtgacagagtgagaccctttctcaaaaaggcccggcatggtggctcacgcctataatcccagcactttgggaggccaaggcaggctggccaacatggcgaaaccccatctctactaaaaaaaaatacaaaaattagccgggcatggtggtacacacctgtaatcccagctacttgggatgctgaggcaggagaatcgcttaaacctgggaggtggaggttgcagtgagccgagatcgtgaaaagaacataattgaaacttttaaaaccctttatgattatattccttcttccttttccctccaggagtaaccactatcctgaattttatatttataatttctttgcttttccttatggttttgccacatatatttatctccctaacagtttgtttcttcttgcgtgtttttgactttggcactctgccttgtttgtgacaatcaccattttggtatgtgtagctgtggtttactctgttttgcttctctgtagccctccatcataggaatacgccatatgctaccattctgctgttgatggacgtttggttgtttttagttgtttgctatttcatgctactaggaccattcttgttgctgtcttctagtgaacacagaagagtttctctgccatgcatacccagcagcggaattgctgaatcatgaggtagtcatcacatctttagttttatgaaataataccacattgtttgcttatgaagtttctccaatttttactctactagtggtagaaaattgctctacacttttttttttttttttttttttgagacggagtctcgctccatcacccaggctggagtgcagtggcgcgatctcggctcactgcaagctccgcctcctgggttcacgccattctcctgcctcagcctcccgagtagctgggactacaggcgcccaccactgtgcccggctaatttttttttttttgtatttttagtagagacggggtttcaccgtggtcttgatctcctgacctcatgatcctcctgccttggcctcccaaagtgctgggattacaggcgtgagccattgcgcccggcccacactttttttttttttttaagagacaggatctcactgtgctgcccaggctgatcttgaactcctgggctcaagcagtcctcctgcctcagtctcccaagctccacactcttattaactgacatgacatgatcagatttaaaatgttgtacttttctactaggtgaaaatggtatcttcttgtcattttaatttttctttcttttttcttttgtttaaaatagatagtcttgctatgttgcccaggctggtcttgaactcctgggcccaagtgatcctcccacctgggcctcccaaagtgttgggattactggcatacgccaccacacccagccttcattgtcattttaattttttttttttttttttaggtagagtcttgctctgtcgcccaggctggagtgcaatggtgcaatcttggctcactgcaacctctgcctcacggattcgagtgattctcctgcctcagcctcccgagtagctgggtgcccaccaccatgcccagctaatttttgcattttagtagagatggggtttcaccatgttggccaggctggtctcgacctcctgacctcaggtgatccacacgcctcagcctcccaaagtgctgggattacaggtgtgagccaccacgcctggcctgtattttttattttattatttgaagtgtgacgggaaagagacagttgcttatagagctacagtccatgtctccaaaggtagctagattatgagaaattctcctacctttgttcacaatggggaaggatagcaggcaggaggggagatagcctctcaattgtgttacttcttgcaaagctacagcctagccttcctaaccaagtctgtctgctcctgtccctgtgtccctgtcccttttcccaagatgttgctgagggctggagggcttacacacacaccagccccttgagcctttctgaacccacgcctttcactgaaattaggtcactggaatgcttggaactcaaggagtgaccgcatgagtttgtggggcaggcacaccaggcttccttgggaaatgacgcacctcagtcacccagactgtctgcagggaagaaagtttcaaacgagccaaccagagttcacattttccatatgaaccaaaatgggagcaaaacttcagccggaggcttttggggtggagcctggggcgagtgggggcaggagggggtcatcacaccagctatacacgcgtgccttaaggcttttcatcctcaactgaggcaatgtaggcaagggtagaaatttcttgagagctctggacctggtttttccacttccagccaggtggccttgggcaggtgacatcacctctctgagcattggtcgggtcattataagttgggagccacgttgcccactttacaggttggatgactcttagccccaaagctagctcagtgcctgaaatatagcaagagctcttcaaaagatattgttataatatcctttaaactgtaatatatgttttggagttggtggcttaggattggttttcttaaactgaggctttcccctctcctccaggcagatttttttttaatgaagcacccacaaatttggggagtgggagggaaaatactgcattgcaggtttagctgctgctccttctttttttttttttttggcagagtttcactctggttgcccaggctagagtataatggcacgatcttgactcactgcaacctccacctcctgggttcaagcaattcccctgcctcagcctcccgagtagctgggattacaggcatgcaccaccacgcatggctaattttgtttttttagtagagacggggtatctccatgttggtcaggctggtctcgaactcccgacctcaggtgatccacccacctcggcctcccaaagtgctgggattacagtcaagagccaccgcacccagctggtgattgatttttaaaacgttaagaagctaaagccgctcacacctgtaatcccagcactttgggaggtcaaggctggaggatcgcttaagtccaggagtttgagaccagccgtggcaacatagcaagaccctgcctctgtgaaaacaaacaaacaaataaaaaacaattagctgggcacggtggtgtgcacctgtaattccagctacttgggaggctaaggttggagggtcacttgatccaggaggtcgaggctgcagtgagctgtggtcatgccaccgcactctagcctgggggacagagctagatcctatctcaaaatgaataaataaacaaatgatttttaaaattactggtttattatataggattcaaatgaacaaccagaagaaaaggtacataggacaaggtctgaaaaagcttcaaggggccagccacagtagttcatgcctgtaatcccagcactttgggcggccgaggcagcggatcatgaggtcaggagtttgagaccagactggccaacatggtgaaaccccatctctactaaaaatacaaaaattagttgggcgtgatggcatgtgcctgtagtcccagctacttgggagactgaggcaggacaatcgcttgaacccaggaggcagaggttgcagtgagccgagattgcgtcactgcactctagcctggcaacagagcgagactctgtctcaaaaaaaaaaaaattattcatgctcactataggacatttggaaaattcaaatgagtagaaaaagggccacccccccccatactttgtagagaaatacattgtaacaatttggtttctttcctgatggcctttatcgttccctgtgtacagttttattttgtttccattgttgctaaataaataaaatgatgctttctgattcacaacttacagagctgatttcatgtacttctaacaagcttgtgatgattccaaaagctacgactctttgtcccctctgggaattgcatgggtggggcacatcaccctccctgtattctgatactttttagaatgccagtttcacagcaccatggccagctttaagtagtatctttttaatcatatagttcatttcaggcttccacattgtccttctagaacctaactctattttttttcttttttaaatcccagatcttctgaatgtgtccctgctctgtgagcccacagtgatctgtttgttttgcctggtcccagcttatgcattcttcgagtcttggtaaccaggatgttttgtctgttcaggctctaaaacgatcagtgggataggaaccgaagttaagtagctcaggatgcgtcaagatgaacctgggaaaaccgcgagctgctgtgctgactggactgcttctctgaatcggctggaacttctttttgtgtctagttttaaaagctcctcagaagcaaccctaaatccagaatcgtttcaattactgtgaggggaattctgaagttctcattaaacacacgaatgtctcaagctttgaaaagagccagatgccaaaggcaagaatcccagggcattgcccacctgggtgtgatcccctgataattgtctaacaaattcagcatgtgtcccctgggcatgaccatctgctgggaaaagttccaggaccctgagacatcttgggattcctgtggtttaggaaagacctttaactaccagctggtagttgtctcagcattcttcaaatagtccggtcttgtttaatattattattattattgttatttaattttattttattgcaactgtacttagagaatagtctggtcttgagaccttttcactgtggtctgttctggtgtacggctcccaccagtgtgaagcagaaggatgactttgctctgttgtcaggacaaccttgaaggaaggagccaaatgtgtggaggtctgtgggaagagagagccacctagcatgtccccactgaaccagtcagcagaaggccttccccaggaggcctccaacagatccctgaatgccacagaaacctcagaggcttgggatcccaggaccctccaggcgctcaagatctcccttgccgtggtcctttccgtcatcacactggccacagtcctctccaatgcctttgtactcaccaccatcttactcaccaggaagctccacacccctgccaactacctgattggctccctggccaccaccgacctcttggtttccatcttggtaatgcccatcagcatcgcctataccatcacccacacctggaactttggccaaatcttgtgtgacatctggctgtcctctgacatcacgtgctgcacagcctccatcctgcatctctgtgtcattgctctggacaggtactgggcaatcacagatgccctggaatacagtaaacgcaggacggctggccacgcggccaccatgatcgccattgtctggg

SEQ ID NO: 3954 - DNA, 6000 bp, Homo sapiens
attacaggcgcccaccaccacacctgactaatttttctatcttttagtagagacaggtttcattatgttggccgggctggtcttgaactcctgacctcaagtgatctgccagccttggcctcccaaagtgttgggattacaggcatgagccaccccacctcacttggcccggtggattatattcttgaaaatgatggaaagtagattttattttatttatttatttatttttgagacagagtctcgctctgtcgcccaggctggagtgcagtggcacaatcttggctcaccgcaagctccgcctcccaggttcctgccattctcctgccacagcctcccgagtagctgggactacaggcgcccaccaccaagcccggctaatttttgtattttttagtagagacagggtttcaccatgttagccaggatggtctcgatctcctgacctcgtgatccgcccgcctcggcctcccagagtgctgggattacaggcataaaccaccgtgcccggcggatggagagtagattttaagtgttctcaccacaaaaataagtatatgaggtaatgcatatgctaattggttcaatttagccattctacaatgtatatgtatattacaaaacatcacattgtacatgttaaatgtatacaatttttgacaattctaaaaaattaattaattttaaaaggaatactgtatagcagggtttaaaaggcaaaacataacaacagttttggtgaaaatatgttatcccatatgattgcagacacattttgttttattttcccaagttaattcagggaccaacatttacactgaaaactgaataatcttttttttttttcttttcctccatcgcccaagctggagtgcagtggtgcagatcatggctcattgcagccttgacctcctgggctcacatgaccctcctgcctcagcctcctgagtagctgtgagtacaggcatacatcaccatgcccagctaattttttattttttgtagagacagggtctcgctatgttgcctgggctggtctcgaactcctgggctcaagcaatccttccttcctcctcggtctcccacaggcctgggattacggacatgagccaccatgcctggctttgaaccatcttagggtcagttggttcagacagtgcaaagactgcttccctgtggcctgacaggaaaagtatacctctcgggaatgttcctcctcagatcagaccctcaatatgacagcactcggccccagcatggggtagatccatcctgtagatggcggcatctcacagtacaagggctgctgaggccagctctacccaaggagctgagaaaaccgcctcctaaaccctcacctacaattgctcctggccctcccagggcaaaaagagaacagacttcccctgtgggccccatcagccctgcccaggggactgagagatcatggagcttccttattgattctcttgtccagtgctgcccatagggagtccaaggaccgacagcatctgcttcccctgggaattagttagaaatgcagattcttgggccccatcccagaatactgaatcagaatctctgggagtggggcccagcaatctgtgttttggggttttgtttttcaagtcaaggttctctctctgtcacccagcctggagtgcagtagcataatcagagctcactataacctcaaactcctgagttcaggcaagacctcctcccgcctcagcctcccagaatgctgggattacgggcatgagcctcctcacccggccccaatctgtgttttaacaggccctgtgggtgacttccatgcactcaggcgtttcaggggcacctgttatctccaacttcctcattttaggaatggagaaattgagaacagatacaggaagcaacttgttggtcagccaggcaatggcagagaccacacaaaaactccgcttcccagcgttccttccacttgaactttcagtaacttcctttctttcttccttcgttcattcattccttcactcattcatgccttccacctccaattacatgctttgggctgcaatggaggaccaggcgtttggggacagcctcacccttcttccccatgtggggctttctcaaggccagaggtctaggattcaggattgtggaagcatctgctagatctcttccagctcacccctgggtctccaattccagcccagataggagtctgatgtaggctgcaggcgggccccactccccagctccttctggtcttcttttcctctttcttggcacctggggctctctgtcccattcctcactgccaatgtcttgctcttgggagagatgcaagggctggaggctgttactgttccatttcccaaagggatgaatgatcaaattaaaggcccttcccagcaatggctttgcgctgaaggagccaggactaggtccagaccagggttcgcaagttagcatcttgagctggataattccttgctgtagggctgtcctgtgcattgcagaatggttagcagcattcctggcctctccctagcagatgtcagtagaattcctccaccaggttgtgacaaccaaaaatgtctccagatattgccaagtgtcccctctgggtggtgttgccagataagacagagaatgcctggttacattcttttttttctttttcttttttcttttttttttttttttgagacagagtctcactctggagcccaagctggagtgcagtaaggcgatctcggctccctgcaacctccgcctctgtggctcaagcatttctcatgcctcagcctcctgagtagctgggactacaactacgcaccaccacacccagctaattttttgtattttagtagagatgaggtttcaccatgttgcccagggtggtcttgaactcttgatctcaggcagtccatctgcctctgcctcccaaagtgctgggataacaggcgtgagccaccacgctaggctgagcattctaatcgcacataagcaacaagtaatttttagtgcctgaatgtctcaactattgttgcattacctcacatacttatttttgtggtgagaacacttaaaatctactctccatcatcttcaagaatataattcattgggccaggtggggtggctcatgcctgtaacattttttacttgaagaatcttgcaactctacctcaggggcaaaatctttcttcattggcccagatcagggtctggggtgtggggagcagttagtgagaggatctgatgagataatcataggccatgagtttacaagggcaaaaactttgccataatcatctctgtatccttagaatataatggcgtctcattaaatattttatctgagagtgggtgtgaggacacttggaactatatcagataccatacctgagtacatccagcccaggactggacattagggacatactccctaataaatataaactgaagataatgtttagtttgactcacatagcattttttaaaggtgtgactttgggctttacattctaaaattggcaactggctgagcatggtggctcatgcctgtaatcccaacacttttggagactgaggcgggaggatttgcttgagcccaggagttcaaaaccaagctaggcaacatagtgagacccccatctatacaaaaaaattaaaaaaaaaaaatagccaggtgtggtggcacatgcctgttctgccggctacctggaaggctgagatgggaggatcactggaacccaggaatttgaggctgcagtgaactatgatcgtgccgctgtactccagcctgggcaacagagcgagaccctgcctcaaaaaattaaaataaaataaaataaagtaaaataaaataaacaggaagtggctgggcgtggtgactcaccctgtaatcctagcactttaggaggccaaggtgggtggatcacttgaggtcaggagttcaagaccagcatggtcaacatggcaaaaccctgtctctactaaaactacaaattagctggaggtggttgtgtgcacctgtagtcccagctactcaggaggctgaggcaggagagttgcttgaacccaggaggcagaggttgcagtgaaccgagattgcgccattgcactccagcctgggcaatagagcgagacttggtctcaaaacaaaaacaaacaaacaaaaaacaaaacacacacacacacacacacacaggaagctatcacataagtcaagatttctggtatctcttgaaaaatacagcacaacttccaaatgcttggaatatctgacaatttgcctatactcccaagcagaaaagcttggctggaactaagaggtacctgcccctctctactggcccagatcagggtctggggtgtggggcagatacctctcagctgggccagtagagagggtcaggtacctctcagctccagccaagcttttccacttgggtcctgtgttccccctattacccacagtccctaccactccctattgccccacaccaggatccatcacccattatgttaatctgcctgtaggcatttgcatttcaaagctctggcctagtggtgaagaggcattggaatggcatgtccttttaggtgatctactgtaatgttggtgcattatccccattttacagataaagaaacttgcctttggggaagttaagtgaatcaacattttaacgaggctgtattagaacccaagtcccttgactccagggtctaggcccatgccccaccctggccagagttcgttgtaagagataactcaaccgcaggggcaagagcattgtggcaccagggacctggaggggaagtggtaacaggcacggaaggccagacctcctcacactcactcatctgtgagaaagtacaaaagcaagagaaagctggcttggggtggcactcaacaggtgctctgagtggcacccacggccaggtcctgggagaggacagaaaacaactgggactcctcagcccccggcagctcccagtgcccagccacccacaacacaaccgtgagtagctttttttgttgtttattttaggcttcttcctcattccccaacacctgtattcttttttgtttgtttgtttgtttttgagacggagttttgctctgttgaccaggctaaagtacagtggcacaatctcggctcagtgcagcctcacaggttcaagcgattctcctgcctcagcctcccgtgtagttgggattacaggtgtgcactactgcgtctggctaatttttgtatttttagtagagacagggtttcaccatgttggccaggctggtctcgaactcccgacttcaggtgatctgcccaccttggcctcccaaagtgctgggattacaggcatgagccactgcacctggccaaaacctgtattcttaccttatcccttccctccagggacacaagaagccaggtgggcctgtctggggcaggggatagatgtcatttcaggacacctggggttgtggaggaccagtcgcaggaaagttcagggctggcatccccctcctaggaccaagaatcaggactttggctttcatttcattacagagacaagaatcacacacacagagatggccttactgtgtgccaggcgctgccctaagagcctttagtggttggatttatttaatcctcacaacagccgtatgcagtaggagctatcactgttgtccacttgataggtgggggctaggtgacccacctgaaatcatgcgggcattgaatgagagcattggcttgagcctaggcactccggcttcgcggcccacccttcagccaccaggctatcctgccttacgaggtgtggactgcaacagtagatgggggccaggaaatgacaggggctggcagaggcctttgagatgaccaggtgagtcctgcgctctcattttatagatggggagaccacaaggtagtgttaggggcacactggactcaggaggccaggggtctgctttggtgtaagttccactca

SEQ ID NO: 3955 - DNA, 6000 bp, Homo sapiens
caccgtgcccagccacattattttttaaacattattcttggggacaacagaagactgtaaaatcccagctatggaggggagcatgacagtggagttatactttcgaaagaaacactgaggtcttctaactatgagtcatatgccaagttcaagtcagtaaacacttagtgagtggctaaggcgtggcagataagaaccaggagaggggctgagttgtttagggcatatgaaattgtgtttgactgagccccattcagcaaaggtttgcttactcacagttcattgagcacctactatgtgccaggccctgagcgagtcattagagttgtatccaagaagtaagatattcagtgcacaaaaatgatgatattgtgattaattcatatcaaagagactgctatggtttgaatgtggccttcaaaattcatgtgctggaaactcaatccccaatgcgacagtgttgggaagtagggcctgatggaaggtgtgtaggtcgtgagggctctgccatcatcaatggattaatgagtccataaaaagggcttgtgagaatgggttctctctctctctctctctctctcctcttctgtcatgtgaggacacggtgtcctccccttcagacgacaaaacattcagggtgccatcttggaagcagagagactgggtcataacctgaaggcatcttgaacttgaacttcccagcctccagagctgtgagaaataaatttctgttctttgtaaataactcactctgtggtattttgttacagcagcgcaaaatgggctaagtcagagacatacatggggattgggagcaaatcaaagacagtggttaagaaagcctccctgaggaagtggcatgtgagctgagactgaatcaagaataggggcctgttggaagactagcggaagataagcctgggaaggaaattcccaccacagggaccagtgtttgaaaaggccagggggcaagagaaagaagggaactggaagcctctgtggccggaacacagagaactagtggggaacttcaaaaggtggatggaggccacattgtgaaaaccttcaacagctgcataagagattttgagcctcaagtcatggaccagagacttttaacatgagccccataggcccttaggggttgggatgtggtttgttctaaacatagaaaagctcagctgtggtgccacagatgttgggtcctccaacagtgagggaaattggcttcgtccacccagtggtgtgctggagctggctcctacaggctcaggagccaattgtgcacatttcttctgttttgttttttttttgtttttgtttttgttttgagatggagtctttctctgccgcccaggctggagtgcagtagcgtgatcttggctcactgcaagctcctcctcctgggttcacgccattctcctgcctcagcctcccgagtagctgggactacaggcacccgccaccgcacccggctaatttttttgtatttttagtaaagatggggtttcaccatgttagctaggatggtcttgatctcctgacctcgtgatccgcccccctcagcctcccaaagtgctgggattacaggcatgagccactgtgcccggccacatttcttcttatctctgtgttcagtgacctcacatttgctagcttaaagtcagccacagtggggatattcacaccacgaaggttgggaaacacaagaaagcaggacttttacccctgtcccctaaacccccaaccagttgtgaaacatttatcagcaccactgcttcatacctaatattccaacccaaagaggaagctggctcttcagtgcccaccgttccactcatgagagttgagaggttagcgccatgatctttgcaaatcaggaagtgattaagactggggaggtttgttcttgtttgcccttaagcaagcaagaggctgggtagcagaagttttaaaaccacaagctttgaggacagacagactgagttccaaattgcagccctatcactataattagctgtgtgacctaagcaaggatgtaacctctccgagtttcatctgttgaaaggggatattaataatatccacctcatagggttgttgtgaagattaaatactgtatgtaaactgcagtgccactatataacaaagactcaataaagattcgtgcagtcagctgtttgggataaagagatatcaatagagatatattcattttattccagaatggatggattgtatttgagatacctgaaagaaattgaagcagtgtatttaggacctaagtagaagcaaggtcgtggtaactggctgagattttctgaccggcatctatagatgacattttttttaaggttttgaaagatccaacttggccaagctcatagtcacaaaatgtctcttgaaggatcaaggcatctgaacacacaattttctaactcgaagctatgcgtgggcggggaggtgggggaagaggaacaagagaacaaacatgtgacaaacaaattgtcaaaaaagagcaagtgccagtttcagatgcatagcacaggagcccatgggtggagcaggtggcaaatgaagatatttctgtacctgctgttgaaccgctccaagcacagtgggattccgggtctaaaagagttgcagttgctgggtggaaatgaaagtcaacatttcagggccgggtgcatggctcatgcctataatcccagcactttggaaggccgaggtgggcagatcacttgaggccaggagttcgagattagcctggccaacatggcgaaaccccgtctttactaaaaatacacaaattagctgggcatggtggcttacgcctgtagtcccagctacttggcaggctgcggcatgagaatcgcttgaaccagtaggtagaggttgcagtgaaccatgatcacgctactgcactccagcctgggtgacagagtgagactcttgtcaaaaaaaaagaaagcaagaaaataagaaagcaagaaagaaggaaagagagagaaaaaagaaggaaggaaggaaggaaggaaggaaggaaggaaggaaagaaagaaagaaagaaagaaagaaagaaagaaagaaagaaagaaagagagagaaaggaaggaaggaaggagaaaagaaagtcaacagtcaacatttcagagatcccaagataccaacactgaccgtgcctgctgctcttccatcctcctccaccctgcgcctttgaggtggaattgcgtcctctgtgagcagggctttgttaagagatcctaattaaggccaggcacagtggctcatgcctgtaatcccagcactttgggaggctgaggtcacctgaggtcaggagttcaagaccagcctgcccaacatggtgaaaccccatctctacaaaaattagctgagcatgatggcaggtgcctgtaatcccaactacttgggaggctgaagtgagaaaatagcttgaacccaggaggcggggttgcagtgagccaagatcacactattgcattccagcctgggcgacagagcttttgtctaaaaaaaaaaaaagaaaaaaaatcctgattaagcagaagccttgatgctagtcccagaagcatcctgaaatttccaaaagaaatttcccccgcggttaaactcagagcaacttttggacccaccaagctctgtgaaaatcattttctcttccaaaaactgatgggaccaaagctgatcccagtttcaaataattatcaaaaaattggaaacgaaatatgatcagaaaagaagaaagttgaaaaagaaaatcctcatcacccaaagacaacaaccattaatattttggtaattattattccaaatatctttctatgcatacagacagactcacacacacacacacacacacacacacacacttttttttttttttttgaaactgagtttcactctgtcgcccaggctggagtgcagtggcgcgatctcggctcactgcaacctccgcctcctgggttcaagcgattctcctgcctcagcctccctgatagctgggattacaggtgaatgccaccacgcccggctgattttctgtatttttagtagagacggggtttcaccatgttggccaggcttgtctccaactcctgacctcaggcgatccacccgcctcaccctcccaaagtgctgggattacaggcgtgagccaccgcgcccggctacacacacacttttttaatgggcctatgttttagcactcgcttttctgtttctcagtgtgttgcaaacacctcggtgtcgatacacaccattcggcaacgtcctcctaaagggccgcataatattgcgcgtcgtggcgtgtgccttactgggaagctactgctgtccaggtgaacaccacagccttcggggtcagaaagacagctttccccagaacaagcacctgaagctctggggcctgccgctccccgggagagaagtacgtggagaagggcagcacggatccgccgggatccccgggggcattaaagggaatcgcgtgtgtaaggcgcggagctcagcatccggctcagaaacgcgctcggatcccgccaatggcattgaggccgcgtagccaaaccggccttgaactctccctaatcctgccaaaatggcccgtcctggagcactggactggccgtgggttattgatcatcagccggtttcttcccctcccctgcccttcccccgtgcacggatttactgatttttttttccgggaattgagtaaaacaaaactaagtgcagatgaagcagaggtacgggcgagtttcgagcgcggggaccggcgcgctcccccccccccctccccccgcggcggggctgtccccagggaccttctcagtgaatcctaggcggcagggacgggcccgcggctctgcgggccattggctgccgactgcgtcacctgcccgcggtgggctaggagacgggaggcgggaggcgggaggcggggacctgggcccgggcggggacgccgcggcaggaaggccatggcggggcccgagcgctggggccccctgctcctgtgcctgctgcaggccgctccaggtaagggcgcggggccgcgggagggagggggaagagggctccccgggccgggccgcgcctaccctcggacccggagctcctgggacaggcacggggtccgcagccacccgagccgggtgcgaatcggccctgcctacgcgcccccagtttgcttcttcccaggactgaacagaaccgggtctttgatattcctctcccgcaggaaacgaatccagtttcctaatgcttccagcttcaggagaactggagaaaaaagacagcggcagtttgatactgcatattttttaataaagtgctttttaatgtttcctaaagaaagcactgatccctgcgtgaaaaccacacttgaccctaaagtgtggacagcagggaaagtgggaccgattgatgtcccttcccgttcctgccaggcctctggtgggacggagctctggtcgcctgtgccctgctttctaacaagacggctttcttttggtggtggttgttgttttgttgttgttttgttgttgttgttgttgttgttgttttcccacctctactgatgagtaaggtgtcaggtacaaaattcctcgccgtaggacccaaccaccaaacctcaccgcccacgactccaaccgaagcagggaagagaaggtccagaaatcgcccccaggatattttcctagtcttggactcacagtttaaagagctgtaaaggtccctgggcataatccaatcatcataaaagcctatatttattcagcaacttctttgtgccaggcaccgcattattctggaagcctcacgacccagccatcctcggaggtagatattatttttacttttccgatgggaaaactgaggctcagagcaattcagggaattcctcaagaaggatggcagaggtgaggcacacagaagagagaagaggggctaaagcaagcctggctagcttttgcctcc

SEQ ID NO: 3956 - DNA, 6000 bp, Homo sapiens
actttgggaggacaaggagggcagatcatctgaggtcaggagttccagaccagcccgaccaacatggtgaagccccgtctctactaaaaatacaaaattagttgggcgtggtggcgcatgcctgcaatcctagctacttgggaggctgaggcatgagaattgcttgaacccaggaggcggaggttgtagtgagccaagatcgcaccactgcactccagcctgggcaacaagagtgaaactccgtctcaaaaaaaaaaaaaaaaaaaaaagaggcagattaataggagaaaaggcaaacaaatacacaaatttatttgaccatggttttatgagatacaagaaccttcagaatgaacacccaaagatacaggagaaactgtccatttttaggcttcagttcaacaaagtatggatggccgtgtagaaatacggttggacaaaagagcctgatctaatgctgatagactgagtggggaacccagcgaggcctgtctgtcaagattcttttcggcctctctgcgcagcattccttccttcctcatatggcgcaggactctctctggatgggggtcttctgacctacaatcagacaaaggtcaaataatttcctatggccaattttacacagaaagaaagaggaaagttagagtaatatttttaggttttagggcaggcttttggtgaagagggattgtagtttttatagctagccttgggggagaataagggaccagagacaggagggcaggagaaggtcagagagaaatgtttgcttccgagggaggccttcatttcggggtattgttttctgagaccctatgaggcacactcccaaggccaacagagggaaggaaaatggaagcgaggcaggcaaggagggaagcaagtacaaggtgtcacgtggctgagctggccacagcttcaccaaagactgggctggctgcttagtcatgtgagatgtttccagcaggccataaagaacagaacatgattcaaagtccttcatctagagaagaaaaaaaaaaagaaatgtgtctgctggctccttcctgtctcccgcctcccatactgttcattccaccttgacttcaggtggtgcaggtgcaggggcagcaaggtcacctgccccattgggtggtacttcagctgagtctggagatggtgggaggtgccagggcctccatggtccagttgggttggacaagggtggggcagctgctgtctccacctcagtgaacacaatggggccaggctggtgcccagactcacgccaggaaaggccaagtcagccaccggcagtaggggatgaattcatgactgtggcccagtagcatccaggatctccatgagcaagaagccaagggcctggagagaggcaaggctgagcgaatccgaggcagcgcattcaccggggctgatacaccagagacttacaactttgaggagcattgcagagcctgttcccccttttagacattcagatcacagtagcaaattaaggggtccgagtcgtcccaccgtaaagaaagcgaattaactttagatgaggaccatcaagttcatggtgcttggaatgctgcctgaccctaagtctttcattttgtgtgtgtggactgaatttcccaacttattcatatgacatcctccggaactagagttatgtggaacttgctttaggacagtgctcaaaaaccctcacaacctctgcccattttcacttctgggagtttggtaggttttctaaggctaactcagttcctaactttgaatttcaaagaatcagattttgctctcatttccagtcctttctcaagttctgaagcattttgttttagtttttaaaacacggtgtaatacacacacacacacccttaaaagtgcacaaaactcatcgtagagtttaataacctattgtaaaatgaaaccttatgttactaccactcaggtgaaaaaaaaaaaagaacattgccagccctcagaagccctccatgtgcccctctaccacatcacagctcctctttctgattggggcagcggaaagaggagcggtcaatttttttgtttttttgacaatcacatacttgtttttctttatggtttggtctcctaaagtatcctcccatagaaaactgaagggatttgagtccagaaggagaaatttgaggccagaaagagagaggttttcatcaccttgaaatcacaagaatcagtattataacgtgtgtatgttctgttacttctccaggctactgatcatgtaagcagcaagcatttcagccccgtatcttgtcacttatggaagagaagagagagcagttgagactttgggtaatcagttaaagattaaattccaggaagatacctgttaattgcaactaaggggatctttcctttgccataggaagggctcttcctgtacttgcaaactagaacccttaagatggtatgaagggttcttgatcaacatgcttcctttaaaatcatgctgcaagagaggacagctggcttcaagggggttctttcaatgaatcttgaatacagctccatgggctgctacatcagaattgccaggaaaggtttatttttccccaagtctttaattctgaaactttttttttttttttttttagacagagtttcactcttgattgcccacgctggagtgcaatggcatgatctcggctcactgcaacctctacctcccgggttcaagtgattctcctgcctcagaattctgagtagctgggattacaggcgcctgccaccatgcctggctaattttcttatttttagtagagacgaggttttgccatgttgaccaggctggtctcgaactcttgacctcaggtgatccgcctgcctcagcctcccaaagtgctgggattataggcgtgagccgccgcacccagccaacattttttaaatactgaaaagtagagggaatagttatagtgtaccccatttacccatcactcagtttcaacagctggtgacatatttatttcttctataccagtaccgtactctccccactgggattattttaaggcaaaacccagatgacattttatccctaaatactttagataaaggtgttctttgaaaaaaatcataacctcaggaccagcctggccaacatggtgaaaccctgtctgtactaaaaatacaaaaattagcttggcatggtcgtgggcacctgtaatcccagctactcaggaagctgaggcaggagaatcacttgaatccgggaagcagagattgcagtgagctgagattgcagtcgagcctgggcgacagagacagaaatgaaactctgtctcaaaaacaaacaaacaaaaaaaccactatacataaaaatgaacaatgatgccacaatagcaccagagaattttataaatacagattcccaggccctgccccagacctactgaatcctggaaatattcaggctccacacccagagattctggttcggttggtctgatgcagggacctgtaacctgcgttgtaacaccttctccaggtaatgctgagcctgctggtgctcagagtagacagacctggagaaaaccagggtgtctgaggttttccagaagaaaaccagagtccagagaagcagagaggcactcagtgaggacccaagcagagcgggtgcacctcacatcctcactcctggcaccccgtctcctacaagatgagagactgaaagagccccttcctgtccccagtggtgtgggcaagaggcctgcacctctgactcttggctctgtgaaaggccatacccaccaagcctatggtcctagcgacaaagggtgctggggagacgaattgaccagacagggaggtctccagcagcttctttctacacagagggcacctgtcagaggccagcgtgggggccacaggctccccaatccccaagaaccgccagggaaggaggctgcttcaagtgggtggggcaccaagctggccaggaaggacagggcttctcccagcggtaccaacacggtggcacctccggcctgcatctcccaggcttgcttgtcaggcttcctggggctcccaggagccgctgcgggggaggggagaaggggtggcagcagtggcagtggtcgtctctgctccgatggtgactgccgatgacactgttctctgtgcgggtggagacaaagccggccactccagattctcctgcgcgcaggagaggaggagctggcgctgcttcagtggcgaggatgggtcgatcagtcccagccggtcctagggagagacactgccccagcctgagggcggcgcagcccaccccaccccaggaccctcctagcaggaggacaggaacgcaagccgacctcggggggtctccggcctgagaggggaacatgatcaagcccagggcagccgccagtcggagggggcagacgcggccccagtagcctctggagaccctcttccgaggcaaggagccacattcctgccgtcgggaccaccaaagcggatttctacaaactaaagtcgagaacttttcggcggcgaggcggcgcaccccgcgcgggagagggggcgcaggcgtcaccccgtcctcactcagcaacacccggcgccgcgccgggcgaaggctggcaaacttctcgcggccggcaggtgggctccgcgggccccatgggcgcaggcacaggtgtgcggggccacagccgggccttttgcagccggcgaccgcccccccttccccgcgggcttttgcacacgacgcgccgacggcagcttcacacgggttggcgagggccggataaagccggcggccgcggggcgcagcggctgacccgagacacgggagcgcttggcacgcggagccagagccggagctgcagccgcagcgggagccgggggagctcaggggccgcaggagccgggccggagtgagcgcacctcgcggggccctcggggcaggtgggtgagcgccacccggagtcccgcgcgcaactttcagggcgcactcggcggggcggctgcgcggctgccgggactcggcgcgggactgcatggaggccaaggagaagcagcatctgttggacgccaggccggcaatccggtaaggcgagagcctggggacgggcgggaattttggcggcagccgacgcacctccgcatttgccatcctagcagtggttggttttggctgcggcttgagctgggaccatgcaggaggggtggggtgaggtgagggaacgaagataatgggctgtggcccaaggaccgtctctcccttggggcgcagcccagattctgacccctgcccgcggggggcctggggccgggggattggcggttcccatgcctggagtcccgccccgcccagcactttgccccaggcagccccgccccggggaggccctgtgtcccaagtgcgctggagggggcctgctgttctcccagagcctgcgctctgttccttccccgcgctccactggacagcacgccccttggccggttcccagggtcttcacctcctctggcctctgaagggccccgggccccaggactcccattcccctatcatccccgtctgaatacaggcttctcacctctggtttgtcgagctcggagcgtccttagctatttttcccagtggacacaaggcctcacagagaaatgggactagagtcggccctccttacctcatctcagagctgagcgttccctctcttcccctctggccaggtcatacacgggatctctgtggcaggaaggggctggctggattcctctgccccgacctggcctggacttgcaggccattgagctggctgcccagagcaaccatcactgccatgctcagaagggtcctgacagtcactgtgaccccaagaaggggaaggcccagcgccagctgtatgtagcctctgccatctgcctgttgttcatgatcggagaagtcgttggtaagcacttttgggctaattaaatgaagttggtgcatggatagactggatgttcccagca

SEQ ID NO: 3957 - DNA, 6000 bp, Homo sapiens
gattacaggtgtaagccactgtgccaggcatggatctgcatcttaatagatgtgtgaccttgggcaaatagctttatgtctctgggcctttgtcttttcacctgtaaaatgggaatgagaataatagctactctttggccagatgcggtgactcacgcctgtaatcctagcactttgggaggccaaggcaggtggattacctgaagtcaggagttcctgaccagcctggtcaacgtggtgaaaccccatctctaccaaaaatataaaaattagctgggtgtggtagcagccgcttgtaatcccaggtactcgggaggctgaggcaggagaatcacttgaacctgagaggtggagattgcaagtgagccaagatcgccactgcactccagcctgggtgacaagagtgaaactctgtctcaaaagaaaaaaatagaataataggtactgttttttctgagacagggtctcactctgtcacccaggctggagtgcagtggtgtgatctcagctcactgcaagctctgcctcctgggttcaagtgattctcgtgcctcagcctcccaagtagctgggactacaggcacatgccaccacacccagctaatttttgcatttttagtagatacggggtttcgctgtgttggccaggctggtcacaaactcttgacctcaggtgatccacctgcctcgacctcccaaagtgctggggttacaggcatgagccaccgcacccagcctagcatttggatcattgataaacctggggcacttggttgtgaactctaaagggctgaacaattgtgaggcattattgttattattctgatccttgctcgaaatgctctttggttactttcattatagctgatgttctcctttcatctgctcccagatgacacaagtcccctgcccttctctgaagtctcttttgtcatttcccaggtggctggaatttgtgcctggagaatgtgaggtacagagaactcagtttaggcatgggattataaaaaaagagagagagagagagaactcagtttaatgttgccaccttcagttactatcatatcactttattaattattttatttttatattcatttatttattttgagacagagtctccctctgtcacccagggtggagtgcagtggcacaatctcagctcactgcaacctccgtctcctgggttcaggggattctcccacctcagcctcccaagtagctgggactataggtatgctccaccacgcccagctaatttttgtattttttggtagagacagggttttgccatgttagccaggctggtcttgaactcctgacctcaagtgatctgcctgcctcagcctcccacagtgctggaattacaggcgtgaaccactgtgcctggcctaattaatttttagagatgggtctcactatgtttcccaggctggagtgcagtggctatttcacaagcacaatcatagtgcattacagcctcaaattcctgggttcaagtgattcttctgcctcagcctcccaagtagctgggactacaggtgcatgccactgcacctggatattattattttattttacttattttttttaaagacagggtctccctatgttgcctaggttggtcttaaactcctggcctcaactgatactcccatctcaggctcctgagttgcggggattacaggcatgagccactgctgctagcttattattattttaatatatttttccatggaaggatagcatacctagaaaaaggtgcacacatcttgagtcttcagtgagttatcacgaaacaactacgtcgctgtaacctttgtagctatcacccagtaaagaaatagaacattaccagcattctagaagccctcattatgtccactttatgccccctcccaattcctaccacctccttcctccctctggcttatctctgtgttgccagagcccagcacaaagccctgtcaagaggcccagtaaacatttgttaaactaaattgaatctcaagtacttgtgatgtgaccttgagctagacactttgactgttttggccttaatgtactcttctgcaaaacagggacagcatttcagtgatttctatacctcccaaccctagttgtatatcagagcctttgaaaaaaatactttggcactaccctgaagtaattgaatctaaatctctgacggtgggtccccgaaaatgatattttacaaaagatgatgatgatgatgattactatgattgacagggtctccctttgttgcccaggctagagtgctgtggtggatcatagttcactgtagtctcaaactcctaggttcaaatgatactcctgcctcagcctcccaagcagctaggactaccaagcacagctaattttatcagacaatggtatttatttttatttatttatttttttttgagacagagtctcgctctgttgcccaggctggagtacagtggtgcaatcttgacttactgcaacctccgcctcctgggttcaagtgattctcttgcctcagcctcctgactagctgggattacaggcatgtgccaccacgcccggctaattttttttttttttttttttttttgagacggagtctcgttctgtcgcccaggcgggagtgctgtggcgcgatctccgctcactgcaagctccgccttccgggttcacgccattctcctgcctcagcctcccgagtagctgggactacaggcgcccgccactgcgcccggctaattttttgtatttttagtagagaccgggtttcaccgtggtctcgatctcctgacctcgtgatccgcccgcctcggcctcccaaagtgctgggattacaggcgtcagccactacgcccggcctagacaatggtattttaaaaaagctttccagtgattccattgtacagccatgatcccttgaacctcaccaatttcaaccaaactataggttcaaatttaagttccactacttaaagcatgccactgttgtgggttgaattgtgtcccggcaaaagaagttgaagtcctaatgcccagtgcctatgaagatggactaattaggatgcagtctttgaagatgttcaggttaagatgaggtaattacgttggatttctaatccaatgactggtgtccttataaaaaggggaaatctggctgggggttgtggcttacccctgtaatcccagcactttgggaggccgaggcgggtggatcacctgaggtcaggagttcgagaccagcctgaccaacatggtgaaaccccatctctactaaaaatacaaaaattagctggacgtggtggtgggtgccagtaatcccagctactctggaggctgaggcaggagaatcgcttgaatccaggaggcagaggttgcattgagctgagatggcgccaccgcactccagcctgggcaacaagagccagactctatctcaaaaaaaataaaaataaaaataaagtgtgggcggggaatctggacgcagagacagagacaccaggagaactccatggaataccagatagtcctaacaaaccactggaaggtaggagaaaggcatgggacagattctccctcatagctctcagctgaaaccaaccctgccaacacctagatccgacctccagcctccagaactgtgagacaatcaatttctgttgttgcagccacccagtttggggtgatactttgttacggcagccctagtaagcaatacaactacttgcatagtagccaggggactctcttcacctgtttcctcatctgtaaaagtggaattgtaataatgtgccagggtgcattccaaatagtttacacggattgtctcagtcattacatcatccctctgacatagtcactattactgtctctacttaacagatgagaaagttgtgaaacaggttaagtaacttgctcaaggtcacacggtaactaaatacataaactaataatacattcttcacaggattattcgaaagcccttatgagactgcagatgtggacgtgaaatcgttttgtaagtagtcggcattttactcgcgttagtgaggttctctgtatattcaggacttttttttttttttttttttgtcatctctgactctccttcctcttcctacgcgatacttctttccctcggcgacaggggccgctgcgctgggcgggtgccgacggtctctctagcccgccgcaccggctgctcgctggtgcctataagtgacagcgccgggctcagctaggcttcagtctgctgccgccggggccggggctagggttagttctggagctggaccaggaggagctgcagctgggccggggcggagcgccgcgtcgcgccagggccgcgaggaggggcgtgttgctgctggcccaccgcgagccgcccccagcccgcgccgaggcgccttcccgccaggccgcctgccttccgcctctttccatttccccggaatctcagcccggcgcgcctggacccctgcccctctctgggtggagaagctcccggccgcttcccggtttcactccttctcagcctgggctcccagccccctctctccttttcctggactggctctcacccccttcggtccccttcctttagctcaggctccctaccccttcctttagcccacagcccagagtcccagctcctcagtcactttcctcagccaaaggtcccagccttccttcttcctttcctttgcactatccctatcctgccccttcctctatccctagggctcagtttcccacatccgtcctcccccttcccaggcccggagttccagaccttttggtctcctttcgtggtcgttcctgggtccttgccccctttccccactttggagttccagattgcaaacccagcctccctccacccccagaaaattgcttccatggaaatgcctctctaaaacatgaacttttcctagagactacgccagtctctcttcccacttgctgaccctttgctacctatgtgcccggttttactctcatttgggtaaggtcgaggctggctctggaagcagcaccatggttctgcggtctggcatctgtggcctctctccacatcggatcttcccttccttactcgtggtggttgctttggtggggctgctgcctgttctcaggagccatggcctccagctcagcccaactgccagcaccattcgaagctcagagccaccacgagaacgctcgattggggatgtcaccaccgctccaccggaggtcaccccagagagccgccctgttaatcattccgtcactgatcatggcatgaagccgcgcaaggcctttccagtcctgggcatcgactacacacacgtgcgcacccccttcgagatctccctctggatccttctggcctgcctcatgaagataggtaagtcccgtttgctccgatgctgcggccgccaccagactggtgagcttcttgcctcatctcgcaccatttgaggctgtccaggagtaaggatctgaactacccccataaagtaggcagtctccatcctgccaccttggtccttctcaggctccagttctgtggcttctgatctgtgatctgaggcttcccaagattggagccagcactgtgcacagaagagagcaggattagagaatgggatgcctctgatcctaggtcccttcagtaaggcttccacgactggcaagtctcctctggctgggccagacccccaggggagccaggcaccccgctgtgtgtgagacagaaaggagtgtcttctggcgagtggcacattctgctctgtcaacagcaaccagtgcaatttatgacaggcttcactggagcgtgttccaggatggagtatatttctacttggcctgcttgaggagtttaagcatagtggagacctgggcacaggaaacttacaagtgtggtggaacacaggggatccccatattcccacctttccttcatctccagaatgttatctgtcagctttgcttgtccaggctagttaggag

SEQ ID NO: 3958 - DNA, 6000 bp, Homo sapiens
tgggtgctagggacagaaagatgatctggccaaattcctgccttttcaacagtcaatagacacatttattgagcatcttctatttcccgggcacagagaatacagcagtgaacaaaaatccctgccatcttcaatgagcttcagttttattaattaatttatttagttagttattttgagacatagtcttgctcttgttgcccaggctggagtgcagtggtgcaatctcagctcactgcaacctccgcctcccgggttcaagcgattctcctgcctcagcctcccgagtagctgggactacagatgcatgccaccacgcctggctaatttttgtattttttagtaaagacagggtttcaccatgttggccaggctggtctcgaactcctggccttaggtgacctgcccacctcggcctcccaaagtgctgggattacaggcatgagccactgtgccaggccaagcttcagttttaatctggagggatggacaatctacaaatagatccttaaaatctattcaagtagggagctcttgggggcctcacagaccagtgggacaaacatgtacacagatggtcacaacatggcatagtaagtaaggttacttaataaacatctggctgggcatggtggctcacgcccataattcctgcactttgggaggccgaggtgggtggatcacctgaggtcaggcgttcgagaccagcctggccaacgtgatgaaatcctgtctctaccacaaatgcaaaaaattagccaggcatagtggcaggcacctgtaatcccagctactcaggaggctgaggcaggagaatcacttgaatctgggaggcggaggttgcagtgagccgagatcaccactgcactccagtctgggcagcaagagcgaaactccgtctcaacaaacaaacaaacaaaaaccccaacatctattcagcccttactgtgtgcaaggagttcactaaggagggaagatcaacatggttcctgccttcatgaagcttacagcctaggaaacaaatgagtaattaattatacattagctacctgctctgaagaaaagagcagctgttgggatgtaggatcaccaggtggcctcttttagggagggaggtcatggaacaagtcacgtgaagagagaacaggagtcttaaggagaggacacgacaagtgtaaagtccccaagaagagaaagcattgatgggtgtgaggaccagagagaggaggctagtgtgtctgcagctaaatcagcaaaggggagagggaggagaggcgaggtgggcagaggcaagatcatgtgagacagaagggagctcttgggggcttacagaccggtgggacagacaaacatgtacacagattgtcacaacatggtacagtaaggttacttaataaacatctggctgggcacagtggctcatgcctgtaattcctgcactttgggaggccaagacgggtggatcacctgaggtcaggagttcgagaccagcctggtcaatatgatgaaaccccgtctctattaaaaatacaaaaaattagccaggtgtggcagcgggcgcctgaaatcccagatcagtgagacagacgccattggtgggagggaagtgttatgatctgaactgacacgttatcaaagggtcactctgactgctgagtgcagaacagactggaatggggagcaggagccccactagaaggccactgcagtcattcaggcaagagatggggagggctctgaagtggaaaaagcagatggatttagatctctagctaagtgctgcagcagctcagcctcattctgtgacagtcacagaaggcttcctgcaggaggtggtcttgtagtggtgtcttgaagaattagtttgccaggcaaatgaagtccaaggttgaggaggaccctctaggagagagaacagctaggatagaggaagagaggtatagggggaaggctctgttctatcttcttagagggtaggaaggtgatgggaagcacccaggccaggatagagagacttctagagccagaaatcaaagggttgtggaggtcaagccattgttgaaaagttgttaggtggggccaggcatggtggctcacacctgtaatcccagcactttgggaggtcaaggtgggtgaatcatttgaggtcaaaagttcgaaactggccgggcacggtggctcacgcctgtaatcccagcgctttgggaggccgaggcaggcagatcacctgaggtcaggagttcgagaccagcctgaccaacatggtgaaaccctgtctctactgaaaatacaaaactagctgggcgtggtggcacatgcctgtaatcccagctagttgggaggctgaggcaggagaattgcttcaacacgggaggcagaggttgcggtgagctgagattgcaccattgcatttcagcctgggcaacaagagcgaaactccctctcaaaaaagaaaagttcgagaccagcctgaccaacatggtgaaaccctgtctcaactttaaaaatacagaaaattggccgggcacggtggctcatgcctgtaatcccagcactttggaaggctgaggcgggcggatcacaaggtcaggagatcgagaccatcctggctaacatggtgaaaccctgtctctactaaaaatacaaaaaattagccgggcatggtggcgggtgcctgtaatctcagaatctcagctacttgggaggctgaggcacaagaatcccttgaacctgggaggtggaggtttcagtgagctgagactgtgccactgcactccagcctgggcagcagagtgagactcaggctcaaaaaaaaagttgctaactggaagagatatggtcaaatatatgatttgtgagggccagcataggaggggcctggaagctgctgagatgcagtgaggcgtacagagggaatacaaggggacagaacctgaaggactttttaaaattaattaattaattttattttttattatttttattttatttttttattagactttaagttctagggtacatgtacacaacgtgcaggtttgatacataggtatacatgcgccatgttggtttgctgcacccatcaactcatcatttacattaggtatttctcctaaagctatccctccccaagccccccaccccccagcaggccctggtgtgtgctgttccccctctgtgtccaagtgatctcattgttcaattcccacttatgagtgagaacatgcagtgtttggttttctgtccttgtgatagtttgctgagaatgatgatttccagcttcatccgtgtccctgcaaaggacatgaactcatccttttttatggctgcatagtattccgtggtgtatatgtgccacattttctttttttatatatataatatatatattttattatactctaagttctagagtatatgtgcacaatgtgcaggtttgttacatatgtatacatgtgccatgttggtgtgctgcacccattaactcatcatttacgttaggtatatctcctaatgctatccctcctccctcccccagaacccgaagggtctcttttcccctgagtgggcagttttgggggcctcagggacactcaggtggagatgccgtggacccatgggaggcacagcagagggagcatggcctccagcatcattcaatcctagctttacatcctggcctgctgcattgaaaccctgtgcccctgagcagcctgcaaatgggaaatgacaaaactcatgcctagagggtagctgtggacattagatgggaagttgcatgtaaaagctctcaaaatgtacattcggctagtaaggggtcaataattgctagctatatattgtcagttacaggtgtggcagttgtgaagtcagaactggcctggagatgattaagagatctgttggctcaaaaaaaaattttttaatgggtgcatagtgggtgtatatatttattgggatacgtgacctgttggcattcattcattcattcatttaaaacagggtttcactctgttgcgcaggctggagtgcaatgccatgatcacagctcactacagcctcaaatccctgggctcaagcaatcctcctgcctcagctgttgggtttcaagtggggactgatggcagtggaatatccaggatgaccccaggagagtgtggaacagggcttgggactaacctgggccaccatcgattaagagagggttaggagaagcagatgggggaaggaggggagaggaggggaggaggaagaggaaggagaggaagtgccccctaaggagcctgaggagaaccaaaagaggctggtgccagggcaggagtggtagccgtggggaaggctgcggagaggcccagttggcctagtaatggcgtcacccctgacctggccagagggtgtggtaggccagaggcagacacagcggatgaggggcagaagggaggcgggtggaggggtgcagtgaatggagagggagcaccgaagctgagcttgggcagccagagggcaggggccagctagggcccggcccagcggtcatggggcctgggtggagggtgtacaaagcggggcctgcaccgagccctgaaggcagggaagtgacctcgtctcgaatccagatttttgccactgcctctctccgtgacctcgaacgagtcactcatcttgtctgagcctcagtttcctcacctgtgaagtaaggatcaaagcagtcggtactttccagaattttcaagaagctgcccttggaggcacatagtaaccacgccagccaccagtcctggaccccacctgctttagtccaagccccgccccagacccccgaactcacctggccgcgcacactagccacgcccctaactggccccgccttcacctggctccgccccgaccgacgagccccgccccacctgccgctcccactggccacgcccccacctggccacgccccggttgcccaggtctcgctccgcacacgctcagccgagcccagtctgggagggacgcgcccggcagctgtccaccgatcccggccaccgcccccggccacccccaccccgcgagcccatggaggctccgggaccccgcgccttgcggactgcgctctgtggcggctgttgctgcctcctcctatgtgcccagctggctgtggctggtaactcgcggcagggtctggctaggggctcgacggggacggatggagcttgcacctcagccagccgtctccccaggagcagcctgggcttgaggggagggggctttccggccaagtgcaggcctccaggggtgggagagggggctccagctctgtgtggagccctgtgtgtaaatataggccccaggtgtgggggcctagggagcttcaggtggtctgggggaggtggctccaactgaatctgggaaccccgggtgtatgcaaagggaggggctctgggtgaatgtggggaggctctaggtgtgtgtagacctctgctgtggaagctccaggtgtgcgctggggcttggggatccaggggtgagtgtgagagcccagatgtgtgcagaggggcgagggccaccggagtgttgggtgggagggtgggcgggtgccacagcttggcttcgaggaattctcccttcccactccaccgcactaccaggtaaaggagctcgaggctttgggaggggagccctgatccgcctgaatatctggccggcggtccaaggggcctgcaaacagctggaggtctgtgagcactgcgtggagggagacagagcgcgcaatctctccagctgcatgtgggagcagtgccggccagaggagccaggtatggagctgagccctccccagattgagtgcccccagctctgaaccccaaggccctggcccctctccccaaacctcccccctgcaccttctctcaccaggacactgtgtggcccaatctgaggtggtcaaggaaggttgctccatctacaaccgctcagaggcatgtccaggtaagggggttcttgcacctaagc

SEQ ID NO: 3959 - DNA, 6000 bp, Homo sapiens
gtggctcatgccagtaatcccagcactttgggaggctgagacaggtggatcacttgaggtcaggagttcaagaccagcctggccaacatggtgaaaccctgtttctaccaaaaatacaaaaattaggcaggtatggtggcacatgcttgtaatcccagctacttgggaggctgaggcaggaggatcacttgaacctgggaggtggagactgcagtgagccaagatcatgccactgcactccagcctgggcaacagaaccaccatctcaaaaaaaaaaaaaaaaatggggtttgaagaccagaggtggacagtgatattgtgaaatagatatttgaaatagataacgaagcctccataaaaaaccaaaaagacaaggttccgagagcttcccaatagctgaacacatggatgttcctggaggatgctgtgcccattcccccatacctcatttcctggcatacaattcctaaaatccttggtatctccaaagtgatgccttttgtgtgctaatgatttcttatttgtttattttttagagatgggatctcactgtgttgcccaggctagacttgaatttctaggctcaagcaatcttcccacctcagcctctcaaatagcttggactataggtgtatgccaccatgctttgtatactaatgattgactgatggccagcagtctctaggtagcttcaggatggggctggtcactgggaagaccaaggcaaggttagagggttgggactttcagctccacccactgaaggggagagggactgaaagtcaagttgatcaccagtggccaatggtttaatcaatcattcctatgtaatgaagcctccataaaaaagcaaaaagacagagttccgagagcttcccaatagctgaacacatggatgttcctggaggacgctgtgcccattcccccatacctcacccaacacatctcttcatgtagcctttctaatttcctgtgtagtaaactgctaactgtgtttccctgtgctctaggagcctctctagcacatgaattaaacccaaagaagggattatgggaatcccaacttgtaaccagtcggaagttccagaagccctgatttgtgtcttgagggtgagagttgaggagtccctcaacctgtaggatcgatgctctctccaggtagacagtgtcagaattgaattggaggctgggcacagtggcctatgcctgtaatcccagcactttgagaggctgaggcgggcagatcccttgagcccaggagttcgagaccacctggccaacatggcaaaaccccatctttacaaaaaatacaaaaattacctgggcatggtggtgcacccctatagtcccagctactcgggaggctgaggcaggaggatcgcttgaacacaggaggtcgaggctgcagtgagccgtgattgagccagccttggtgacacagtgagaccctgtctgaagaaaagaaaaaaagtgctcacttcagcagcacatatactaaaattggaatgatacagggaagattagcatggcccctgtgcaaggatgatacacaaattcatgaagcgttccatatttttattttaataattaaaaaaaaaaagaattgaggccaggcaaggtggctcacgcctataatcccagcactctgggaggccgaggtaggcagatcacctgaggttgggagttcgagaccagcctgaccaacatggagaaaccccgtctctactaaaaatacaaaattagccgggtgtggtggtgcatgcctgtaatcccagctacatgggaggctgagtcaggagaatcgcttgaagccgggaggcggaggttgcggtgagccgagatagtaccactgcactccagcctgggcgacaagagtgaaactccatctcaaaaaaaaaaaaaaagaaaaaaaaaattgaatcggaggacacccagctggtgtctgctgcttggggcgtgagaaaaaaaacccacccacacatctggtctgtggcgattgttgtgttcagtgagagaatagaaaacgcaggccgggcgcggtggctcccgcctataatcccagcactttgggaggccgaggtggggggatcgcgaggtcaagagatcgagactatcctggctaacacagtgaaaccctgtctctactaaaaatacaaaaaattagccaggcgtggggacgggcggctgtagtccccgctactcgggaggctgaggcaggagaatggcgtgaacccgggaggtggagcttgcagtgagccaagatcgcgccactgcactccagcctgggcgacagaccgagactctgtctcaaaagaaaagaaaagaaaagaaaagaaaaagcacattaggtcattttggtttttttctttcctcttaactgtgtagcaggttcaggccacaaaacaagctatgctgccacttctgattatatgatcctacaatgttgctggatgtatctgtgtgaaggtggataacaattctgtagggagggagaaaaaagattctgtagaaagtttctgaaagcccacataggagaattacggttaggattcttaggattctgcagtaaggctatgcttactgtggtccctttgggaaaagaggccctgatgtgtcactgggccccagtagtgactacacatctcaccactgggtgccaggtagctatatatcttaagttgggtattatcagaaaggtagagcagcagttccatatgtgatggaagctgggcgcattggctcatgcctgtaatcccagcactttaagacctcgaggcagaaggatcacttggagccaggagttggagactagcatgggcaatgtagtgagacctccatctctaaaagaaatataaaaattagctgggtgtggtggcacatgcctatagtcccagatacttgggagggtgagttgggaggatttcttgagcctaggaagtcaaggctgcggtaagctatgattgtaccactgcactccagccccggcaacagagtgagaccctgtctctaacaaaccaaccaaccaaccgacaaaacaacaaagaggccaggcacagcagctcacacctgtaatctcagcactttgggaggtagaggtgggtggatcacctgaggtcaggagttcaagaccagcctggccaacatggcaaaaccccatctctactaaaaatacaaaaaacattagccgggcatggtggcgcgcacctgtaatcccagctacttgggaggctgaggcaggagaatcgcttgaacccaggaggcagaggttgcagtaaaccaagatcacaccactgcactccagcctggggaacagtgcaagactgtctcaaaaacaaaaacaaaaacaacaaaaaacaaagaacaaaacaaaacaaaaaatatatgatggaaatggtatattcaaggctgagcaaaggggtctaaaaggcttgagtaaattaaataaacagggagctcagagtcctgtggcgcccaactctgtttctctgggttttctctttgacccatatatatggcctcatggagtgttcccagcaaccaacagataatggaggaaaggagtcaaactcaattcacagataagtcagtataatattttggtatcagctggaaacggaccactctattacagccccatttgggggtggcactgaataatagtgaatcctcccagggggcagaactaggagcagtataccgtgttgttccctctgtatgcagagagagagagagagagatggactgaagtacagacatacaccaattcctaataagaggcaaatggcttggctggttggtcaaaggcatggatggaacaagattggaagattgggaataagcaggtgtgggttaggggcataagaatgaactctgaatgggcataaagcacctggatctctatgtctcatgttaatgctgaccagagatcatctgctgcagaggaggctctacagcccaatggccaggatgtcccatcctgtggatgtcagccagcctctaaacttagcctcactattgccttgcaatagacctatgagtgtccaaggtggtaaggatgggggttagaaatgagtccaacaacttgggctccctctcaccaaaactgatctggcaattgccaaaatatagccaatctgccagcagcaggtagcaatatggcaaaatttctcaatgagaatagccagccatctggtggcaggtcaattatttcagaccccttccacttgggagaaggcaatgattcatccttactggaatttctatgttctccaaatagaggttgcatttctgacccatagcacttcaagcatcaccatccaaaggctttaaagaatgctcagttcattacctagggccaggggacccatcttgaaactcaagatctatcatgatggccacatgaacacaggcttcactggtcttaccatatgcccatgacccagaagcagccagcctgagagaacaatggaacaaagtgacttaatttccaaagttctgggggtttataaacagcatatggtatgtcacatgactactgtgggattggaaaaagatcatgtaaatagagcactttgcacagaccctggcatgcagcaagtgctcaataaatgataggtgttgtttactaattggactgaatggtgaaaggcctgtgtgccccagggggagctggtgatcaggcttcactaagcccagtatggccgtggctctcatcatagtgtgacatgctttgaatacccttagcggctccaaaagtcctcagcttgaagtgcatttttctgccagcaggcagcacacaaatgttcccgctgggcggagctgggagagaggggaaaatgaaactctgcagagtgcaggagctgggagagaggggaaaatgaaactgcagagtgcagaaatagaaactccgacagggattggctgcctagggtgagacgtgggaggatccacaagtgatgataaaaagccagccttcagccggagaaccgtttactcgctgctgtgcccatctatcagcaggctccgggctgaagattgcttctcttctctcctccaaggtaaactcaggagctatgaagtgtgggcatcaagctgccaccctctgccaggctgcctgtctgcctgtaaatctcatgttctgagagccaggaggccccttctcctgggaggcagcactcctgggtcccttttagtgctctgggctgggacttgtctaagaggatgggttggagatttttagggagatgggatgcaaaaccccaagtggcatgagacccagcttacaggtgcaatatcagcgatctgtggccttaacactgtcacctcttggagccttaattacttcctctgtaaaaggaaagttaagttgcctttgctgctcaaaggactggatgattttagaatcccctttattataggatccaatgtgacagtgagttcatctttaaggatagatgaagccatctggagtggttgttaaaaatgtgggcttggtggccgggcgtggtggttcacgcctgtaatcccagcactttgggaggccgagacccacggatcacgaggtcaggagatcgagaccatcctggctaacacagtgaaaccctgtctctactaaaaatacaaaaaaaattagccgggcttggtggtgggcgcctgtagtctcagctactcgggaggctgaggcaggcaggagaatggcatgaacctgggaggtggagcttgcagtgagatgagattgcgccactgcactccagcctgggcgacagagaaagactccatctcaaaaaaaaaaaaaaaaaaatgtgggcttgggtattagccaattgtgggtttaaaccctgactttgccatgacctggctaggcagccttgggaatattacttaacctctctgagcttcagtttccttatctataacatgtggttgataacaatggtacctacttcgtggtgttgttataggtacaagtggactgcgtgccataaagtgctaagtactcaa

SEQ ID NO: 3960 - DNA, 6000 bp, Homo sapiens
gtgcctggatctctgaggtttttcctgaggatgaggtcagcagcagggaggagggggctctggcagaggctggtgcttaggagggaattacctagtccttgcagcagcacactggatgcgctatgacaatccccactctacagctcagagtgaggcagaggctggttggagaccagggccaggagggagccgggttttccagctccccatggatagtacggctgcacccatgatctaaaatgctccgtcctggggtgtgcccagagctgttattcagcaggaggctgctggctcggctatgcagactttgcagccagtgctccttctgcctgctggtcccatctccctggagccttcagcctgcagtgcctgtggcagcagcagactaggatatggtgtcattgtgcccctgggtgcagccagggacccctggactgcctggctgaggggaggcctccttggagtgtctggcagaccgttggggtcccctgcctgcccactggactcagcagctggtcattggaaggtctggttgtccccaggccacaggcctgtgggctgtccttgccaggctgaccctccaggctgacttcaaggcctgggccccttccacaggcaggggagtaggggagggaccctgtgggttgcacgtgtaggccctgacccctggtgaccgtgctgggttcggggcaggagacaggagagaatgctctgccgtttctcacatttttcaggcctttggctttggccctacacattccagccccaaacctcaaaggcagaagtgaggtggggcttgcagccagaagggaatcacaggccagtggtctggcaggaagctgaccttcagcctgggtgagctgcagggggcacccaggagcccctcgggagaagacagccctggagctaccttggctgccaccactcacatgccgcccacgaagctgtccccaaggaggacctgtgtcctggctctgctcctgaccagctgtgtgtcttgcagcagatcactggccccttgggtctacgggagctgatcagtgcctctctgctgccttcctctgctggctagggctgggggaggctcagctgagaaagggtttaaaggacaggaagaatcatagtgacaatcgtgatcaaaatgcttcccactgtgcagtccttaccgtgacccagccccttctaagtgcttcatctaggttaatggaaaggacacaagactcccaaactctttgtttaaatacaaaagctggcagagtcgtgggttttatttttacctccaggcctatgggtgaagagggaagttccagtgatgttcttctgacttaacaaagaaagcttacaactaattctgcctttgaggaaacagagctgtctgtttaaatattcatataccatggcagcaaattattaagccagataaccagccagaattacagaccttttcaggattaaagatgactctctaggatctgggaaccatgtctgaagtcagggggtcttagaagattcctttgtcagaaataacattgacaagggcagtttgacaagcagatttgtatctgctctgccgtggctgcggtggcatggaacatttccttgtccttatcttgatgaattcagagggtctgaagttttcaagggttctaccactccacaaagaaggtatgaaaagcaacttgaagaagctcaaaacttatcattcgtaacggaaaacagcagaatataaatagtgagcttatgtggtgttgccacctgcatgtacagacaacgagatgggcattatcattatccccgcttggcgcaggaggaagcggaggctcagggaagttcacgacttggctggggtcacacagcaaggaagtaagggctgcacttgtgcagatggggactgtggtctcggtggagtgtgttgggctccagcgacggggccccaggctcagctgttgcttccactgagcagctgtatttgttccctgcggccgctataataaaagaccagaaacacagtgactacaacagacatttattgtcttacagttctggaggccagaagtcaggaatgcgcctcgctgagctaaaatgaaagtgattccctttcgagcctctagaggagaagccatttccttgccttttccagtttctggatgccgcctgcactccttggctcatggttcttcctccaactgcagagccaggagtgtggcatcttccactccctctctgactctgatcttccttcacttatggggacccatttgatgacctcagggccatccagataatgcaggataatctccccacccacctcaagatcctgaatttcatggcgcctgtgaagtttctttgccatgtaaggccatgtacgcacaggttccagagattagggtggattttttttggggggtgagaggcactattctgcctatcacagtggctttggccaaagggtctgacctttgggataatagccgtcctctccacagggggtttgttgggaatgacaataaagtgattcaggcttgtactccacagggagtgactgaggtgcctgccaaggggccagtgtgtgctggagcctggtgacccggtgagagacaaatgactgcatcagaactcctgcttctgcgagggaggtagtgcccgaggggactcagaatcagacagatcaggggttcaatcccagctctgcctcctcctagcagcctgagtacgggtgagatcggggagcagggacgggctggaagggagaaaacaaacagatgcattcacgtgacctcatttcaccttcaccgcagccctgccaggcaaatttctgttccccccaaccgccccgccgttttgcagaggtgaaaacaacagctcagagagatcaagtgccttgtctgacaccacacagctactaagtggggagctgggattccccatgccccaggattcccaaacggatgccacctactccacctccagggctgtctgccacatctgcgtcctcctaggctgtggcttccttaatatgttctttaaattgacttactgccttttttatttaaatgcatttcttttaaaatgagactttatattactcctataaatggaaaatcacaggattcatggactagttatgtatatttttataatgcacattaaaatgaatttatcaccataaaaaatgagaaatgtttacccatagaccatgtacaattattccacatgctgtcagtgtgtttcatccctctctttgggagttggctttgcacctgtcctggtttcaccaaatcacaatgttatgaatggctatcatttattatggtaggaaatcgtcaaatggcttctgtgcacaatcaaatgcagactccccagcatggcctcagggccctcctggcccctggtttcctgatctccagttcctctggtcttgctactcttagacaaaggaggacttctcttggttttctgcctacccagccagaagatcccaggccatgggcctgtggagccaaagttcttaaccactgcactgtgtcacctttctatgatgtcaggcctcagcaaggcttatgaaggaacaggaacagccttgaaaatgaagttgggaagggataggccaggcctcccaggagcccaaagcttgcagagtccccttggtctcattggcacatggagaatggattgatcaagtccaccaatcaagttttgtgggtctaacagagcaactcctgccaagtgggaggagcttagggactttctataacctctcctggggcagaaatgatgggctgcagcagtgtccaatcctaactccatgatctcctgggagggcagggcttcatggcagttcctgtctgctctgcactagaagcttggcattgcaaaggggctcagctgtggaatgaagcagggcttcttccagaaatgttgcatgtacttcctattccctttctttattgcaatatggataatttatcatctgaggagggagtagagattccagggtagcttgcctaagagttgtggcttattaattccaactttttgcaagatcaagggggaaaagcaatccctgattttgtgtgagtatggggattgggtcttgaggccctgaaagtgaggttcgggtctcacagattgctgtgaagagttattgacccacctagaagagaagcctagcccagggcctggcgcacagttgatgggtttgcttcctggttattcttccgtccttgtctggagccctgcacgcctcttcgtagcttaggaagaacaagcttctccctgcggctcagggtgaggaagtgggagagaacaccagctccagggaggcttctagcaccagtcagcctcagttaaaatccttgcaccttcattgactagctgtgtgaccttgcacgaatcattccccctctctgtgcctcagtttcttcatctgtaaaatggggatcataatagtacctctctcaaaggattgaggtgaggatgaaaggagtgaatccaggagcatgcctggaagaggcaggaaatgcctcctagacaatagctatttttgcagccagacagatctgggtttgaattctgccaccagtgctaactactgtgtgatttggggcaagtgccttgacctctctggacagctgtttcctcatctggaaatgggcttggtaacagtcctggcttccaaagttggtagtgttcttctagtaagcaagctgtgtgaaacggtggaaccctggccctggtgcagagaagggcatgatgaccgtgttagggtctgtcctctctggaaccccctcctgggaatggcagagggcagtggggtgctctgaggcaggctgctgccctgtccccactccccctccccagctgccccgccccagctgtgacgaccttgtccctgcctgtctaaggggcaggaaggaagtgaggagggcagccagcagcttccccttctctgccctgctccaggcaccaggctctttccccttcagtgtctcagaggaggggacggcagcaccatggacccccgcttgtccactgtccgccagacctgctgctgcttcaatgtccgcatcgcaaccaccgccctggccatctaccatgtggtgagtgtgcgggccccgggtgtgtgtgcgtgcgtgcttgtgtgagtgtgaatgtctgcggtgacccgtcatctacggagccccacaaatgaaagaactcctgctctccacctctctgggggaccctgggcaaatccctgtcctgctctgggcctcagtttccttctctgtcaaatggctgggggtaccctggggagatgccgcaagagtgaggagtaagggagctggaatccactttccaggcaaatgtaactgacgttcactccgaggctggctccgtttctgcctctgtgagatggggcacagcagcagccggaaggttatttgtgtgcaaagccaacagcagatgtgaaagtgctttggaaggcagggatcttgggaggaacgtgggctgggattgtttgaccgggatgtgaggtcggccgcagacacagccccgattcttcccctggggcctggagggagcctgggccactcgaggggatgagaagtggggatctcccctttgtgcctccagtggggaggcaggggccgtgtcctctcagcttccagctcagtcaaaccacggccttctgcccaccaaagagaacttgagacctgtgctaatcattagggtaacttgtccggcccaagctcttgttgggcaacttgtgaagtcacggctgtcactggttcctcctttcctggtgactcacagtgtggtcttgggcaagtcacagtgcccgggggccaaggctgcccctctgcctggggtggctgagggtcagtgtccttgtactgtcctgcctagacccaccctactcccaaactcctggccacactcatctcccctagacccaagcgacttcctcctggggtgactcagggcctgtggttaacagttttctcatgagtctggaag

SEQ ID NO: 3961 - DNA, 6000 bp, Homo sapiens
ctgtgtctagcagccatgtgtcctggggtgtcacctaccctctcaccctacaaggactttcccagcacacagggaggtcagggaaggctggccgagcctggctctgtactaagggcggggcatggctctgtgagaccctcatatgggccaggtcccttcggcgggcaggaggctccccacgattgaggacccctgttgtgggaaggccaagccttctcccagtcaccctggtccggccacaggccttgcagatccttccccagtgagatttccactcactggggcaccagatggcttctgagtctccccagcttcccctaggaggactttgggatcctcctgatctggagccctcttgtcagagccctgttttggttcctcagttttgggggtcactgacctccaagactgctgtcacttggactttctcagaagcaagcctgggctgtggcctccatcctgactcttgggcaagaccggaagttgtggtgggagatggttggggtggggagggagcaggatggagatgggggtggcgaggggaggccgggacttgttttgcaagccctgtgattgccttgagctgagacagcacttgtgtttgggaggtctggtaaggatcataaagtcccctctgcccacgggggacagctcagcacagggtgaaaagccagggctctgtcatcacatgcctggttcaaatcctggctgcccacttcctggctgggtgacctgggataaattattgaactcctgtgagccccagattccccagctgtgaaatgggacgaagtagagagcaagcacctggacagggctcactgtgtgccggactccagggctggccgctcatttggttctcatagtagcagccctgggaggcaagtttgcttgtcgtgcccaaattacaggcctgtggggaggagtagatgagggtgtgtttggcaagtgctcagaacagtgcctggcaggtagtaaggcctccatcaatcttggcttttaggatgccatgggactgttgaggtccagagagctggttgtcttagccaatcccctgggggacaggtagagtcaggtgacagctactgagcacccactctgtgtcaggcctgggcgtgccactctgaataaggcatcttaggctcacctgagtggagttcagagatgccgctgaggcgtccccacccctctgctgcttggttagagctaggaggccctgtcaagggcagagaaggctctgactggggtgggggtgaggtggaaaggttgagatgtagccactaggcgtgccttgtggggttccccaggggccagactgcatgagtatgtctgcatgttggtgtgtgactgtgtgaatcccctcggtgactctaattcattcatcaaacgcctcccaatacaccactgggcctggcattgcagtttaactgttggcctgggtcaggatctcagctctcactgccagtcgtggtgcctcggcatatctcctatcttctctgtgtattggtttttcatctggaaatggggctaatgtgagtgtgcatttgatagagcagtgcctggcccataatcagctccacttgggcccttctatagctactgttcatttgggatactgaatgctcccacttttgagcaagacagacagtagggactgaaagcagggtggggagtgcaggatgagtgtgatcaggatgccggcaggacaggaccaggcctgatcacccagaggacatcaggaagacttcccagaggaggcagtgtgtattctaaaggccggagggggctgtgactattgtgccaggaggcggcagcagctggtgcctgtgggtgaggttatggtgctatgaagggagaccctgagtatgtggggatgtggctccaatgcacaaggaggcctgggcaagggtgactgtgcagatgacccatgtgcttgagggcaggaaatgtgtgcatctgtgaaccccagggagacctgggacccggggggagcaagatgagaaggaccttcaggggcccagacctgtcttagttctggctgtgaccagtgtctttgaagagcagcaggtggcgctcctggcctgtccagaccaaagattctccactgccccgcccccacctcttccccaggatgtcagggaagtggagttgctgcttccagaagtctcagagctggcaggaacctctgaagatgggccatgctcactgcccatcttactcatggaaaccatcctaatggtctccctgctagatagttctccgagccttgaatacctctcaagacaggatacttactgcctcttagaattgccactgctgtctgtggccagctgacatctggctcctcataatccccaccctaaccctgctggccctttgggagcgcctcagggttggtatgttcctgggatctgctcagcatctctgaaggatgatgttatccctacatctgagtcccttcctttgtaagcttcattcccagccaccttcattgaactccattacgatggcagggaagagctcatgtaatcctcacaacctggtacctggcctggcacacagcaggcacccaatttatgcttgctaaatgaatgaatgaatgaactctgcgtggtcattatctctatattacagttgggaaattgaggctcagagaggttaagtcacacatccaacacaatacagctcataactggcagaactgggatttgaacccagatacttggccgacccagagccagagctcttcaattccaagctgtgctacctcaacagaaaccagtttcccacctattgcaccccatcagcctccctgcccatctccccaaggtgccagtcaaatttggatcgagcattgatgtcatgccaaaagatttgagaattgaattttcagaggctgggacctcagaattcctagttcgaaagtctccctgtcttccctgtccaggatccctgtcaaagggtggtgagcttgcctttcataccctttagggactgggctctccctccctcctggggagccccttctaatttatctctactttatgttgagttgacctttgtcccctggtcctcctcccaagggccctgcaggacaagtacagttacccccaacaccaaaaacccatggctggtcccccagagtctcttcctcaaggcctgcccctccattcatcctggttttggttcccctttccttgagggaattgttccagtttcaactcaatttcgttcccctattttcttttcttttctttttttttttttttttgtttttgagaaggagtctcgctctgtcgcccaggctggagtgcagtggcgcgatctcggctcactgcaagctccgcctcccgggttcatgccattctcctgcctcaccctcctggtagctgggactacaggcgcccgccaccacgcccggctaatttttttgtattgttagtagagacggggtttcaccatgttggccaggatctcctgacctcgtgatccacccgcctcggcctcccaacgtggtgggattacaggcgtgagccaccacgaccggcctgatttcattcctattttctaatggcaggctctaagctgggtgctgggacacaggggccagagaggagagtaactgagggtagagacgtccagccagctgtcatcagcaaataacctcttcttgctggctctcagcttccccacctaagaagtgaagatattgacagaccgaccttatggggttcctgagaaatgatataacacatgaaagcgctgggcacctggcatgtggtcagggttccagaaatgtttcactctcccctatcttgccccaaaacacttggttttgagccccagtaaatgggaaacacattcattgattcagcaaatttggattgagcatcgatgtcatgccgagctctgtgctggtgctggggacatagcagtgaacaagacagacacaaaaccctgcccccgctggagctaacacgccattggagacttggagaagtaagaacagcatggggtatgccgctggggatgaaggtgaagggggaaaaggcaccgtgaccacacagggtagaaagaccaccagcgctagagactgccactcagagatgtacttttctcgccatcctgcactggagggggtggtcccattcaaccatggggggtctgagtctcagagaactgggggccttgctggaggcgcacagctggtgtggaagcagctgcgctcaggtctgcgtggcttttcctctgcagatccacagtgacagggcccagaagtgaccacccccatggtcccctggggagaccgaggcccagagagggccgggccctgatctgaggtcacacagcccctgggtgtcctggaggcatgaaagcccgtggtcttggatgacctctggcccactgggtggactggctgagtgtgtgagggtgacgatgggagtccaggaagagacacgtgcgtggagccacagggggaggctgtagatgaaaacgcccatgcgacccctccgctcggcgacttcagggagccaggcccgggccctggtatcccacgcgggacccttcccttctacctagcacggcggccgcggaggtgcgtccggcgggctccgcgacctccagccccgggatcggcgaggccggctgctcactcaggtgtccgggtgcccactcggcagcgcggggctccctctgggtgggggcgggggctgggactggggtcagagggcgcggagccccgcggggggcgcactggggcccgccccgccccgggcccctcctccgttccgcccgcgctgggggcggcccggcggcggcggcggcggcgcacgcttcctgcgggcgcggccgctgtgggcgcggagctgcgaggcggagccgggcggccgagccgggagcccgcgagcctagagcgcgtcggtccagccgccgggccgcgccgccgccaagcagccgccccgcgcgccgcgcctcgggaacaaaggcgcccgcccgccgcccgccgcccgcgcccgcgccgccgccatgaagccggggccgccgcaccgtgccggggccgcccacggggccggcgccggggccggggccgcggccgggcccggggcccgcgggctgctcctgccaccgctgctgctgctgctgctggcggggcgcgccgcgggggtgagtgacacgcgcccggatccccgccacggctccccggggccgccccccgcgcggggtgccggtccccgcccgcgaccccccctccgggaccccgctccctcccccccggctgcttcccccggggccgcggtccctgccacccctcgaccctcccccgagcgcccctttctgcaccctgctcccccccctccggaatctccccctagctggcatccgcggggagaggccgcccccgccgctggtcatcttcggggggcgcatctctccttccttttgggacccctccccagagggaatcccgggagggaacccgatcgcgggtcctcagccctgttcccccacctcccagtggctccgggaactgtctccccggggacgaagcgggacccctgcgctggcctgggaggcgcgagaaggacccggcggcgggctgggggtcgccgtcccggctgggtgtgtcttggggtgggagtgagcctggcttttgcctcgtgggtgtgcccagaccatggccactttttgggaatcggatcggttccccttccgaggggagggtgtgcatttggttcttcccagggtcgcggcagccggccagggcagtgggcccgggaaggggaggtggaggtggagggtgacttggtgaaggtgacctgaggggggagtgagggtaaccctgtgtgtgggcgtgtgtgggcgtgtgtggccaactcagtgaggggtgcggggacctgtggggcgtgtgcaggtgaaggatgtgtctgccacatgggtggatgccagcgtgccctcccgtccgtggtcgtgggagggtgacccattgtgcatgatgtg

SEQ ID NO: 3962 - DNA, 6000 bp, Homo sapiens
actctgtcgcccaggctggagtgcaatggtgcaatctcagctcactgcaacctccgccttcccggttcaagtgattcttctgactcagcctcccgagtagctgggattacaggtaggcaccaccacgcccaactaatttttttttatatttttagtagagacggggttttgccatgttggccaggctggtctcgaactcctggcctcaggtgatccgccttcctcggcctcccaaagtgctgggattacaggcatgagccactgtgcccggcagaccattacttgtttttctaacccctgtgtgtggtgggcccacatagctcctgctctcaaggagctaatgctctgtaaaatcagccaagagtactgccagcttgccccacaggggcactgggaagattaatcagcgaatggcacttggaatgcttcagcaaaagcactggataaactcagggcacttatgcgtgaaactcactgctaggggtgtttcctgctgtaataaggcacctgcagcccagttcctgatctgtttgagatgtggagagagtaaaaccatgttacagccttctgtgggaagccatttggatgtcggggtgagagcatctctctgctttccggggggtaagggaatgtggcagtggtgtcatagtctaggacctttccctctcagaggcagatatttttttcagcatttcacaagggtttccagcttattctgaggacaccagttattgactgaagtcagaaacgaatatcatgattatttgggcttcagaggcagacaaacctggggtgaatcctgtttctgtcatttcttctctctgagcctctggttccttctttttttttttttttttttgagacggagtcttaccctgtcgcccaggctggagtgcagtggcatgatctcagctcggctcactgcaatctccgcctcccagattcaagcaattctcttgcctcagccttctaagtagctgggattacaggcgcacgccaccacgcctggctaatttttgtatttttagtggaaacaaggtttcaccatgttggtcaggctggtctcaaactcgtgacctcgtgatctgcctgcctcggcctcccaaagtgctgagatacaggcgtgagccactgcaactggccttttttttttcttttttctgagacagagtctcgatctgttgcccagggtggagtgcagtgttgtgatctcagttcaccacaacctccgcctcccaggttcaagtgattttcctgcctcagcctcccaagtagctgggactacaggcatgtgccaccatgcccggctaatttttgtatttttagtagagacagcttttcgctatgttggccaggctggtctgaaactcctgacctcatgatctgcctgccttggcctcccaaagtgtggggattacaggcgtgagccaccgcgcctggcctttctcaagtgttttcatacgttattatcgatacgtgaaagagcccatgaggtagctgattattatttccatttaatagttgataatacttcccttttttaatgggggtaatagtaccttcttaatagggtcattttgaatcataaacttgataatagattttattttattatttatttattttgagatggagttttgctcttgttgcctaggctagagtgaagtggcgcgatcttggcttactgcaacctccgccttctgggttcaagtgattctcctgccttagcctcctgagtacctgggcttatagatgcctaccaccactctcggctaatttttgtatttttagtagagatagggtttcaccatgttggccaggctggtctcaaactcctgacctcaggtgatccacccgcctcgacctcccaaagtgttgggattacaggcatgagccgctgtgccgggccttgataacattttaaaacgtttcaatcaggacttgaaaaagagtagatgcttaataaaaggtaactatggctgggtgcagtggttcatgcctataatcccaacactttgggaggccaaagtgtgaaggttgcttgagcccaggagttcaagaccagtctaggcaacatggcaagacctccatctctacaaaaataaaaaaataattagctgggcatggtggcatgggcccatggtcccacccacctacttgggaggctgaggtgggaggattgcttgagcctaggaggttgaggctgcagtgagccatgtttgcactactgcattccctctggggtgacaaagtgagaccctgtcttaaaaaaaaaaaaaaaggccaggcgcggtggctcacgcctgtaatcccagcacttctggaggccgaggcgggcagatcatgaggtcaggagatcgagaccatcctggctaacacagtgaaaccccacctctactaaaaatacaaaaaattagctgggcgtggcggtgggcgcctgtagtcacagctactcaggaggctgaggcaggagaatggtgtaaacccaggaggtggagcttgcagtgagctgagatcccgccactgcactccagcctgggtgacagagtgagactctgtctcaaaaaaaaaaaaagggggggggcggtaaaggtaactactattggagccactattcttatccttatgttgttaatgttgttattacattattttatttcagggccagaaggagagctaggtggagggaagggtcattcacttggtcagacaatctactagatgaaaacaaacaagcaaacaatctgctagactgccccaaatagatccatttaagcaggggagaatctgaaaacaggcaattacaattccatgttaagtactatggtagagtattgcacaaggtgttttgcaactttatcggaagaatcaataactcacagacgcagcaaaagttttgcagaggtggtagctctttctttcaaatcagtctatgtttccaggaagtagaaaatactgcttgctggaggcagacagaatgcaagtgagcccagtctgtgctcctcacctaagggccttgctactgatctgcagcccctcctgctcctcaaggcctctctcaactcccacacagccctgctagccagccttgccctagaataccccctcctgggccacctggtggtgaacatcctggactctgtgctgtggcttgatgcggctgagtcataagacctttctttttactgctaagcgctaatggaagccttctggtcagaagcaatgccccaagtctaccttgtggggaaggtctaatgacgacagatcactgcttctccccgcagggctggatgagcatggatgtggtggcgaggtgggggagaagcacccacgggagcatcttcatttcttcctatataggcgccagttctgggcaggcaagacttcccaggggtggacagaaagaacagaccctccccaacccgcaattcccagggggagacatctccctcccaagccagcctccaatgccgcactttgccatctggtcgtggcccaaaccagcctcctagctcgctagtgaccacattttccaaaccaaaactcaggacgcatgatctggcaaagaatttctggctagcttccaaatgcaagaggcaaaaacctttccacctgagaatctctacgataatctgcgtcgttaaaggtgacattaagtcggaaagcttgaaattcagggtctcttctttctcactttctcaactcaagcgttttctttttctttcttttttttttttgagacggagtctcactctgtcgcccaggttggagtgcagtggcacgatctcggctcactgcaaactccgcctcccgggttcaagtgagtctcctgcctcaacctcccgagtagctgggattacggccctccttccgggcgggcgccaccatgcccagctaatttttgtatttttagcagacacagggtttcactatgttggccaggctggtctcgaactcctgaccttgtgatctgccctcctcggcctcccaaagtactgggattacaggtatgagccaccgcgcctggcccttctcaagcgttttcatacgttgttatcgatacgtgaaagagcccatgaggtagctgattattatttccatttaatagttgataatacttggaatcacttgcccaagatcctacatcctgaaagtctgaattttggcttgtcagggacagttcttagggtgggtgtgtgtcttgtgggcagagctgggggtggcgtattaatatcttcgacgaagatgcacacgccattcatttggggcctcaggaagggcagccgagaactgagctggccaggttcccacttctgagttggaaatccccaagcccaggacgtggcggccaccccgtcccatcaggatctgacccgaggccttagggccaagtagcgagaaagaacccttcgaccttgcaggtcacacctcggctgcaggccctcgacccagcccaggtgcggatgggcggggcgcagcgtgggcgagcgactccccaggccacgttctgccttccctccccgatcacatggactcgccttccgtagccgggagtgcggagcggaacgaaccacgaggaggaggagcgggggaggcgcccagggcagtgggtcagcgccccgcggggcaggtgggcgggcccaactgcccgcgagccggccagccagccagtcagcgaacgcggagggcgggccggtggccctgcgcgccgcgccccgcagcgccccctgaggggcggcggcgggagctggttccggctgcgcgcgcagcggtggtggtggcggcgcgatcggccgggctgtaaccgtcgtctgtccgggagcggctggagcggcagcggcggccgggcacggcgcgaggtgacgccacagggcagcggcggcagcggaggcagcggcggcagcaggagacgcagcggcggccgcagcagcagcagcaagacggactcgtggagacgcgccgccgccgccgccgccgggccgggccgggtgtcgcgcgccgaggctgggggggagtcgtcgccgccgccgccaccgctaccgccgccgccgccgccgccgaggtgactgaggagagaggcgcctcctcgctcccgccaccgccggacttcaatgcccagtccccagctcgccagcgtgagtgcgcccctcccgggcggcccccgcgccggcgccgggggcctcggggaaggggagggcgggaggcgccgcagccattagtgcaggccggagacacgtccccggaaggagggccgggccgggccggggcgggggagcgagggtgggtgagcgaggggcgggctcgtgtgtgtggaagggagagagctgtgcgagcgtgggggagagtgagttggtgaagggagggcgtgtgagtgggggacagggctgagtgtccgtgcgaggaggtggggggagtgggagcgcgtcgggaggcagtgtcgatgttgggggaatgtgggtgagggcaggggagggtatgggtgtgtggggagcgtgtgggcatgaggggtggtggtagaatgagtgagtaaatgggggaggagagagttgagagtgtggtaaagagcgggtgagtgtggggggagaacatggtgtgtgtcggtgagaaggtgcgtggcagaggcaggagtgtggtagggtgtgccggcgtgtgtccagtgtgtgagcaggcatcctagaggcccttccccttggtctttgtgtgtggcgatagtgaaccctggtgtgttgggttggggagttctttccgggagcatcttgtccgtgggtcttcaggttcaagtatgaggaaagggggtataagtctcctccagcggcactatgatcttctggctctgggattttaatttttttcccccagaaaggatgtgatgtgtttttttgttgttgttctatacatttttttctcccacgtttcatgacttcaaagtaaattttcaaatttgtcaatgatgccatcctatcctagtctggggcccctgagagctaacgaaaagaagtt

SEQ ID NO: 3963 - DNA, 6000 bp, Homo sapiens
attgctcctccctttggtccagccatatggttcaggtactgcctatcaatcatagcattccatcctccatgaccacagatgtgggtatgcagccaaacctcaccaatcagacttgttctgaagaattttgagaatctggaacaaagggaagataattactcctctctggtgaggaagctaggacacataagctagggattctacagttccagcaagagagagaagtagactgaaaaaataaagtgggaagaagagggagttaatgcttaatggctatggaattccaagttggtaaaacgaaaaagttctggagatggatggtggtgatggttgcacaacaatatgaatttatttaatgttaccaaactgtacacttaaaattggttaaaatggtagattttatgtaatgcatattttaccacaataaaaaaaaaagaagaagctagcatgcagagaagcaaagatgaatgatggagtgcaggatctgggggctttcctgggtgcagttgctgtggtacaaagggttcaaaaggttatagaagccaaaaatcactcctttggcctagcctcattcaagttaggcttctggtccttgcatccaatggagccataatacagaacctttccattttcttttttgtttcttttcttttcttttttttttttttttttttttgagaagcagtctcacactgtggcccaggcttacagtacagtgacatgatcttggctcactgcaacttctgcctcccaggttcaagtgattctcgtgccttggcttcccgagtagctgggactacaggtgagtgccaccatgcctggctaatttttgtatttttagtagagacagggtttctgcatgttggccaggctggtctcgaacctcccgacctcaagcaatctgcccacctcagcctcccaaagtgctgggattacagcgtgagccaccatgcctggccagaacctttccattttcatttctcactcatgtcctttcaaacattctcttctcctgtcaaccctgctgctcatacttcctcagacttatcctgtgtttatacacactatgcctttcctccctgctccccaagcttggaatgtccttcccccttcttatgactttgtcaactcatattcatcatttgagatccagctgaaagggctcctcctcaggaaagccatccctgaccaccctaagcagagcctgccatgccttctgttggtctgtcatagcttttttgtatatgtcctcatcacttggtatctcagtgatctgccatcttgtctgtaacccccagtagattatgtttttcatctccatgaccctggtagctagcaaagaggctagcacaagtaagtataataaatctttactgaatgagtgtacagatgagtgagaatctttttctccctcatgccatctctgagtcactactcagtttctatcaagaagagacacataaggaaacgtgggaggaattgctttagtccctttattcaagggtgatagtctcaggagagaagaaaacacaatcaagttggggccactgcaaagtctagtggcatttaagagaagttattttccccaaagcactggcagctttgaactgaggctgaatttgtttggaagccagagccaagacaagcagacatttggtagtgttgagccttccagcaagctgggattctgacagccgtttctgtcagctgcacaaggagaagcatctaaaaggcatctgggtctacctggaattgggggtccccatatcttttagcacaatctgacccaaggaacaaggcagccgtctctcctaccctccattcccaccataagcatatacctcctctaagggggctctgcagttgattaggacgttgggcactgagaacagagtcaaagatgactataggaaactgtggcagagatgatactactgcttactaaatggcttatggtttcttcctacatttcccagcctcccttgcagtttttttgtttgtttgtttgtttttgacacagagtcttgctctctcgcccaggctggagtgcagtggtgtaatctccgctcactgcaacctctacctcctgggttcaagcgattctcctgcctcagcctcctgaatagcagggattacaggcgccccaccacaccccgctaacttttgtatttttagagatggggtttcaccatgttggccaggctggtctcgaactcctgacctcaggtgatccacctgcctcggcctcccaaagtgctaggattacaggcatgagccaccgtgcctggcctccagctctctttttgaggcaatactgaaagctttgcattgagatagtggagcccaagagagaagtagtctggatctctgagttacccaggagagttgaggagagctactctggagagtgccttaacccacagccagcgttgcatgagtggaaaagatataccattgttgtgtgttatgccattgagaaatttggcttgtttgttaccatagccaagtctagcctattctgccagataaatatagacattaattgttgttttagccatccagcatcaaacctccttcctatttgaggattaaactctccccctcctttaggactctttggtgttgccaaatccagtggtcacatctctgttcttatctttcttgatttctcagcagcatttgtcacaattgaccactcccttctgggaacatactatgttggtgtctgtgacatcatgcctgcttagtttttcttttatgtcactggcccccgcttttcagttttctttgttggctccccttcttgttttatgtcaaaagtttgaagttctggagacctggtttaaaatatcacagctggtttccaccttttgagacgatgtctttttgtgtcacccaggctggagtgcagtggcataatcacggctcactgcagtctcaacctcccaggctcaagcattcctcccacctcagtctcccaagtagcggggactacaggcacactccatcacacccagataatttttgtattttttgtagagatggggttttgccatgttgctcaagctggtctcaaactcctgggcttaagagattcaccagcctaggtctcccaaagtgttgtaattacaggtgcgagccacagctcctggcccatcttaccattccttattaataacagagcactcattgttagctgggcacattgtacccagttaagagaatgtttcccaggctcccttgcagctgagtatggccatgtgagtgagtatgttttggcaaaaatgtgcgggactttcgaggcagtccttttttctttctttctttttctttttcttttttttttttttttgagacagagtctcgctctgtcgcccaggatggagtgcagcggcgcgatctcggctcactgcaacctccgcctcctgggttcacgccattctcctgcctcagcctctcgagttgctgggattacaggcgcccgccaccacgcccggctaattttttatatttttagtagagacgggatttcactgtgttagccaggatggtctccatctcctgacctcgtgatccgccagcctgggcctcccaaagtgctgggattacaggcgtgagcctccgcgcccagccccaaggcagtcttcttaaaaggaagaggatgcatctttcttccctttttccttcccactgtttggaatatggaccatagtgaggtgaccttaacactggaagccaaatactgaggatggctgaacagccctgaactgcctacttttggacttatatttcatggaaagagagaaatttctggctaggtgcagcggctcatgcctgtaatcccagcactttgagaggccaaggcaggaggatcgcttgagcccaggagctcgagaccagcctgagcaacacagggagatttcatctccatgaaaaaaataaaaataataggcaggcctggtggcgcacctgtgctcccagctactccagaggttggggtgggaggatcgcttaagcttgggaggttgaggcttcagtgagctgtgatcacgccactgcactccaacctgggtgacagagcaaaaccgtctcaggaaaaaaaataaataaatttcaatcgtaagctatttttttcttttgttatttgcaattgaatgtaatcctgatacattcctgttgttgaagctgtttgcctgcctcccactaggaagcctaagggtccagatcctcccccagtcagaggaatggggaactagaaaaagaaaggcaaaggcactgccaggcaagaaaacgctgggtctccttccacaagtttggtaagtaagcaagataccaggaggatagaatggtaagtgagcctagaaatagactattatatacatagggtttattaaatacatagagaacactgaatgctagactaagaaatttggactttattctggaagtcccttgcaataggggaccttgtctgttttattttctaatgcctcgcactttgtagaagctcagtgaatgaatatattctttattaatttatgccgtctgcttaataaacagaaatgttggaaggtgaaccagttgggagtcaccatctgatcaacccctgcctgctttttataaataatgtaactgaaccatcatttactggaagtggcaatcaacctgtgaggaacggcaaaccaaaaagtccaccttgggtgtcatggtgatggaattggaggcggagaccagggagagcagcgggctaggatctctgagagtctccgcaacatggcggccctggaaccacctgaccggcaggaggcggagctccgccccagctcgctcggccccaccccgctcggccctgcccagcgcactcctagaccggggcgcaagggttgtgaggtgtttgagcgaagcgcctgcgcagggcagcggcgcgcggggcggaggctttataatcacttcgtcgttgccgctcggcttctatcgccgggagggcggttgaggcggtggtggcggcgtcggcggcggccgggcgctggctgaggggcgctgaggcgggagctgtggcggcgctgggcgcccctggctcctcggcctctgccggccatgggctccgagaaggactccgagtcgccgcgctccacatcgctacatgcggccgcacccgaccctaagtgccgcagcggcggccggcgccggcgcctcaccttgcacagcgtcttctctgcctcggcccgcggccgccgcgcccgggccaagccgcaggccgagccgccgcccccggctgcgcagccgccgcccgccccggcccctgccgcggcccagggcccgccgcccgaggcgctgcccgccgagccggccgccgaggccgaggcggaggccgcggcggcggcggcggagcctgggttcgacgatgaggaggcggcggagggcggtggcccgggcgcggaggaggtggagtgtccgctgtgcctggtgcggctgccgcctgagcgggccccgcgcctcctcagctgtccgcaccgctcgtgccgggactgcctccgccactacctgcgcctggagataagcgagagcagggtgcccatcagctgccccgagtgcagcgagcgactcaacccgcacgacatccgcttgctgctcgccgacccgccgcttatgcacaagtacgaggagttcatgctgcgccgctacctagcctcggaccccgactgccgctggtgcccggccccggactgcgggtgagcgcgggggcgtggcgcgggtggcggcgggctgcagccgaggggcgtggctgggggcagcagggaccccgcgtgggtgtcccaagcagggaaacccgcaaggcggcagcttcggcggggtggtaaccatcaggcaagcccagactagtggtgtgaacgcacccgacaccccgccccctgccccagggctcgaggtggctgctaagcattcggtgaggggaagggagctgtccaagttaggagacagggagaggcggtttttttg

SEQ ID NO: 3964 - DNA, 6000 bp, Homo sapiens
agcaagcctgcataaaagtattgctagctgctgtaacaaactccaatatttcaatggcttaacaccctgttttgtcactggcatgaactctttttccttatacacaaatgaagaattttcaccaagaatgtcagaatttggtgaccacagcatgtggtagcactagaggaatggcctaggctgtgggccccttctcacttctccctcctggtttcagaagcccacagcctcaccttggtgtggtctgggctttttcctcatgaagcccctctgtcgccactccttgggcagcagatcactgccacctctatggtgatagcctcgcccttgggagatactcgctttggcctgatcatgctcatgattttaaaattgtgccccatttgggatcctaagcttttcctctgagcccatctttgtcctgtagcccttctctgcagccctgcctgccccttggcctctatttctgccctcgcattgctagaatctcccatttgctcactctctctctctctctctctctctctctctctctctctcagcttcagaaggctttttgatcttttcctgggtcagaatgaaaatttcagggcatcaagtctacagctcctccttgaatgaggcagagttctccagagcatcaggccttgtattctttctaaatcaaactctgattttatctggatattaggcttatcttggctagtcactagactgcattgggcttttttgcaatgtgatattgtaaagacacctcaacccacgactgcctgttgctcacagggagaatgagaggggcaggcagggagccagcacttggggctgggctgagacccacactctcctaggctagatgcgggtaggctgttatgtctttgactcctgcctctccattgccctgcagatgtttccagggtccccatctctgcctttgcccccatgtttcctggctcagactattgcagtagtcttctaagtggtaccctttcctttcttaccctttcctcacagagaagttagagtatatgtcaggccacatcacttggcgtctctttcccagaaatgaaaacctacctttcatattcagagctgtctacttttcactaaaggagccatgctatacacagaaaataaatgtaaacagatatctctttacatatattttctgactgtcaagcatctctctcctccctccatctgaaaagtcatctcctcctgttatagaatgaattgtgtgcccccccacccaaattcataggttgaagtccgaacccctagtacttcaggatgtgaccttatttggaggtagagtctttaaaaagtcagttaagtcaaaatgaggtcattgggttgggccttaatccagtatgactggtgtcctgattagaagtttggacacagatatgtaccatgggaacacatgtgaggacacagggagaagaaggcagccatctacaagccagagagagaagcctcagagggaaccaactgtgtcgacctcttgatcttggacttccagcctccagaattgtgaggcaatacatttctgttttttaagccacagggtctatggtactttgttgtggcagcagtcctagcaaattaatacaccttctatttctcactggctaagaataaaatgcaaactcctcgccatcccctaatagaccctatgtgatctgccccactccctatctcccattgcttacctggatccagccccatcctcctcctcctggccccctttcctttttacagccttgcctgtgctcactataccaaaagctctttccccaactttgcatggctgccttgcttaattctattattatattaattaattaattaattaattcatagacagatagtctggctctgtcacccaggctggagtgcagtggtgtgatcatggctcactgcagccttgaacagctgggctcaaatgatcctctggctttagcctcctgagcatcttgcttaattttagatcccatcttccaccgttgccatctcagagaggccttctcagaccatctccttaaagcacatccccatattgtttctcctagcaccataaactttccttttgtagcatccttaattagtaactttatgtgtatttgtatacatattttctgccttcatcaagtcagggactgtgcactaggtgtatattcattgtctagcacagcacccaggcacataatgatgctcaataaatatttgttgagtaaatgaatcttcatcttttcaaggtctttatccatgtctcaggttccagaccaaatcctactttccttcttaaattagccttctgatcccccaagtccaggaaaagctcactgtcttgacatgcctctcggtagcatgccggttcttcagtcatggtgattatcgctgtctgacggtatcagttacgtgtgggtttccacctctggcctgcatcctcccaaagcaggaccacacactgtgcatctctgcagggcccagagcacagcctcgctcagggcccccgagcacaggaggcgctcagtgaaagcacgtggacccaaatagatcagagagcaggaatggcggaggatgtgagtaactgggccttttgcagggataaaataggtgccctgccctccacagcccccagggagaaggatgacaaacgctccttttgcccgggaaagttctgggggtaaatctcatctgcccgttgcagccacagagcaaagttctggagctgagaagagggtaagagaaagcccattggcctgcagccccagaattacagagcagcccagactctcttctgcccagctgtgggctgcacaggaggcctgggcatctctgccagttcctttctctggaggagaaccccgcctccaagagaggggtaaagtcggagcttagaagccaggagcccacccccaggcaagcccagctaacagcccccaaggccaccaccaccactcactgctggcgtagtcagtcccttcctcctctccagggctggtgggaaggctgagccctctctttcgggggctgagtctggacaatgggaagggagaagccccctcctcactgccccgggaacataaagcaggcctttcactgaggagttctggctgcttcggttggttcttggcacccagcaaggcggcgtcgggaggggcgggcatacaagcgtgttgggggtggggaccaggcccgcgattctgaggagattcgcccgcccagggccaccgggctggctccccagctgtgggatgagctcatgcagggaaaccggaacaacttggggtggggggagggaggaagagtggcatctaggaggctgcgaaagcgtggctctggggaggaagtttttcatggggagtagggacaagcctccactcctccagccctgcccccgccccccaattcatatcgtcaactccacagcccctcttcacacccttccttggatggaaattcctggccacgctgacagccggccaacctgggtcgccagccacccccagcctggctcgccatccctacagtccctctccacacccttccccggaaattctcaggccccaccgcccgccggccactgcccccttggccacacagatgccaacgctccgttttggccaaatcaggctgccctaagcccggagcacagcttctctggggtgtgtcggcaaagggggcgggggtgcccatcgcaggtgcctttccactgcacgcgccagcagaagcctcctctctggaccttgcccctcccagtttcctccagcctccccccatgaagcgtctcttccctctcgccgagagtttggcgtagacagcgaaggagccatcgtgactggcggagaagcctggagtagacgagacagagacggcgaccgagtcgggtgggggatggggtggggaccgacactaagcccttggggcctagaggcagccgctactggggagaggtggggagcagctcacgtccttgggaagaactctcttggtttggggccttggctgggaggaggaaggggagaagaagaagtaggatccgattatttaaatttggggataaattgtactagtaactcttgcaccgtccttccaccaacctcactccccacccccaactcgcgtgcacacagggaccgcctctgccaccctgagatttttgtcttagggtaggagtgggaccgcactgggtcaaatgaaccggttcccccccctccccaccccacacacaacccccctccaccgccctccaattcttaaccctgcctctgtctacgcacacacgcccctctcctgggatggggtaggaggctattgtgaatgaggctcataagcatcgcccccggccctagatggcaagttcaaagccaccacccaagatcagctggtaagagccaagacttggggaacgcgtccttctttggttaccttttcccagacaggattccaatttccaaacgtggaagaggtgtgcgtgtatgtgcctgtgtgtgtgagtgcgtgtgtctctgtcactgtgtgtgtgtgtgtgtgtttgtgtgtgtgtgtgtggagaggggggtgtattaatgggtgatgttataaatgaaaacaggaggactgaacttaaaagaaactggtcaattgcaaaacagacacggataaacaaccctttagatgtaatttgtggtttatctggaggtggaggtggcgctgaagaggaacccccgccccccaatattttatccttagctgcgcctccacccccagcatttggagcggcggagaagcggctccggagtgattaatccggggataattcaccccctcccgccccccggcgcgaaccccgcgaagcgggattggagcgagtcatttccgagagcgcagcgcgcctctccccggccgggcggacacttggttcattccagccgcagaagctcagggctcccgcgtaccgggattttttccgagcagaaaaaagctccagagctctcctgacctcctttctcctcggcggcgagcggagcctctccctcggcgctgccggccgcgccatgccgcgctcgcggggacgggagctggggcgctgcggctgccccgcggggagggctcgcggcgaaaccgggatttcggcgcttgtgccgggcgccgggagccgctggggccgcccgccgccgccaacgccgccgcctctgctgctgttgctgggctgtgggttgctcagcgtctcggccgccgcgggtgagtccagccgcgccgaggagccagcggccgccgcgcgccccacccgagccccgagcccacccatcctcgacccggtcccagtccctccccccgcctctatccctgcctgaatctcccaccctcccagttgcctactctcattctcatccctgcctccgtctcccaccccaccctcagccacgtcctcacctccaccctcaccctcactgctgccccaaccccagccgcaacttggacggatgcggccggtgtgggggcctgggagacagacatccccgcccggggttgcggggcacctggtctgtggcttcagtttctccagcctcccagcccccacggtgctaggctttttcccgataaactttccgggagccctactcccccggctcctgattctgccaggcacgctggtcctgggggctggagaggaaccgtgcgccccctccccatttctgcgtctgcaaggtctgcccttccctgcccccgcccattttctccaattgaaaccggtgccccctctggaaccgactgcagactgcggccgccatccccctcctcaaatgctacccctccctcggcgctcggagctaggagggggttcaggtggacgcgtgcccacggtgggggtcccgcgcattccttgcaggagggtgcaggtgggggctggagggtgttgagggatgggaaggagggggtgggggttgtagcccgaggcgggggagggagtgccgccgccaggcttcgcgctgccacattcccctcggtgctcac

SEQ ID NO: 3965 - DNA, 6000 bp, Homo sapiens
tgagcctttcaaaggcaggccccaacctttattctgtcccatgaacccagcacctagcatgtggtagggacgcacacaagggactggcacagagtgagccaggccctccacacacgtctgctgagtgaactgggcctgagtgaattgagtgacatgcccccgtactcgctgaggctccagtcacatctccctaactccctacctctggagtgtctcaaggctagaaggaaattcataggtcaaaagctaagttaaacaccctttacagcagctctgacctggggtgggagggcaggttcctggctactgtgtaactgctcccaatggtgggagtgaggggatgctctcttttgtgctaagtcagaaaaaagacatgagcttagcgtggtgcatggaatatatggctggtgagctcggtggctggagcaggccattaaagagaccagagtcatgactgaatccctgtgggacaggacagctggcctctcaggcggggaggcaggaggggatgtaggggaggcaggcgaattgatctagccagacctctatagaggccaggaaccaggcagccctgcttctcttccctgcaccattagaagttcgggtgtgtgcgtgtataaaacaatgctatggagtgagcagaacagactgcttcaatcttgtgtgcatgtgttggggagaggtgtgtggcgtgtagtgtgtgtgtattggggggagcgtttgagtgggaggttactgtgttgtgtgtgtgtgcgtgtgtgtgtactgtgatgtgagtgcacatatggtgtgtggtatggtgcttgtgtggagggagggagagagagggaggttgggccgcacactactccctggagtgctggctacagtatcagcttgtgtggacatgcagcttcgctgtctccccattattctcctcccccttgcctcccagctccagcactggctccccccatactgggccccctctgtgggtcactgcaccctcacctgcagcaggtagtggataacagcccctatggcctccttcatgacgctcacgagctgcaccttctgtggctccttaagcagtgactgctcacagcgagtgcattcctggatccccaactccatgagggcatagcaggcggtcaccacatcctctttcacctccgtgcccgtctcctccagtgccagccgcacttccacgcacgccagattcaccagcagggccaggaacttgctcccggagctgcccgccgggatccagtcggagccgcaggcgtgtgccaggcgggctgccagcttcagtgcagggttgcgctgccaggagctcagcttgcttcccaggatgcgtgccagcccggcctgcagatcccggtagcattcagggggcacggttgtcgggggcaaaaagaggggcagcagctggcagagctcaaacttgctggcatcctcagctttctggaaatcctcactgaggccccgcaacacggccagcaggtcgggctccgcctccttccagcactgtgtctcggcagcagccagcagccccaccaggagtgccagggcctggtcaaagccatagccgtgccccaggtatgcctggcatagggcagacacggtgccaccagcaatgaggtgccgaggccctctgggtgtgcctgctacagccgtcaggcactggtaggtgtcatcaatcatggagcggcgggcagcatcgtccgggtccccccgggctgtgaggaaggtgctaagaatgggaatcttgttcaggacttggggatgggcggccagttcagggtcactgcagaagcaggccagcagggccacacccaaagcccgcagaacatggtcagggcagccatccggcgcctccttggtggtcaggagacgattggggaaggtgaagccgacagcatcgaagatccgccgccgagttttggcatctatgtcacctgctttgactgccttggtcacctatagggggtatgtgctatcatcaggatgaaaggaagaagtgggaaagactgtccctctcctgcatcctggggcactgaggactagcaagatgaggttatgcaacaggactcatctgaggtcatttcatccagctccttttttctccttagaggcagataaatgtgacctctgggatccctctcatctgtgactgtcccatggaagtgaggtctagtcttcctcaaccattcatttgagcatttcaacacctggccagttgagaagttcttcctgatgtctaaatgcccacaacctgggatggaaggggcttagaactcaatgttttaagatctcccaaggatttaaagtccttccttaattgctccctccagagaagtccctgatccatttctgccaccttctcaggggaaatggctcctgtgtctcgccgctccgcctgtcaaaacatttccccttacatttcacctaaacacctcctctgctgcagtgtgagcccttgactccagagccttctccttgttgccatggcaaacaagcagcggctgtactccctcctcccttcaccccccacacacaacccccccttcctagcactgcagcttctgctctgctgtccccagcttgggttcctccaaaaaggctaagccccaaactagctcccattccttaacctacctactgccatcctggccttcccctaggacccctccccagccacttccagccctgctactctctccaggcccagaacaaccatccccagccctcaagtactctgcactagttactacctgctgctgttaccctatgagtcagcttccatctgctctgggacgccccagaaaacagacccaggcagcccctagtgccacagccttattcagtcccattctcctctttgcccccattctcagggggagcaaaaaagagcacaaaggtaggggtcttgggccttcgttggtgcctccagggttgctagcactacgtacatatccttggggactcactgaccccattccttgggggcccaaccacccagcccttcccacctcccaattttcagccagttccttactagcagcagggctgcaaactgctcgctgtcattcttggcctcacggagggctcccaggtagcgctccagggtggggtttcggccctctgcctggttcagagctggctcgcaatccgaggccatgatgctcgccttgcccaactgtgaacacaagagggactgagcatccctctgcagaggagggacgggggtggggtgggggtgagagtggaggatggagggagggagggattagcacagagggaggggaggagagaatctggaggggtggactcctcaggactgacctccccccagaagcccctttaaggggctggatctgcaaatccttagggataaagaagggaccctggtccaaggtcacctccagaaagcgggaaagaaggaccatgcatgctgctgctcagccggacagctctcctcaccagtctcctgggggtgggcgggagctggccccactgctcagctgtccccctggcaccggaggctgggttttatctccctccacagggacacagagggagtgagtggtgaggacagacagggagaaatggagacatacatgggtgaagttcgattatccggactcaggctgacatgggagaaaaggacaccccaggcttcctttcccctcccttcttcagaggcagagatacgcttcagaagtgagaatacaagacgctcaacagggaaggcttggaggcccctttggggaccccacccctccagccagggctctcagtcgcccccgcaggctccttgcctcctctcctttccctccctcgggtagaggctgcagcagcagcagcagcggcggcggcagcagcagaattaaccccttgcgctccctcttctcgccctccccgtcccgctaccagcctgtggatgccggcaggggctggagaagcaagagggggtcccggatagttcccaggacaacggagaatccaaaagccggataatcgaagcagggctgctgagatggggagatgagaaggggaggagggttcctggcggtcaccacctgtcccgccgcagccaggtcacaacacgacattgatgaagtcacgacagggcggcgatgagatcacacttcacgatggcgcggtgatgtcacggagagatcacgtcaaaatcacgacatgggagacagcccccaaagatgacagggcaaattaaaaaaaaaaaagatatatattgaaaagggctgtgacaaaatggagtctcgacagggcacgatggtgtcgcgatatggcgcgatggagtcgcgatagggtccccggggtgtgtcggcatcgatcagcgccggctcggagaggccccggctgggatgcaggggagggcccgaagggggctgagctcaccaggctgcggccccgagcggcgaagtcttctcccagcgcgatgctccgggagcctcgggccgctgctcacgccgcgttgcccactcctggctccaggctgctgcagctccacccccacccccgcaccgctcttgacgaatccgcggctgcttcactccgggctctggccaatggcaagtcagggtgctaagcagtagggggtgccgccgttgccgccatcttgcttgtgggtattgcccgagtctgggggctggggctcgagcgaaggaggcaaggtgcagactgcctctggagagcgggcggcgagaggctgggggcccagattccttcgcttgtgcgtagttttacccgcccagcactgcccctcctcccccttggtctcgcggccggcattgcccttcccgggggaggggcgggagggcttggttagcatggagagtgtgtttccgggtcggtcccggggaggtgggaggaggcggtgtttccggccgccgtcgctgtccagggaggctgaggcgagaggtagctgtccgggtggggagcccgcactaccttcttcctcttcctcctcctcctccgggtgaggggagcgaaggttgggggtccccgagcccatggaccaggaggaggcggaggccgccgagagccggggccccgctatgtggccctgagccccggtaggtggccgggggcggctggctgccaggccgaggaccatgggctcaggggaggggcaagcgggacgggcgatgtcagcggctgcgctggccggatgttgggtccggaggtggcgcccctggctcggccagggcagccagctgcttctgtccttgcaggtgcgcagcttgggtcccaggctgaaccccgcttctctcgggcctgggcctagtcatgcagctccctccatcccctgagagccaggcagacagccggggttcggggcgctgccgtccttcttccaccttcgacctctgcagcctagtctttagttgctgtctctgatgtttggtctctccaccgagatagaaagttggtgcagaatgaagaggggatggggttgagcacgatgtgtccattataatgtgaaacctgcctcatccacgattttgaaaattatgccccacagagggtcctgtagtggctgcagtgagcacaaaggtgaaatgaaggaagtcaaaattgataacctctggcgggattccaggaactctttggcttctggtctcatagtggttgtgtccaactgacagtagttgcagttagtgaagagcattagctgactctccttgtgctctctcctgtgattaacagactgaaaactaggaacaaattggaaagacgacctcccagaacaatctgttcatttttccagctatttggaaaacagtgtctgcaaatataagcaaagctattcatggcagtctgttctgtaactttcccaaatatctgagactttttaaaaaagagctttattctcgattactcataccaactgaatagattgtttcagacgtgctccatcgttgttcaaacatatcttatcgctgtgtacataaatggagttccacgtatgtagttgacagactgaactgtgataca

SEQ ID NO: 3966 - DNA, 6000 bp, Homo sapiens
cacgttccctctctgggcctcagcttcccaacctttcagggatgaataaggaaagatccttgaagttacagatctggaaagcgccataaggtaaaacatcatcaggacactgaaggtataccacaggacacactctacaaatgaggagaaagcttatgaaaaaagacttagtggcccagtgcggtggctcacgcctataatcccaacactttgggaggccgagcaggcggattgcctaaggacaggagttcgagaccagcctggccaccatggtgaaaccctttctctactaaatatacaaaaattagccaggtatggtggcaggcgcctgtaatcccagctacttgggaggctaagacaggagaatcgcatgaacctgggaggaggaggttgcagtgagccaacatcgcgccactgcactccagcctgggcaagaagaatgaaactctgtctcaaaaaaaaaaaaaagaaaagaaaaagaaaaaaagacttagtggcattttctctgagccttgaagaatgagtagaatttcagcaagttgaggtggaggtgagggagggcactcgaggcagagagaacagcctgagcaaaggccaggaggcggaaagttcagggtgggttcagggaagaaggagtgtccagtttctttctaagtcaacagctcaagggctttttgtaagtgggctgtccaagcggagcagcctccagtaaacacctgtttgcacaatcgaggtcacacacaggggcgcgtttgcacaatgacctgtttgcacaatcttagctgcctgctgtattccagccaaccccggccctggcagctgagcaccacagcctcaacttccgggcactcaccccagcttgcccacctggaccccgccccggcccctctgaaacaagctgctccttgacctacccagaagccccacacatcacaggcagtaacagaaacagaaacaactcggggctcagtagctaggctgccaagaatagggttccctcaccagcactcccttacccagggtttccaacacacagaggccttgtctgatggaggaggggcgggaggcaggacagctggaagaggaagtatccacaaagccgacactgggtgcgggtagaggggatgactcctcgtctgtcttgtgctcttcagtgcaccatagtaaacacttattaagcatttactgtgttcctggctgtgttccacaagccttacggtcactgatttctctcaagaatcctatgaagccaatactgttagccccattttacagatgacaaaaccgaggcttaaagagattaaacatttgtttggagtcacacaggcagcaagtggcaaattgaagcagcctgactcctcagctcatcatcttaacctcagtacactctaaagaaagctcttccttaaatctaactttcatttccttaaatctaacttttattctggctgctgcagctccatttcctggtgcaggtcctcaacagagaatggagcacaaaggagaatagtagaatctccctcctaaatattgaattatgcagaagggaacaaaggaaagcaactttattgaacacctactatgcgctggttaccatactaggcattgtatttctgatagctaatttaattatcacaaaatccctgggaggagttattatcactgtgacagattaggaaacagaggcttggaagaggtaaacaccatctccaaggttctgcagcccaacagatatgcattgagtatcctctgtgtgtccggcactgtactgaggctagagaggcagaggtgagaatacagtttctgccctcaaagagttcacagtataatggaggaggcaggcggccaacagcctactacagtattacaggatgaatggggagaagggcccctaattcagcttgactaaggtgtggaagcccagagggatgctgagctcaggctggatgcttgaactgggtcaggaacaggactcagccagcaggaggtgacaggcgctccgcagaagaaaggcacagggttgttccagagcctggggcaggcagggaaatactagtgaatttggcatgaccggagcatgacgggctggatctgaggaagcaggggctggtgaggcaggagagggaggcgagggtaacttgcatgtccggttcaggagttaggatgtgacgacgggcctctgaagaaagacagggagaggagaaggattgcagggccattggcaaggctgagacgggagctccataaaggcaggaactaaaactgtgtctcaccattgtgtccctgcacctgctccaggagcaagttctctgaatgatgaacaaaaggcccattctccttcattaagaactgactggggccaggcgcggtgactcatgcctgtaatcccaacacttcgggaagccgaggcaggcagatcacttgaggctaggagttcgagaccagcctggccaacatggcaaaaccctgtctctactaaaaatacaaaaaaattagtcgggcgtggtggtgcgtgcctgtagtcccagctactcagaaggctgaggcaggagaatcacttgaacctgggaggcagaggttgcagtgagccgagatcgcgccactgcactctagcctgggtggcagagcgagactccatctcaaaaaaaaagaatgaaaataaaaataaaaaataaatttaaaatgaccagaaggccaggtgcggtggttcacgcctataaaaccagcactttgggaggctgaggtgggcggatcacttgaggtcagcagttcaagaccagcctggccaacatggtgaaacccaatctctactgaaaatacaaaaattagccaggcatgatggcaggcatttgtaattccagctacttgggaggctgaggcaggagaatcacttgaacctgggagtcagaggttgcagtgatccaaaatcgcgccactgcattccagcctgggtgacaaagtgagactctgtctcaaaaaaaaaaaaagaaagaaagaaaaaaaagaactaaaagaactgactggacatgggaatgtggagaaagggttgtaaggaatgactcctgagtccctgagctgcatgactagggagaggaggggatggtggttaattcaccatgacaaggtacgtggggattagagacagatttggtgaagtgggggaagattcatccagttgatcattcattcaacaaacacgcatggaggccttactgtgtggcaagcagtgttatagacactggagataaagttttgaacaaaacagataaaaactgttgctcttatggaactttcagtctagtggggattgagacagccaatatcagatggtgaaaagggatttgggggagagagagatagggagtgggagggaaggggcttgcaaattttgaaaagggtgctcagagaaggcctcaatgagaaagtgacatttgagcaaagacctgaagaaggggagggaccagcccatgtagctatttgcgggggaaagagtccaggcaaatgaaacagcaagtgcaaaggccctgaggcaagagacagcataacaagttcaagaagcaaagaacacagagtagctggagcaaggcagcaagggggagaataacaggagagggatccaggaggtaacagggataccaggttttgtagggccttgtagaccatccaaagggctttgactttgactctgaatgagacaggagccattggaaaggttgggacgaggatgggctgatcagacttctgtttgattgatatcgcactggctgctgaaggaattacagacaggtgcgggaacaaggatgaaatagaagcaggagagcaggcagggggctattgcgattatctaggcaatagatgagggtagcttggagctggctagtattggtttcagttatatttatattttccaaatattatcataaaaatattcaaacgtagagccaagttgaactttacagtgaatacccaggattctggttatatttggaaagaagagagtccatgggactcactgagcgagcagagcctgtgggatatcttgggagggttgcagcaggcagtcaggtcatttgacttggaactagaactacagccctggtctgcagcatcacaccagacccagatgcctcaaaaggattatatgttaaggacagtctgctggtctgttggcacctaaccttttttgggttatgaatccaataaactatgagcagtttgaacctttctcagaaaatgcaaagaaaattatttgtagttttagaagaatcatgaatacagacaataaaagacataaaatgtagtctatttcactcaattacaaaatattcagtgttgcagaaccattgtgggtaaacattcctaatttttagtgaacatataaagaccccgtgcctcaccaagacgtcctcctgtcttgcccccagaattcctgtttctccatctgcctggtctatgggcaatgcacagaatacgtaatgaagaggggagcagtgagtattgggttacacaattccctggaacctggaacacacccttctgagtactgtgaagatgtggtccccaaggctagagctgaaaagaggcttagggccgggtgagccttccagccagggcctgcctccaagtgatgctcccccagggcagggggcataaggatggcacccagccaggtgggagcctgggccctgcccagcctcaaagctttgagctcaggaaatccggaggcaggggagggggacatcgttgccacattccccagccctttaagacccccaaggcaggaaggctgcccgggcctcaccagcttccctcacaggctccttcctgggaggaaggggctgcctgtgccctcgaaggcgcaagggagggcaggagggaggctcggaaggtgttgcaatccccagcccccgggcctgtcagaggctgagccattaacgacagagctcggggagagaagctggactgcagctggtttcaggaacttctcttgacgagaagagagaccaaggaggccaagcaggggctgggccagaggtgccaacgtgagtaggggatccctagagaggggctgagccttgggcttgatggagagctggaatcctggggccactccccacagctctgccaagtgttcatgtccggggtcctaggcctggggcccgggattcgtcctttggaaccccagccctggacactgagtctcttttcacaggatgcccctacttttgggggtattgcaccagggaagtcactcacagccaagtatctccttggggacactgagctgggctggggacaggcataatcattctcccctccccatgcctctgtctctcaggacgtgtgtgtctgtgagttccagccgcgcaacccctccccgtctgggtctctatttcactctctgtttccatctttcctcctcagcttctctctggcttgctatctctctgagtttctctgtctcgcatatttcctgctatctcttgaatcttaaactctcggtaacagacgcttcccgggctccaggcctccgagtgccccccccccgcccactctctgggtcggcgtacattgggccctttttctctgtctctcgatatctctctggcctcaatcgtcctcttggcgagtctctctgtcgtttcagtctgtgtggatttcagtcaccgcctcactctgtcactcttcctgttgctctctctttttctttatctgcagcatatctggaaatgcctctcccctctgtttattcccagccccctcctccctccccacccttcccacagaaagaatctcgaggtgagagtagaaacagcaagggagcgaggggtgtgaagtggggaagagagtgtgaggggagagggctgagcgtgatgagggagaaacagaaagagggaatgtgaaggcagccagcccaggagacatcgagctgtgctgggccacaggagtgagcacctgcagagcccagcagagatggccgcagtgacaggagggccaggg

SEQ ID NO: 3967 - DNA, 6000 bp, Homo sapiens
ccacctggcctttcaggacgtgggcgcatgcgtggcgcttgtctcggtgcgcgtctactacaagcagtgccgcgccaccgtgcggggcctggccacgttcccagccaccgcagccgagagcgccttctccacactggtggaagtggccggaacgtgcgtggcgcactcggaaggggagcctggcagccccccacgcatgcactgcggcgccgacggcgagtggctggtgcctgtgggccgctgcagctgcagcgcgggattccaggagcgtggtgacttctgcgaaggtatccagttggctgggggccgtggggtgggagtgtagagcgtaggtggcaattgagagagagtgtgccctagaggaaagaggcgggtgtggggtcggggggcggtggagaagccttggactctggagcccaaggagagccctgaagtcttgtggagtttccagtgagtccagtcagggccaatgagtgaacttactagatgaaattgactggctaaggaggcattagggatctatatcttaggcaccttgcacaggccttctcgtttatttattttcatggcaataaaggaagtcattgtttttttttttttttaaaataaggagtctctcttgctctgttgcccaggctggagtgcactggcttgatcttggctaactgcaacttccacctcctgggttcaagcaattctcctgcctcagcctcctgagtagctgggattataggcgtgcaccaccatgcccagctaatttttgtatttttagtagagacggggtttcaccatgttggccaggctggtctcaaactcctgacctcaagtgatccacctacctaggccttccagagtgctgggattataggcgtgagccaccgtgcctggcctaaaggaagtcattcttatctctatttcacagatgaagaaacagagcctcagagagattagtacctcacttgcaaagttaggaaatggggagctaggatttgaattcaggcttgcccaactcacattctatgacatcatgaggtctcctcagtgcataaggaagaactctacagcagcccaatcttcaggctagtgggattggttgcattacagagaggaatctcccagtcacggaccaaatacttgcaagttagaggctggcaggggggatttttatgctggagagagggattgggaagttgcactagatgattacgaagatcacatcccactctctgaactacaatcactgtgctccctgggggagatccttcatgttgagggttttgctgggttctcaggctagtgggggcattaggaacagacctctcattctctctcttgcctgtggctttggatacagagggtgatgatggggttattaatgtgtgtacttaatatagaaagatcaaggtatgctttttctaaaccatgtccttttctgggtgccagggcaacagaaatgagtcagacatagtcctagctctcaagaagctcacagtctagatggagagatgcaaaaatttaaaaatcacaagagggtaatatatgctataacagagggatacacagagtggtgggaggacaggggaggaagtgactaaatttgctctcattcctttgttcaatcatccatccaatatgaattgaggatgtgccagctgcatttattgagggcttattatatgtatatagatgaatgccaccatctcctccctgcggaaattgtaatttagagaaagactgggaggcatgaaccttcctgagctctccagatatagttaggatccacctcggtgctctccagcattcattgaaacctatttctgtacttaccccatggtatgcactgatctacttatgtgtgttttcaccactagattaagaacttctttttttttttttagaaatgggggtttgtctatgttgcctgggcttgcgtgtagcagctattcataggtatgatcatagtgcattacagcctggagttcttggtttcaagcattccttctgcctcagcctcctgagtaggtgggactatagggaccacaccctagattaggaacttcttgagctcaggcactgggtgttactagtgtcagcagccccagcattcataacaggataaggcatacggtaggtgttcagtgaaaatgcattgggtgaaaaagtggttactatagggtgtgaaacataaacagagagctaaggaagcatggaagggagaacctaattctaagcatggagaaggcttcccagagaaggtgagaaggtttttttttcccaggcagcttagagcattctaagcttaggaattgcatgcagaaggatggaggcagaaggaacatagcatggctgggcctatgtaactaaatgtggttggagcagagggcatgtgggggtgtgggagtgaagtgatggggttggagaggagcaggtggaaatcatgaaaggccttgaatgttgggataaagagcttagactttatgctttaggccaatggggaggatctgaagcagggatctgacatgctcagatttgtattttcaaaatatcactcaagctgcaattgcaaagaaaggattgaagagggaaggattaggagccagaagatgaagaaggaagatggtgcaatagtgcaggagaaagagcacaagggctgaactaaggtagtggcagagatcattgagagatgaggatagatgggatcatgagttagcatccacagcacttagtgaccatgtgatacaggaggagaaaggagtcccctttgacttacatgctactggggattgaatggacagagggatcattcactagggtacagaacacaggacctggatagacacatatttatgatgtccacggtgcattccagtggaggtagctagaaagtgggtctggagctctgaaagacagagacagtacttgaacctgtgggtgtggttgggacagaccaggagaacgtgtggggtaagaagccaagagggccaacaatgaagactcatagaatagcaatacttaaggacaagtagaaaatacagagcccattaaaaaggctgagagggagtgatcagagtatggaggagaactaggagagtgtgatattatgacagccaagagagattgaaggtgtccaggaaggaatgccctacagagttgggaagcagtcaggtaagtcaagggttagaaagtgcccagttggtggccttggtgagagcaattgcagctgagtgatggacacagagaacaggttgcagtagattgagggataaaggaagttgaagagcttgagtcagggaatctagaagcctggatttgaattagaagaggaggtatctcgaggaggacattggattgagagaggatttttattatagatgggagagacttgtttgtatgcggaaggacaaagagccactgggataccaagtgtgtatatgggggggatccccatcccggtcccaggaggcaggagtattttattactgatgtgggctagaattgctgatgcattttgctaataaaaaagcaggccagattttagtcagttttattattgtttttacatactctatagtttgtgcccttattgcctgcacccaaaatgggccactttttactgcttcactaccaagaagggagatgactgatggaatgtagtatttgatgaggttaaagggagagatccagggtggagacagaggggctggccttcaacaggaggtggctcattccctcctctaggactggaagggaggaggagaggggagatggttgtggatgggggcatttgtgtattctgatgggcagatgttgagggaattatcaactgatggcttcccttctccctataaggtgggagggagggcatctgtacaaatggacagtaaggtccttgtctgttttattcattgttgtgtatctatagagcctacctagtagatgccaaaaaatatttgctgaatgaatggatcaggagtgagaggaggaggtttctctgggaaatgagggagaaagagagagagagagaaagagactcaggaacccaaaccatgtctgatgagaacagaaaaaggccatttgtaatggcctcagctctgccttggggagtggggagctggggacaatgccaaggaaagcttcacaagggagatgttatttgaactggggtttggagaagtatagaagtttgccaggagaaaaaggatataaggaattacagaacaagacccagaggtgtgaaaggatgagctcagtgtaccatggttagagtggctggcagtggggagctgttggaggacattaggaagggaagggaaatgattggatttgcatttagaaagttaaggccttccaagtgccttctgcagctaacacaagcttccctctaaaagtagatggataagtgggggaatagaacgaatatgttcttttcccctttttgtttctctttagtgaccttgacttttgttctccctcggttagccactagagaaattagtaaaagagctggggtttcctttgggggaaaaaatcagggcatataacaagtagctttaattctctgctagggccaggtgcagtggctcacacctgtaatcccagcaatttgggaggctaaggcaggaggattgcttgagccaggagttcaagatcagcctgggcaacacagggagatcccatctctccacacacaaaaaattagccaggcatggttgcacagcatgcctgtggttccagctacttgggagggctgaggtgggaggattgcttggccccaggaggcaggggctgtagtgagctatgattgtgccactgcactccagcctgggcaacagagcaagaccctgtcacaaagaaacaaacaaacaaaacaactcagtgggattgccttggagccaagggacccaagcagatatgttctctgaggctccatagggcacaatgagcccctgtgatggggtggcacaaggggcattacagacagcgaagctaatgggggctcatcctaagaagcactttctgccagcattgttcaacaaaggcagcctcagaagcgggtgaatgcctcatgataaagtatgtgacaaagactgtggctactgctggggaagctgccggaggaccaggccagtgggagctgagctagattatctctgaaggtctgaccttgaagagagggaggggctggcagtcaggaatccctgaatctgctcttcagcacaaactccttctaagcagagcctcttacagcagagataccactgtggtcgctgatgggcccacccacctctaggacagcagccaccctcatacacttgtggggagggagcctccagcattcttcccctatttttgtgaaaccctgcgaacagatcatttatctgggctctcacttgctctcctatttcacaacagtggtgggcagggcatggttgttattcctatttgaccaatgctttttttgaggccagagaggcacaaggagtggcccagccaacactagaacccaagctttccaagtcccagcctgggtctctgctgcccaccagaccacggggatagttggcccatgctctgttctgcaggcagaggagacttctgaaggctcctgggctgccgagcccctccccagagttgtgctgcccagaactctgggcaagatggaccctctcaaacctatgccttccagacagtggaaatcctagtcccctcccctcttctgccacacaggctgaaagttcctcctgagggctagtctgcaccctttctgttgtactgcgtcttcttggagctggagagcagccagctaaactagaggagagggccagggaacaaggtgaggaccacccaagttctgagaggtagggccaggaaccaactggcccagctggtgagaaatttttttaaagtgggtgtttagcagttaccacttaaggcctgtgggggaggaacagtaattactatcattattgtgaaaatgtggttggtactgggctaggtggt

SEQ ID NO: 3968 - DNA, 6000 bp, Homo sapiens
tgggcaacagagtgcttgtctctaatacatacataaatatatgtatgtgtatatatatatatatgtgtgtgtgtgtgtgtgtgtgtgtgtgtgtatgtgtgtgtgtatgtatatatgtattagggagagagagagagagagagagagagagtcagagaagcacatatttgtatattccatcccagtcctggcccctacacagttactcaggtgccagtagcaggtttattccttctggggatttggaggcacaaagctatccgagcctgatgccatcaaatatttaaaccattcacctccctcccgtcccactctcaaagctgtcttcacatcataaattggcttcctgtgcatattttcctacggggaaagaatgtgctggacatggcattgtgagcattctggtccccttggcagttctatttctcatcataaattaatacattgcttctctggctcagatagcaggataggagctgggttagtaggatctactttccattccccaatagataggttctctcttaatgctgttaaagtcaagttcataagcctggaccatgatgaatttaccaaggtaaaagtcacctctgatgccacttgtcagctggccagccagcctgccctgatgacactcctgtctcttcaagcacatttctttcagactcctgtgcttcctagccacattcatctcaatcagctgtctctttctttatccctcattctgtcttttcctctatgactctctctctctaattatatatatctttctctcttcctacttcaccacttaatcttcctttatcttttttttttttatttgacggaatttctctcttttttgctctggctggagtgcaatggcataatttcggctcactgcaacctctgcctcccgagttcaagcaattctcctgcctcagcctcctgagtagctgggactacaggtgcacaccactatgtccagctattttgtacttttagtagagatggagtttcaccatgttggccagactggtctcgaactcctgacctcaggtaatccattcgcctcagcctcccaaagtgctgtggttacaggtgtaagccaccgtgcccagacttcttttccttttttcttctgttttttgtttgtttgtttgttgttgttgttgtttaccttaattaaccatggagttgaaaaataatatataccagagctatgtgccaagcacagagctgggtcacatgtaaaaattatattctgacctcacaataactctgaaaactgtttttgttcctattttacaaagaaagaagtggaggctcataaagggtaagtggttgtgtttcataatcttaaaggttttctctgctgaattttcaaaattagtaaattaaatgctttgtgcttcctttatctaagaaaatacagtttaggccaggcatggtggctcatgcctataatcccagcactttgggaggctgaggtgggtggatcacttgaggtcaggagtttgagaccagcctggccaacatggcgaaaccccatctcgactaaaaatacaaaattagccagctgtggtggtgtgcacttgtagtcccagctacttgggaggctgaggcaggagaatcgcttgaacctgggaagcagaggttgcagtggactgaaatcaggccactgcactccagcctgggcaacagagtgagacactgtctcaaaaaaaaaaaaaagatgaccctttgaacaataaagctctcactgctctttgcctctccccatccttcttcctgagagtgggacttgaccctgattcctctgacacaaacttaaacttctttatggaggagataaccttctctgtccagtcaggctcaacatactttctgtatctgtgcaaaaggaagaggtcaaatcttcagcacctagatttgtaactttcagtaacttggagatggaggttgtggtaacattaaatctgctccctggaaggtcactttttattattttgggtgtttaattaagttgctcggcctcatcaagtgtcctccccatgatcctagaagatagtgaggtagaagtagagaggagtatcccttccagcctgcttcagtagagttctgagaggagcaaaagagaaaacaagatgtttctgggtgggttccaggcccctccacccttctgcaagggagtgaagggtgcttatctcctgaagacatgaattgatggattttggttataggccggaggagcagatgcaaccactgtattttcttaggtaaaggaaatataaagcatttaatttactaattttgaaaattaagcagagaaaatctttaagattatgaagcaaaactacttactctttatgatcctgccaaggatcagaacatggcagcagagaagtccgaggtctaactgaatgtccagactctgttggattcagcaccatagacagaaagcagcccaaagctgctgagggctgagggttgaatgccatagacagataccccttctctgtccccacccccaatttcactagtccccattgctattcctgggaggaacctaaccccttccattagttaactggcccccagcacttaaaggtcgagataaacaatgggttggtttccttctaaggccctccggaatttctttactgagctttcagttctgcggcttcctggtagagtggggtccgccttagagcaactcttattaacatccagctgatttgcatatatctgcattcactggggcttctccattctggttttattgtaaatgaattgctcagaggaagaaagggaaggattatttcactccttttttttcctcttctttccccctattcctagggtctctgtctggaaatttcccccagatgcgtgaaggtgtgtgtggtggaagagggtagaaaccagactccaacagtcaggtatttgccagagcatcctatgtagatttccccagataatttcccccatctgtttggtttctgaaagatccttgtcaggttcagaggaagtctgtattttgttttagcaccgagggtcagaacctctgggctgaagtccctggagcttcagtaagaagccatgattggtgccttagagcctgctaaggggatggaacccggttttaaagaggagtgaggggtggtggagtgaggactcattttgaaatgaaaggagtcctgggtctctaagcagcttctaaaaataccatctcccagaggtggaggcagggggaggggagaaatcgagcgtgaggagaatgaagatggaaaggaggtggcagtgtgagaacccttcctcaggtaggtctggttttagaagtcccgcctgcatccaaggactggagggatgccacacctccttctgcttcctcagggggcttgtctcctgtggtgtccaagccacagcctctcctgatgacctttctttctgcaggtaaagaagaccaattcctcccacctactcctcctattgctactgtccagcaagtatgtctgagtgggcacgtgtgcatttactcgcacatatacacaagcacacacgcagaaatggcacatgaaagcgggttgtaaatggccagtgatctacgatgccaggaatcctccttacactcggcgttcaaagaggtatggactctggcagagacagcgtggttcaccagggcatccgcagcacagagcatggcgcccagtgagggctgggtagaggggtgagggatacatatatgcaaaagcacagacactcagaccgcaggggccaagtagtcacaggactcacactcactctcgaggtttctcaggctatattcgcttccaaatagagagggggtgggtcccccaagaaaagagctcggaaaagccacgaggtgggtggagctttctcccctcaagttcagcccagatggtggcgctcagtagccgcctccctcgtcctggagggccccaacccttcccaccaccaaagtgttaaaccctcagcttgcacataaatgaccttcactagacagaggtcttgttccacgttttcttgcggcttcttcagcgccggctgaactctgccaggattgctccgcctctctcgcagatgtctccgattcctggcctctgtgctgttcaccagtcccctggggtgggcggagtggggtgatcaaagaggggaacccccgactctgagcagactgagggcatgggtggttgtgaggtgtgctgcttgtatcttgacagcaggagcaagaacctgaggaaccgatcgttcatgcaaaaccgccaccgcccccatcccagcgtccacatggtttcccagcctcggaagcgcgttggtagggcaggaccccgtccctcactttgctctcctttcccgagcagctcccgggatcgttcggcccctccttcctgccgctgtgtgtgtgtgtgtgtgtgtgtgtgtgtgtgtgtgtgtgtgtgtgtgatgagggcgggaagagaaagggggggatgagctaggagacaccgggagcctcagacacaggaacagacctagggcagggagacaggagagctccccagagcttggggtcaggacataaagcttcaaaaccccgcaagtcctgggaacaagggagctttcagactagctcagaggctgcaagtgttgctgcctccccgagggtcgcccctccttaagccaagcccaccttgcctgcctacttctcaggaatgaggagctaaggtttagcgctctgggccaccgatgccagctcattcccctctcgcagaagccctgccagctcccacagctgccccaccccccacggtttggagatctgcaggaccccttcctttccccaccagttgggtgttccgcccctggcctatgaaactccaccttcccaccctctgctggcggggattggttggcatcccgcggcggtgcctagtgattggttcccatggatgatggtgagcggtgagactccgccccccgctggctctggggtctgggggcattgctcagcggtgctaggctggcgcggcttgagccgccgccggactgacagctcggtctgcggaccatggagacctgcgccggtccacacccgctgcgcctcttcctctgccggatgcagctctgtctcgcgctgcttttgggaccctggcggcctgggaccgccgaggaaggtgagaagactggtgagctctgctcggagcgtggcataccaaaagatagggggctggcgatgggggttctgggggaaggagtcattggagagactagagtctgtattggggcttgaagcaagcaggcagcaaagaactggagagacagagaaaaatgtgatcaagcagtagcgaagagaggggcgctgaggagcttgggggctggagacccgggaggttgggaaagaaagaggccaggaaccgcgggagccagaggcggcggtccagcggccggtgagacggacaagctgagtgattggaggtgggaggtgcgggggcggggagatgaagagtggagacagggagatgcggaggtgagctcggaatatggggagacgggatggagcccggactacaggggctaggagaccacagtgtggccaacagaaggtggaatgctggtcgagggggctggatccgggcgctgcccgacgtgctgatcatggaactgtccgcagtgctgaattctgagcgtagtctgccgggcgcgctccgcgttgccgggtttgaggctgtcggcgatactggagcccgcgtcttgcctctgattgtgcatttaggggagctatacgctcagttgaatccagaggcgtcatatctaggtgcagaatccggaggagctggaatctgaggcgttgaccgcggggttggtctgggccctggatggctgatgccttccagttcgcgattccgatgtgctgtcagttgcgcggatctcggaaagccgtcggcggtcctgcccacagtcgctgacgcctctggagaggccctcaccttggtggcccaccccctggtttaagctcca

SEQ ID NO: 3969 - DNA, 6000 bp, Homo sapiens
ttgacctatgacctttgagctggttatggccttgaactcctgacctcatgattcacctgcctcagcctctgcagtggctccctctctccttttcctcctatcagtcctcctgctggccttactggtagcccagaacctggcaagcagtcagttgacccctgctcctgtccaggtaagcagcatatgagggaggggacagccttcctaatgccttcagccccaggcgtgtgaccacagtggtcaaacctttccgcagatatgccacaacttccactgcctcggagagatgtgctaccaggaggaaaagttctccaaccagaccacagagtgttagcccgggcagcaccactgcgaggtgtggggctggggctgtgagggacccaagccagggtacttctcagaggtgaaggagagtggagggaggccattggaagggggattgacattcaggtacagtaaggtgcaggaacagatcctgaagcgggagggagaggagtcagtatctgggatgctgggaacgtggagctatggcccaggcctggctgtgcccccatcctcctggacatgcctgcattctctctacccagctgattcaactcaacgcttcccactacatggcctggtgcagcttcagctgtgaagggggaaatgaaaccggtcctagcccttgtctgctgtccaatagctcagcccccagcccagacccctgcaggctgcagtgctgcaatggagggccactctgtttcgtgctcaatgagtcagcctggggtgagacagccccacccttaatactcagccctgccccgccaacctgcagctcccagccccattcctcagagcccccacctctgactcccattcctactcatccacaagctcagagcccttctgcacactaaccctcaactttgaacccagccctttgagaggccctcaaatctcagctcaattttcaccagcccccccaacctctatgaatatgctaacctctaggccttttctgactgacccctacctttttttcttttgtttttttgagacagagtcttgctctgtcacccaggcttatgcagtggcgcgatctcggctcactgcaagctccgcctcccgggctcacccaattctcctgcctcagcctcccgagtagctgggactacaggcgcccgccgccatgcctggcttattttttgtatttttttagtagagacggggtttcaccatgttagccaggatggtctcgatctcctgacctcgtgatccacccgcctcggcctcccaaagtgctgggataacaggcatgagtcacggcgcccggccctgacccttacctttaatgtcttcctaggccaggcatggtggctcatgcctgtaatcccagcactttgggaggccaaggcgggtggatcatgaggtcaggagatcgagacaggccaaggcaggtggatcatgaggtcaggagatcgagaccatcctggctaacatggtgaaaccccatctctactaaaaatacaaaaaattagccgggcatggtggtgctgggcgcttgtagtcccagctactctgtaggctgaggcaggagaatggcatgaacctgggaggcggagcttgcactgagccaagatctcaccactgcactccagcctgggcgacagagagagactccacctcaccacaaaaaaaaaaaacaaaaaaaaaaactctgccttcctcattagctccccaagtctgagctttctacctttggtgccccaccccctctcagattccccactcctaacatccccaccattccccagtccagcccatccagcactcccctccccaacaagctacaaagaggcctggggcaagcacctgtgctcatctaggccgtggtgggggagatgtcaggttgtgagctgcccacacacatcatgctctccctgggggcaaggcagggggtcagggctttacagaggtgtcacagcacttccccaggcagtcctgctctgctcctaggcctagcccacccgacgatcccagaggacaagctacattccattccacccctggtgaccaccaccttgccagccctccagggaaatgtgtctcattctcacctgcctcctctaggaagtggaggcaggaatggacagcgtgtggtggatggggccagtgacacaggcatgatagggctccagccttgcctctgtccagcatttaccacctgttcagtctgcacagagctcccaaacctcctcctgctttctcttccagaagaaaatctgtgctactttctcctgccaaggtggtgactgtttcaaagggccgaaagctgtggccatgtgccctgagggcttggacttctgtgaggtgagccctgcgatgctccaagaattagggagctctcctccctcagagctgcatggctttctccttctacctggagtgggtagctcagcagtagaatctggctggagctagacctgctgggagcagccgtggggtctagcaagcttgaccccctcagctctgcatgatgccaacaccaaaggcagcaactggaattttccatacctccacgatgtgcccctttttttctgaccaccctgtatgttcactaggaactcactgatcttgtgggcaggaagctaggggtccaaggaggttgagctcaacccatgacccacttaacactttctgcctttgagtggggaagaggggcaaggggaagatgaatggtcccacctcttcttgcagctgaaatgctccagctcaggttacattgcaggctgcagccaggcctgtgaagcagggacctcccagtgtcatggggctgtggccccaccctgctaccaggagtgctgtcaagcctcaacctcaggcagctgccttcagctggatgggaaacttcacttcaaccaggcagctcctggggccaccagaaaccccctgcactgggccctggctgtggctatgctacttctcctccactctgctctgctcctattcctgctcccctagctgggcccagcagaatctgggagcagcagtcaagaagaccctgtaggatctacaagccttcaggtccccctccagctctgattcctgtagttgcatctttagtaaaaggcctttatcaagcccacagctctgggcttaaggctcctcacttctccccttctagggcctaggcctgaccatggaaccccccaagggggcaggccctcagccctaatctcagggagaggatagggtttgtctggaaaaacagaaaacctcctgcctgacccccacccagtgggaggacccccaaatcctgcagggacagtttcttcatcataaaaagcacacagccccatctactttgcccagaccctcctcgccaggctttgacactagagcagggctggaattggggttcctctgcttccctgcagtgaccccaccccttgatcctaagggtctgagtcaatcccctttcccctcatcgtccacatgacttagacactgaattcaaataaacttgagctccatttgtgctgtggatgtttccaggaaaagaaatggattgagaagaaggcaacgactgtttctggaaggggtttacatatgcaaagttgaactggtcattaggatggccacttcacttggggaaagaggaagggaaactgttcacaagtcacaacagtcaccccctccccagcactgaaggcccattccttcagtttgggccaaagcttgagagaaggtgtatttattaaaatagttcagaaagtaattcactaactccatagataactgtgtgccagaaactgctggtatgttgatgaaaaggcatagtcctgtccaacgggagcttacagcttaattaaacagccaataggccaagtgagaatgatcctagcattccttatctgagctgggtgagcaatcacagctcactgcagccttgaactcctgggctcaagcaatcctcccacctcagcctcccaagtagctgggactacaggcatgcaccaccatacccggctaaatttaaaaaaatttttttttagagatggggtctcaaactcctggcctcaagcgatcctccctccttggccttccaaagtgccgggattacagacatgagccactgtgcccagtccctgtgctggctctttttgtccatcttgggtaacctccttatcttagatggggaaattgagtcccaagggaagaaaggtcttggccaaggtcacaaagccaggcggatcaggggaaggacgttgccggacaggaacagtgtcataccctttataaagtgcgttcacacccagtagcctcaaacagccctgtgtggcaggagggctgggtggggctaagggaggaaatagggcagtgtgtagcggtataaatggcccaggagttgcagtcagactttcagtggagtcccagtgttgccacctgctagctgcaggacttaatgtcaaactgcttaacctatccaaggctcagtttctccacctggaaaatggacataatggttcttcatagtctggttctccctccattaaaccaggagaaggtagttattttaggggaagagtttcagtagaggtccgggttgtctaccctggagtgagaagagctgaggatggaactaaggagaaaataaaaatgcattatattcttcccctaagataaaatgtgaccatcttccttctgggtgggaagctctggccccatgacctagagggctggggatgggagtgagggcaatcattagaaaacctttctggtataggaagcccagtgtaccccagggcctaaggggttaacacggatggagagactccccaccccacgattgactcgggcatgctgggacttgcaggctgactgaccaccatgtggcgcaggggctgttgggaaatgtagtcactgtcccggaacctggggcagcggagtcccgtgcgccctgtggtgacagctcaggaggtaggtgacaatgtcagggagctgtgggtgggagcagagcaggaaagccagggcagggctgggcaggagggagtgggcaagctgagggctgggacaccccccaacccccggcctgcagctgatgcaatgggcctgctggggcgggggtgaagggcaagcagcaatgggacacttcctgtctccaaggaaagaggaatgggaccctcctgaatgacagtaaggggatgttccctgaaccccacatggacacaccactgacacctcccagagaggcgctagcagaacaaaaactgtccccaaaagagaggaagagccatgtcctaggagcaaagggactaggtccccttctccaatccacgtaccccacttccaacaaggatagaccacactcaagagcaactggatgccctcccagacaaaggcagtatagcaaactgtagatcccagcggggcaaagggactggacccctatccctaaaaactgaaaggcctattctagggaggacaaagaggaggaggaggaggatcaggcctccccggtaccatctccctctgcaaaggcccctccctcctgcccccaacccctctgaggcagctccaccaccccatgcgtaacttgttgaccaaagcggggctcctatctcccctcccacagggtgtgtgcgctcagcaggggccagcatggaccagtctgtggcaatccaggagacgctggctgagggggaatactgcgtcatcatatccttcctgtgctaactgcggccctgagcctgccctggccttgggaagaggaatggaaggtgtcgaggtgtctatcccctctcctgcccctctgaaccatcaggggagaaggaaatcagtatttactaagtacttactgagtcctggactctcagccaaatgctttaaatacgcagttatcctcctaactccctatgaagttggggattattatcctcatttcatagataaggaaggcttagagagcctgtttgtctgttagttcagcacatggtttgagtgctcacccaaggccac

SEQ ID NO: 3970 - DNA, 6000 bp, Homo sapiens
aaaccccgtctctactaacaatacaaaaattagccaagcgtggtggcacttgcctgtagtctcagctacttggcaggctcaggcacgagaatcacttgaacctgggaagtggaggttgcagtgggctgagatcctgccactgcactctagtctgggcaacagagtgagactctgtctccccccaccaaaaaaaaagaaaaaaagtatactttttcatagtaaagtataataagtactttatacatattcataaatattactgagatgaatttctgaaaatgttcaccaattgccaggaagaaaccagaatttatttcaaatttatttcaatttggattaaaaaaactaatctaaattcctatgacagccagatctgtttcctctggtttcactgaatgccatatcttactgaattatcaaatgaagcatattcgttttcctatgtgtataaatgagatttaaaaatcactgactttttgaccgggcacggtggctcatgcctgtaatcctggcactttgggaggctgaggcgggtggatcacgaggtcaggagatcgagatcatcctggccaacatggtgaaaccccgtgtctactaaaatacaaaaaattatcccggggggtgttggcaggcgcctgtaatcccagctactcaggaggatgaggcaggggaatcgcttgaacccaggaggcggaggttgcaatgcgccgagattgcgccactgcactccagcctggcgacagagcaagactctgtcccaaaagaaagaaagaaagaaaaaaaaatcactgacttttcaagccagtaatggcatgttggggaaaaagaaattgactttgttataacttttatatcaaataatcttaataaataaggttaagatcaggttactagttttagaaacctttccaaaagttctgttgaaaaacaacaataggctgggcatggtggctcacgcctgtaatcccagcactttgggaggccgaggtgggcagatcacctgaggtcaggagttcgagaccagcctggccaacatggagaaacatcatctctactaaaaatacaaaattatccgggcatggtggtgcatgcctgtaatcacagctactcaggaggctgaggcaggagaatcgcttgaacccaggaggtggaggttgcggtgagctgagatcatgccattgcactccagcctgggctacagagtgagactccgtctcaaaaaaaaaaaaaaaaagaatataattttaggccatgcgcattggctcatgcctgtaatcccagcactttgggaggccgaggtggccagatcatctgaggtcaagggtttgatctcagctcactgcaacctctgccttccaggttcaagcgattctcttgcctcagcctcccgagtagctgggactacaagcgcctgccaccacgcctggctaatttttgtatttttagtagaggcggggttttaccatgttggccaggctggtctggaactcctgacctcaaatgatccacccaccttggcctcccaaagtgttgggattacaggtgtgagccaccccgcccagcctatattcttaatagagaatatatacactcctcctccaggtatcatgtttttttcattgtattgtgatgtctaaatataagtgattttaaattcctgacatttaagtatattattggtaacagattcacactttggccaggtgtggtgacccacacctgtaattcccacactttgggaggtgaaggcaagaggatcacttgagtctaggagtttaagactagctgcagcaatagagtgagaccctgtctctacaaaaaaataaaaaaaattatctgggtgtagttgcacacacctgcagtcccagctactcaggaggctgagaggggagatgatcgcttgagtctgggaggttgaggctgcagggagttgtggttgcaacactgtactccagcctgggcaacagagggagactctgtctcaacaaacaaacaaacaaagaaaaaaccccacagctatctagggaaaaagtaaagcaaccagcatatagaagtgacatattgttatattttcaccataggtttgctttaagaaatagtgctcccttcagaatggaagaatttatctgcctcttatttgatgtggatcagagctaagatggctgactaaataaacatgggggactggaatctccttggagatactctggaggaagttcacatccactccaccatgattggaaagatctggctcaccatcctgttcatatttcgaatgcttgttctgggtgtagcagctgaagatgtctggaatgatgagcagtctggcttcatctgcaatacagaacaaccaggctgcagaaatgtatgctacgaccaggcctttcctatctccctcattagatactgggttctgcaggtgatatttgtgtcttcaccatccctggtctacatgggccatgcattgtaccgactgagagttcttgaggaagagaggcaaaggatgaaagctcagttaagagtagaactggaggaggtagagtttgaaatgcctagggatcggaggagattggagcaagagctttgtcagctggagaaaaggaaactaaataaagctccactcagaggaaccttgctttgcacttatgtgatacacattttcactcgctctgtggttgaagttggattcatgattggacagtaccttttatatggatttcacttagagccgctatttaagtgccatggccacccgtgtccaaatataatcgactgttttgtctcaagaccaacagaaaagacaatattcctattatttatgcaatctatagccactatttcacttttcttaaacattcttgaaattttccacctaggttttaaaaagattaaaagagggctttggggaaaatacaagttgaagaaggaacataatgaattccatgcaaacaaggcaaaacaaaatgtagccaaataccagagcacatctgcaaattcactgaagcgactcccttctgcccctgattataatctgttagtggaaaagcaaacacacactgcagtgtaccctagtttaaattcatcttctgtattccagccaaatcctgacaatcatagtgtaaatgatgagaaatgcattttggatgaacaggaaactgtactttctaatgagatttccacacttagtactagttgtagtcattttcaacacatcagttcaaacaataacaaagacactcataaaatatttggaaaagaacttaatggtaaccagttaatggaaaaaagagaaactgaaggcaaagacagcaaaaggaactactactctagaggtcaccgttctattccaggtgttgctatagatggagagaacaacatgaggcagtcaccccaaacagttttctccttgccagctaactgcgattggaaaccgcggtggcttagagctacatggggttcctctacagaacatgaaaaccgggggtcacctcctaaaggtaacctcaagggccagttcagaaagggcacagtcagaacccttcctccttcacaaggagattctcaatcacttgacattccaaacactgctgattctttgggagggctgtcctttgagccagggttggtcagaacctgtaataatcctgtttgtcctccaaatcacgtagtgtccctaacgaacaatctcattggtaggcgggttcccacagatcttcagatctaaacagcggttggcttttagacattatatatattatcagagaagtagcctagtggtcgtggggcacagaaaaaatagataggggcagctctaaagaccagctgttaagacagacaactgcaaactcatttaagcaagagaaaaacagctctaattcgagattgtgaagcaacacttctaaattcaaagacatagagttgtcaaatcaggatttttttttttttaaatgatatcctttcgaatgtaactgattttgggaaaatcacatgttcagaattgaggctaaatggtttgatcaggttttctctttgaagagaccacagccttaggaaatggttcttgatctatacaattccaccttggacactgggttaattctgtttgcccctggaacacaatcacgtaagtttccttctagactggcatcctgatgtgtcttgagtataatcacatgttgctacctagtaaataaaatcttaagaagatccgtggctttccttcaccagttcatagcatcgtgattcattgcccggattggactcgactctactcactggacatctaaccactccacttaattaacaatacccaccctacaggggtgttgtaaggattaaaatttaaaatacccgtgttttctacagtgcctggctcaaaagctactgcaagctcgttactgctcatcctccagaggcccacatcaagtcagccacgactcaaggagactccaaagataaaagctgaagccaaaatatatgattctaaacaccctcctcggctactgcaaagcactgtgagcactttctcaggacgagagccaagaagcccagcacctatgggtcaccacagtttccgaggtcccagatgaaaaagatgcgctcgctaccaccgtgcggcggtcctttctctcgcaatagtctcaatgctcccgggccctgcctccggacgccaggacagaggtaccaaaatctcacctcctgcaaagaaacctaattgctacgggggccggaagaggaagaggtgcggctccgacagccagaggggcgggcatacgcagcctccctcggctcagcctgctactggggatgcagagcgtcctggtcgccatgaaaacaggccacacctcggcgatcccggccggtggtttgcaagtgcgcaggcgcgcgcccccttccgcgcatgagcagtgctgctcccaacccgccagtcgcggtctccggcgccagctacgccgctgccgctgtcactatggcccattacaaagtgaggggggcgcggcgtggctgggggcatgcgggcggtagcaagccgctggtcggctctgggtgggagtggggtcgcgcgcgcaggtttgggcgggagggccccgaggtagtgaggcggaggcggggttgccggactcccagcgccttcttcctgctcggctcccgggctctggccactgacccccggtgtctcttcaggccgccgactcgaagcgtgagcagttccggaggtacttggagaagtcgggggtgctggacacgctgaccaagggtgagcctgggctaggagagggtacctcgtgccctcgtcgtgctccccggcgctgccccgttccccagcgggccgtagcgtggggaaggaggggaaacagatggggcccgtccggggtccagcgaggtgggcctcggggttcagcagggacctggctgctggacgccgcccgggtggggtagcctagctccgctacccttctccgcaccgggagtgaaactcttgcagctgttgcaaagtctcttcaacttccgttgctttgcctccagcagccgcagtggacatgtttgccaaggaccttcagatcccaattcctcccaccttacggtttttatggagtcctcagaatcttgttaagaaagtttccctccaacaaagagcaactggaaaaatgaccgaatttccaagtgggctatgaagtagctgagtgagcctaatccccaaagtaggagattcatagcgaatttggctgtggcttttcagcccccattccttagtctgtctgtgtcaattcttattttgtgtatatttcataaagtagaattacagcttaaagagctcgagggcatatcaaggtggttacattgttttcactttttaaaatgaaagcttactgttaacgctgtatctcttcattcgtggcttcaagatctaagttaagtagatgagtaaagtgttggaaacaggaggatttcaaggggtagggtacagtttactttattggcttagcactaatttgaatg

SEQ ID NO: 3971 - DNA, 6000 bp, Homo sapiens
ttagcttgtgtcttatttgctgtgtttttcaacattttcctatctccagcaaactgacctgcccctattgtaagtcaattaataaaaagagccatctggaggaaataaaaaaaaaaggaagactctatgaagaaacagagaagtctcagaaaaggctaacaattttatatagaggacaaaacagcattaaactcatcagttgcaaagattgcctataaaaggaccttaggatttaaggaaggggcttcttaatgtagaaagggaagaagaagagagaaaagaagggtagtaaaaactagagattggggccaggcgcagtggctcacgcctgtaatcccagcactttgggaggctgaggcgggtgaaatcacctgaggtcatgagttcaagaccagcctgaccaatatggtgaaaccctgtctctactaaagaaaatacaaaaattagccgggcgtggtggcgtgtgcctgtagtcccagctacttgcgaggctgaggcaggagaattgcttgaacctgggaggcgaaggttgcagtgagccgagattgcgccactgcactccagcctgggtgacagagcgacactcggtctcaaaaaacaaaacaaaacaaaacaaaattagagattgggtctttcccaggcatatggtattctataaaacagacttactctccttggaggatatattttggagaatgcttcataaaatctatgaatactgtacaatgctgataataaaaactttttatacctgtgtcagactcctgataatcactttaaaatagatcactgtttgaggagatagatcactactgtttgaggtgttttacacactttattgataatattatcaacaacccggaaaggtagttattactctgcatcttagagtaatcttaaagaatcccttaaaggaacccttaaagaattaagtacttgtctgaggggagcagaatttaaacatagataatgacttggaaacctgtagtctcccctataggtccaacaatgctgtgttccccaaacactgaagggtatcataggagtacaggaacaaacatctatgcggggtacaccatgaatggtggaaatatctcatagaagaagactgaggattttctggactgctagtttaagattctgataccgtgtctaagatcccaaggaaccgggcactggctttctggtgcacactatatacctagacttcagattctcatctgtgatcagactgtcatccttcatgtgggtcatggctctcctaggagtgggtaggatttatttacagaaggtaaaatgtcatacctgaaagctgagaagcatgtgtcattttcctgtatagaattcagactgtggtttattatgtttttggaaatggtagttttgggtcatctgaatataggaaatataattttttcttttatcatcaatgtatttattaaacacccatctaaacatgtcactgtatctggaaggggcatatacacttagttagatatagtgagaaaagttaatactttagtattttgagaaaaactgatcagaaatttgtttaaaaagttaaatttaagtataaacatgggaatatgagtgtttttttttttgttttgtttttttttgagatggagtctcgctctgtttcccaggctggagtgcagtgggctgatcttggctcactgcaacctctgcctcctgggttcaagcaattctcctacctcagcctccagagtagctgggattacaggcatgcgccaccacatctggctaattattatttttttttttttgagaccgagtcttgctctgtcgcccaggctggagtgcagtggccggatcttggttcactgaaacctccgcctcctgggttcaagtgattctcctatctcagcttcctgagtagctgggattacaggtggccgccaccaaacctgactaatttatttatttatttatttatttatttatttatttatttatttatttatttttagtagagacggggtttcaccatgctggccaggctggtctcgaactcccgacctcaggccctcaggcgatctgcccgccttggcctcccaaagtgctgggattacaggtgtgagccactgtgcccggtccctaatttttttttttttttgagatggagtttcgctcttgtcatctaggctagagtgcgatggtacgatctcggctcactgccacctccacccactgggttcaagtgattctcctgcctcagcctcctgagtagctgggattacaggcacctgccaccacgcctggctaatttttgtatttttagtagagacggggtttcaccatgttggccaggctggtcttgaactcctgaccttaggtgatccgcccacctcggcctcccaaagtgctgggattacaggtgtgaaccactgcactcggctaatttttgtattttttagtagagacggtgtttcaccatgttggccaggctggtctcaaacccctgacctcaagtgatccacccacctcagcctcccaaagtgctgggattacaggtgtgagccaccatgcctggccttatgagtgtgttcttggttaaacaaagattcaaacaagaagttaaaagataaaatctcagccaggtgcagtggctcatgcctataatctcagcactttgggaggccaatgtgggaggactgcttgagcccaggagtttgagaacagcctgggtaacattcaagaactctacaaaaacataaaaaataaccaggtgtggtggtgcttgcctgtagttctagctactccagaggctgaggtgggaggatcactggaacccaggagttcgaggttacagtgagctatgatcatgccactgccctccagcctgggtgacagagtgagaccctgtcttaaaaaaaaaaaaaatctccttttgccttctcacttcaaacctgctgtttttccctagtgctgaccatcatcagtggtcacaacagtatggtctgtatccttgcagacatttttctatgtaggatgagcagaaaggaaaatggatttaagttaatgtccaactcatccactgtattgaacttcactgaatctgctctacaccctcaaagggacaaatctgaagaacaaattagaggtgtccatggtataactcctcctaagcatcatttgcttctcagattgatctcaactaggaaaagtttttgttaatcgattttagctaaatatatatgtgtgtgtgtgtgtgtgtgtgtgtgtgtgtgtgtgtgtgtgtatatatatatttttttttttcttgagacagggtcttgctgtgtcgcccaggctggagtgcagtggcgccatctcggctcactgcaacctctgcctcctgggttcaagcaattctcctgcctcagcctcccgggtagctgggattataggcatgtgccaccatgcctggctaatttttggtatttttaatagagactgggtttcaccacattggccaggctggtcttgaactcctgacttcaggtgatccgcctgtctcagcctcctcccaaagtgctaggattatagacatgagcccagcctctaattagatatttttatgaaatgtaggttttaacaggataaatgtgatacatgtattgttctataacttgctttacaacatgacctagggacctttctctattagttcatagaaatctttattctctgaattgctgaatgatatagatgtaccatagataaccattcctctgtcagacatttaaattattgctgcttttgtataattaccaacagtgctatgtgaacatcctagcatgtgcagtgtgtctctgaatgtctatgctgaatgaatatttcaagtatccaaaagcagaaatgctatactaatattgataggtttaaactgccttttaaatagctgtatccatttatattcttacctacaggatatgagagtaacagtgtctccctactttgccaaaagaaggtattataaatctttaaaattttgcattttgatagttaaaaaataatatttcacttaaatatgtattctctgactaccgaggttgaggaagtttcgagtttattaataatttatgagttacacatatgtaattcagataacacataatatagaaacatgaatatattgtgcatgtatgtgtgcctatacaaatatatatatatataaataatatatatataaaaatatatatgtaaatatatatatatatatatatatatatatatatatatatatatatatatatatttgtccctggtgaaatgtttgtatttaatctgagaagtagctattgttggcaaaaaagcccagggaagaagtatttatctgttatgctcaacctgccagatcactagctctgaagggacctttaatgacctaaaatacaatgtaattgttaataacagaacatgggagacagaatcaggatctatctatgaaatcggacatgacccatttattaaggcagatgaccaagaagttattatctagtaagaaagacttttttggttctagaaacatggtttattgcacaaaaaacaatgacattttattaggttcccccagtggcaaaagttgcatacaaacagcacacaaatacctcctgtcattttaaatttgacatctctgaattatggaggaatcattcactcagcttaatttggggctcatgactttagtcttctagattgcagtgtgttatcaggactattataagcattctttatctgtgctgtccaaaaaagcagccattaggtagatgcagctctttacatttttattaaaattatttaaaattaaaaattcaattgctctgacacacaaaccataatgcaagtgttcaatagctacatttggctactggctgccttattggctagcacagatagaatatttccattgttgcagaaagttctattggatggtgctgttttaaaagcaaggataagcagaaagggacatggattttagttgatggatgactcactcactacattcaactgaactgaatctgctctataccagcaaagggacaaattcagaaaataaattgaagatggccatgctgtaacttctaaacatggtttgcttctcagatttacctaaactaagaaaggtttgtgttaatctctctgttttagcttattaagaaagagttgtttgaaatgtttttatctttttcttttgaattctatggtactgtatatatgtataccagtttttatgtcatttgctatgaaagctttaatttgtagctaaatactactgctccttctttcaggaaatactatgtgttgtcctttatgaaaaaaatattttctttctttttatgattataaaagtaaaatgcttatagtaaaaaattaaaatacatgtaattacaatatattaagtatataatttgtaatcccaacatccagagctaatcaccgttaatattttcatgaatatccttctagacttttttgtatacatctgtaaatgtaactaaacttataataatggggccatattattctattttataacatcaatttcactgaaatgaaatatcaaatgccattttatgtatgtttatcatttctactggttgcatagtatcacaccgtggatgtagtcgattatttaaccagtttttcttgtattattattttatgtttttagcttatgactattataaacaacatgaattacatctttgcttacattattattatttatgaaccataaatgagacttaacttgcttactttttttttattttttgagacagagtctcactctattgcccaggctggaatgcagtggccagatctcggctcactgcaaccttcacctcccaggttcaagcgattctcctgcctcagtctcctgagtagctgggattacaggcatgtgccaccatgcccggctaatttttgtatttttagtagagatggggttcaaccatgttgctcaggctggtctcgaactcctgacctcgtaat

SEQ ID NO: 3972 - DNA, 6000 bp, Homo sapiens
caaaaattagctgggcgtggtggcatgtgcctgtaatcccagctactcgggaggctgaggctggagaattgcttgaacctgggaggtggaggttgcagtgagccgagatcatgctactgcactccagcctgggtgacagagtgagattccgtctcaaaaaaaaaaaaaaaaaagaagagaaaaggaagaagactggttctctggccccagagagtcatgatcttgatgaattcaccacagttcagggtcaaggtccgaattttgcaggcttagaaatgtgaatttgtggctggccatggtggctcaaatcccagcactttgggaggccaaggcaggtggatcacctgaggtcaggagttcgagaccagcctggccaacatagtgaaacctcatctctactaaaaatacaaaaattagccaggcgtggtggtgggtgcctgtaatcccagttactcgggaggctgaggcaggagaatcacttgaacctgggaggtggaggttacggtgagccgagattgggccactgaaccccagcctgggctacagagtgagactccgtctcacagaaaaaaaaaaaaaaaaagaaaagaaatgtgaacttgtcaatatctcagaactgatacaatttgtggatactgattcacattaatgaaatttacatgaacctcgtgtacaaattctaaatgaaaatttatttatttttattatttatttttgagatggagtttcgctctcgttgcccaggctggagtgcaatggtgtgatctcagctaaccaaaacctctgcctcctgggttcaagcaattctcctacctcagcctcccaagtagctgggactacaggtgtgtgccaccaagcctggctaactttttttgtatttttagtagagatggaatttcgccatgttgcccaggctggtctcgaactcttgagctcaggcaatccgcccgccttggcctcccaaattgctggaattataggtgtgagccaccgcgcccagctgacctgatatattttcatctgcagaataagataaccttttcttgctttcttctttcactctcccatcactctgtgtggccacctccctcagagcctggagaaacttggtcccagaccattgttctttgggcttattcatttatcctgaaaataattgactccaacaaccagccctccatccatcttttccccagtgaagagaatatttaaacctcaaccctctggccctcctttgagttaatatcttgtatgactcccttgcacaggtgtgcagtaatgaatctgttatgcttttctctgtgaccctttataatggggagggaagagctcacccattctgcccatacagcattccctcaagtcttgtcttaggtcctcttctttctctctaatttctctccctgagtgacctcacccactcccatggcttgagttgtcatttctgtgcaactcctaaatctcttttttccaactgtttgctgactcctcccccaacccccccatccattctctgccttgttctgtgccttggggcaccttggcctctggcttctggttgagtttagctaatgagaggaatcaggaataggaagctggagactaaagtaattgggatattccttcctctgtttccattctgctccagtgggggctgccttctccacaactgtggctctgccaggggcccttatccacagctccagctcccgctggattcagtgaatgttacatcttctccttgtcccttcaggcctaaggcttcccactgtcattcatccctggatattcaacatctcttaatgacttcctttacccttcccagatcttcaaatctagctgaagatgccttctccttcctgctggtaccctgactgatacataactcctgtctatccctggagcaactactccttgaacatctccgcaggtgcctctgactcaacaggtccagaacagaattcatttccccccaaattgcttttcttcctgatcctgaaattttttttttttttttgagacggagtcttgctctgatgcccaggctgtaatgtagtggtgccatctcagctcaatgcaacctccgccttccaggttcaagcaattctagtgcctcagccccccgagtagttgggactacaggcatgtgccaacatgcctggctaaatttttgtatttttagtaaagacggggtttcaccgtgttagccaggatggtcttgatctcctgacattgtgatcctcccgccttggcctcccaaagtgctgggattacagacgtgagccacctcacccaactctttttcttttgagacagagtctcgctctgtcatccacgctagtctgcagtgatgtgatctctgctcactgcaacctccgcctcctgggttcaagtgattctcctgtctcagcctcctgagtagctgggattacaagcattcgccaccatgcccagctaatttttgtatttttagtagagacagggtttcaccatgttggccaggcttgtctcaaactcctgacctcaagtgatccacccatctcggcctcccaaagtattgggattacaggcgtgagccaccgcgcctggccattcttcctgatttctcaatcttgtttgtggtcaccactatcaacctagttagttattccagctggaaatcttcgagtcatcctagattcctcccttactctttaagtcccatcaatggtactcccttagcatctcttgaatctctttctctcactcccacccccactccctagccaatgccttgataaggcctacattatcacttgccctgactcatgcaaccctgactggttttcttgcctctagtcttgcctccttcaaacccttctttacactgcaggtctcagtgaatttttttttttttaagacagggtctcactctgtcatccaggctagagtgctgtggtgtgatcatagctcattgcagcctcaacctcttgggctcaagctgtcctctcacttcggcctctggagtatagctgggactacatgtgcacactaccattgcccggataattaaaaaaaatttgttttgtagagacaggtgccactatgttgctcaggctggtctcgaactcctgggcctaagcaatcctccagccttgacctcccaaattgctgggattacaggtgtgagccaccacacctggctccagtgatctattttaaatgcagtctgatagtttgtgtcccttgtttaaggcctatctgtgagctagcagggtgtggtgtaccacctgtaatcccagcgctctgggaagtcaaggcgggaggatctcttgaggccaggagttcgtgatcaccctgggcaacagagtgaaattccatctctacaaaaaatttaaaaactggctgaccatggtggtgggtgcctgtagtcccagctacacaggcagctgaagtgggaggatcacttgagtccaggagttcaaggctgcttcaagctatgagtgcaccactgcactctagcctgggtaactgagagagatcctattttttcttttttctttttttttgagatggagtctcactctgttgcccaggctagagtgcagtggcgcaatctcggctcactgcaacctctgcctcccagagagaccctgtattgcaacaaacaaacgaacaaacaaacaaacaatctttctatgactccccagaacctataggacacagtccaaactgtttaccaaggcacacaaggcccttcatgatctgacactccctgctcacaattctgaactttgagtagttcctgctgaattccgtcccttcccatggccttttctgtcagcctgtgctccccttctgtgtgctccccgcttacaattctggaaaacccctgttcacctttcaaaacccatcttgtatgtcatgtcatctaggagcttttccagaacacttccacacagggggattcctctctggtcccttctgcctgaatttttttttttttttttttttgagaccgagtttcgctgttgttgcccaggctggagtgcaatggcgtgatcttggctcactgcaacctccgcctcccgggttcaagcgattctcctgcctcagcctcccgagtggctgggattacaggcatgcaccaccatgcccagctaattttgtatttttagtagagatgaggtttctccatgttgatcaggctggtctcgaactcccgacttcaggtgatccacccacctcaacctcccaaagtgctgggattacaggcgtgagacaccatgcctggccaccttctgcctgaatcttgagcagcgtctacttagagcttcattctttgtcttcctagtagagtaggaggtcagggaccccgttaatctacctcttcatcctcagggcctcacacaaggccagttattctcaaaatgctttgaatgaataatcagagctggcaaagctatttcaccaggggccatggtgtcaccaattcttctgtggactaaatctctgctgaggatcgtcaagtcacccaccctggtgcccagtacaggcctggcttcagactggagcataaccaaatgcagagtgatagagaccacccggttgaggcgtcagagagctgagagtggagagcaggggacccaggcatgaagcaggagggcaggacttggaggaggaatggagctcagtgtcctggagaaagagcagaggctgccaccggctccctggctaagacccaagcaggcgaagaggaggactcattcatccagggccagcccaggagcaagactgccaagcaggccggcccagcccagctgggaggggatttcctcagcctccctcctcctgggctgggcagctttggaacctgtctggaggatttttgtttggggagggacggaggagcgcctggcagagcgggatcttcagggcagcgggcaaccccttggcccaggaagcctggaacgcaaggaccggagggcgtgggctgggacgcccctaccttggtctttcagggtaagatgtgggagctgggagggagtggagggagtcctatgtcaggacaagggggcggcagcaggaagtgcagggccgaggggtgctgtgcaggaaggaggagggacatgtggggtgcttcgctggtaaccccccttctggagtgacctcctggtgtggccgctttggatcctgctactttcattttaaaagttggcagcatgttgggccaggagtcaggggctatcttcccgagggaaatggcagggaagggctgaggatgaggacagagtaattccattcctcttccctgcccttcacactggctttccctccagccatcacgttctccccagcaccccctaccctcctaagtttttctaactccaactaagccagttcctagccctttgctgacctggacactggagaccacagccagggagacagtctccacttctacccgcaaggcggctcctccagagttatttgtttccttcttcctggtgtgggtatcagagagatttcactcaatctttcatttattcattagtgttcatttgtttattcatcactgtttgagcatatacctggattctctggagggagggctgcgcaatttctgctcctcttgggaataagaaaactgaaacttattgctcaaacatttgatggtcatctacaagctggtgggcagcatggcagagcagaaaattattttggagtcacaaagacacttggctttttatcccatatctcctgtttacctcctgagcctcagtttcctcagctataatttttttttaaagagacagggtcttgctaccttgcccaggctgcagtgcagtggctgatcatagcttactacaacttcaaactcctgtgctcaagcagtcttcttgcctcagcttcctgagttaactgaggcacggcggccagctcaaaatgatatttttatgaagatgacagggaacaatgcatgttgaataccaagctgggtgccaggctcattgtggagcc

SEQ ID NO: 3973 - DNA, 6000 bp, Homo sapiens
tggtgatgcacacctgtggtcccaatactaaggaggctgaggtaggaggatcatgagcccaggacgtcaagcctgctccattgcactccagcctgagtgacagagcaagaccatgtctcaaagaaagaacaaggctggtctttgtggctcacgcctgtaatcccagcactttgggagactgaggtgggtggctcacccaaggtcaggaggtcgagaccagcctggccaacatggtgaaacccgtctctactaaaaatacaaaaattagctgggtgtggtggcaggcgcctgtaatcccagctactcgggagactgaggcgagataatcatttgaacccaggaggcggaggttgcagtgagccaagatcacgccattgcactccagcctgggcaacaagagtgacactccatctcaaataaataaataagaacaaaaacaaaaatttcaattaaaaagtttattgggctgagcacagtggcacacacttgtaatcccaacactttgggaggccaagtcaggagatcacttaagcccaggagttcaagaccagccttggcaacattggaagaccgtattgctattaaaaaagaaaaattgttttttaggaaacgattattttttgagctgggagatagcactgcgtgttagttggctggtgggaatgatccagtcaagacagtcactcctccttttatcatggttgatccccgccatcctatttgggtggctcactcggcgtacagagaggaccacgttagtgcaaaaagcatgaactttacccacacactgagctgggtgacactcccacttccaccatgtggagttgtgtgacctccagcaagttagggaacctgtatgtgtttcctcaccagcggaatggaatcacagtccttcccgcgatggttgagcggatgaacaagggaatgctcacaaagcaaccagcacgacacttagcccatggtagacatcaacattacagaagactacatcagcctaattctggttttccagaagtttccacatcaaggcagatgactttacagtttcaacttatgctaaacagatacaggcagcagcctcttaactgagctcacaaaaggccagatgttttcaaggcagcaggcccaagataagtgtatatagagtggggcgagtcctcctggaagcatggggtgatggcagcccggctgagatgcgactgtgatttcggtctgcgtttggtaacgcacatgcaagggcgcgcgagcaatgagaggatgactgcttgagaagaaaggagagagcccatgggagggttggaggggatgaaaggcaactcctcaaacacagtgaagatttggatgtggaagacgccgctggtctctggcgccccaggcatctagcagagctctcagcaggggcatcaagagacagatgctgtactcagtgtggttagcacaggtaaatgggacagccacatgtgtcacagaggcgcagggcccgggcgagagggtggaacacaaaaatgtgtctgctaacacagtctcaaggtgctcagggaccttaggaaggaggtaaacgacgcaataagtgcagtgaatggaaatatgccaagagtatgatgggattgcagatcaggatgcttagccgtgcctgggcaggcagaatcgttgggggtggccacacagctggctgtattgctttctagctgtgcgccctgaggcaagtagtctccattccaagcttatagttccgggaatctcagactctgagttgggagggtgataagaactccaaaatttcaaatgatgattgcagagaaggtgctagattgctaaagactgaatcggaccctcctaactgacaatgagagagggcggtggaaaggtctccgatttttcacagggagggaggcaaaagcattgaatcctcataccaatcagtcaatgatcaacacatacctagcaaggctggctctcggtcaggcactgttgcagaggaagtggcagtgggtcttcagccacaggcagtctgcccactcccagagtgcgaaggctggaggggcagactgtgcggggagtctttttggaacagagctttcattagtcacagttctgcaggcgttttatgctttcaaacagcctttctcacctatcatctgatccttgtaaactccctcatgcatcagacagggcaagtgttattatccctacttttcaatggagaaaccaggcccagggaagctgaggatttggctaatgtcccatagcttttcagtggcaggggtaaagctagaactgtaggcttctcatagcctgagtgaaagcacagggtgctgtgctaccccagggcagtttcagtgagctcttaatggaggctgggctgtgaccctgagccttcctgttctccccgcatgtctgggagtcattggactgcaagggggggcaccaggagtggtaggtgtcctgggtggagaagctgtgccaggttaaggaatgccgctccagaagcagaatctgaattccaaaaggctttggaacaagaatgagggaaggccgtcagggtaggagagaatattttggtagaacagactcaaagcctcaaataacaaagagaagggataaacagaagcacttcagaggaagaggagagcactgttccggatcacgaagaggctctgggaacacccaggatggaggagcatgcaggcctcctgctggctctgtggccctgtggacccgtggctccctttctctctttggccctcaaattgtcaatggagggggccgcagcccatggtctctgaggcatgcttctgactggcctctgggctcctgacccaggtccccctgaaaccagaatgacccctggatcttccctacagagagagcgcctgcagatggcggggaaaaggggccaaggcccagcgtggagagaaggaggactttgcctttggaggagcatatgcggagcagctacccagcaccaggcccctgccctccccagacatcgcttactttaacggaccaccacaactccatgaagcaaacctcccatttagagtgaggaccctgaggcaccacagtcattcaggtcacccctggggagcatcttgtcactgcccgcagcccccttcaatctggacctggtgcctccctcaaaaagggaggagtgtgggagagagaccacaggggccagcaccacacagtttcaagcggaaagcccttcctgctgtttcctggctgggggtctattacctccctctgccgtggtctccttactgttaggaggcctgctgcctgcaacagtggcccacatgcttaaattaatgcactggtcacagggtgcccattgcggccccagtaggatggaggaggctcccctcaatcctactgtcttgtcattgtggtagaagaatctgagctcaggacttacttctctgccactgtcctagaccccatttggtcttgggacccacaggtcgtccaggaagcaggtctgtgtgtgctcggatccacgtggctctgaccctcccagcacagagagcctgagggtcccagtgtgcaccaccacaggtcaagcagtgcccacccttgaccctcagatggcagaccactcccccatctctggccagagctgcaggccataccagaggcctacgccctgggcgggcacacagggctgccattgtctgctcagcgcctggcaccctctcgtttgcatagccacgtgaagaatgcaagagcgggctggggacttgtcccttcagaggggggttggggctgtgggggaggaagccagcaggggtctgcagcaggaccctgccttcccccagtgcagtccaggaagggtgggtgggctgttggggacggagggggcggcggggggctggcaggagtggaagcagggttgtgacattccttctgcacccacgctgcagtggggcccacttgaacgtgaggggattgctaatgaggtggaagagagttaaacattcccctactcctgaagaccaagagagactgggagagagaagagggaggtgggggtgctcggagcgggcagcctgaaccccgggaatgtgcagaggccactgctccgcgccaggctgctctagagttgggggccagggcccagtgttccagtcccagcaggagctactaagccagccagcaaggggattaaggggctgagcaatccgccttccttcaggctgatgccagaaggttggggctgtctccccagctccccaccaggccccttgctggccggcagccagcgctggcccagcctcgatagggccccttttctgtccccctcagatctcaaaaagaccccacagtacatatttcctggtctggcctccctgatttttggcacacacagctcccaggtacccatgacccctcttcccaacaccccaccgctagctcagcctccccacatccagcttcagagcccctgccaaaaagttatccttgacatctaactctagttttacccgctgcaaactggcattcctttcccttctgtcctaaagtcaaagggcagaaaaccccaagggttagatcagccttgcaagagcaaagtccatcctcccagggctggtgtttgggttagggattatccgaattttaggacacccgaatcaggttcctaaaggggtttccctgtggggaaaggcccagagggcagctgggtcattcctctcagcccctcccttccctatccctgcggaacggggcggggcagggacaccacctgggccatgggccggccctccgcccccagggggctgggcatgagctttgctggggaccctgctctggcttaggcggctgctgtgggcgggccctggccttttccagcccctgggcctccccctgcattctggagtccagagccactgcctttgctccagccgctgccgccgcaccacctctccttctctgcctctgaccctccttctcgctgctccccctgcccagctgctcctcccacctggccatgaccaaagcccctgctggcaccctggcccagctctgagtcctgggaccctcggtcctctctcctgggccatggccaactcaggcctccagctcctgggctacttcttggccctgggtggctgggtgggcatcattgctagcacagccctgccacagtggaagcagtcttcctacgcaggcgacgccatcatcactgccgtgggcctctatgaagggctctggatgtcctgcgcctcccagagcactgggcaagtgcagtgcaagctctacgactcgctgctcgccctggacggtaggccccaggccggcggggtgggagatgggaggtgggaacagcaggggagtctggagcaagttttcctcacagtctgctatctgcgctgggctccaacctccagcctccgctctacaattcccccactactgccctgtgcccattgacggtccaggccagcctgctgccctgtgggaggggagggctctagggtctggcggctgtgggtccagattcctgctctgtcactataactttgaactagtcaccaaacctcttcccattgtgatgttctcatctctaaaggggaatactaatacctgtggcactctgaaagactcagttaagacccttcatccacttctccccacagtcagtagacagacacacactgtatgatgcacacctgctccctagtcctgctcccaggcctgtgtgccagcatatgggtgcatgcacatgcatgcaaacacgcatgcacacgcacacacgtgcacatgcatgcacagacaggtgtgtctgcatgcagtccctctccttctggggtgtggagatgagcctgacaggcaccgccgaagttctaactctggggtggaggtgatccacctgcaatctgcccaggagcccccagggacaatctgctccccatgggagctgggagcagagcggccttcaaccagccccattgtgccagttcaggcaggtcagttcaggcaggtcatctagcctcgctgagg

SEQ ID NO: 3974 - DNA, 6000 bp, Homo sapiens
ccctcccttccaagggtaactactgttaccccggagataagttttgcctgtttttaaactttatacacatgacatcacactctttcgcacagctgctatcactcaatatgtctgtgagattcagccacattattgcgtgccatggaaagatgtttgaacaaagcagtgatgtggtcagctgtgcattttaaagagaccagtgtggtggcagggaggaggatgaatgaatagtggtcctagcctatgctggaggagggactgtctgcatggagagggcaggcagagtccacgggatgggcaggcaaagtccacgggattgactggatatggggaatgagggagacagagaggggtcagggaagataccagatctctggctagggcaatttggtggctagaggagccatttctagggtggggacaggaagggatgggcaaagataatgagttcaggtttgagcatggtgagtgtgagggacctgtgggacatccagagggacatcctggaggcagctggacagaaaagcctggtagtcaggagagaagggaggggagtatgtgccttcaattcccccagcatcagcgagcaggtggtagccctgataagtgcatttgcagagggtcggagggcatacagaagataaagaagggatgccgaaaagctttctgaaagcaggtggttcaagcagatgtgcaaatcagaatgaaaacattaaacacacaaaactgtcctgcctggcccatcagaccttcctggaatccatcactgtgtttacctgcaatccaggaggatttgaattgcaaaacaccctttggattaggggggcttccgtcccagcccctgctatcccctcttgtaccaattgtagctgactcagcaaaacctttcctcctggctgccagggacgcttgcctttaaaggcaacagagtcttttcccagcccgccttactcactcctaactctggagctgctaggacccgccctgcacggccctgccaccaccaccatcaccaccaccacccctcccccacccacttgcgtgctctgaggcacacactaggctccagcatccgcctggcacctgacacctccctgctagccagtcccagagagctcttttcctccagactagctggggctggaactgcttagaatcggacccagaagaggccgagttccgtccaggactaaaggcagcctccagggaataaagctgtcagtgtgggcgcagactagggaaggggcactaggtcgttcaagctgaatgctggggttccacagcctcctcacaccccctttagtgcctcaggtagagtaggcttgtggggacactgaggtttcctcaggtcctttccctgctcaataactctccatggctcgccactacccactgcataaagccctaactcctatacctggcatttgggagcctctgtgattccacttcttcagtctcttctcctccctaagcccccatgccccagccacaggggctacttaggtgcccctcctgctcccctttccccttgcacccaaaccttctctgctcatgtgctatttcctggggccttctctagggctcattccctagttggagttaaattctgcttccaaggaatcagccacccaaataacaaaccagtccacctgagaatctagtctgtgatgcagcgtcaatagcttctgatgaatttgcttctgaccagtagcctccaggggtcataaaacattcacagagaggaacacagagaaggtaatgggggtctgtgtgtgggcaggtggggtggggtgggtgaaggaaaagcttttttttggccactgtgctttttcctcaagcaccgccctaccatgggatggggatttgactgaacttctcacgtcaagaatgagtacagtttacatagctaagcctttataaacatccactttccctcaggcctacccaggaagggtttgttatatctattttacagatgtgggtcttcaggctcagagaagagaaggcattgtttgcccatgaatgtttgcaagtaaatagcagagctgggactcaaagagtccggatctggggctccatcatgaatctctaagagtggcccagagattctcacgttccctaggtaatcattctggcagtctgctgcctttgcacatgctcttctctctgctgagaatggccttccctcaatccatctggtgaactcctattcagtcttccaaaccctgcttagcatgacctcccccttcccagatgctctctctactcactctccttcccctgtggtacaagttctgcacctgtacagattcttaaccctctacgcttgacttggtattgttgctgctcatttcccctcttgctcctcctccagcttggggcctccatgaggctaacaatggggtcacatgtctctgtccctgggaaagtggccagcatggggctggcccagagaaggacaaggtggctgtttggtgagtgtgacccatgggctgagtaaggcagacccgcaactgggaaaaggcatagactggatgtgctaagaaacaaggagctgtggagagactttgaggagggaagtagcaaaacccaaaaggtacttaaggaaagactggaagtatcagcaggacggactggaggggaaggaacattcaacacaggtagattagctgctcactcattcgtgcattccttccctccttcagtcattcacccacgtgcctcagctgcagaacctgtcctcaaggtgctcacaggctgagggaaggcagacagaggacaagtggcaacctacaaaacaccaaatggtaaaggagagaaagatttccacttgggagaaccagggacacttcccggaggaggaaggacccatggtgctttttggcatggtgaggtcggggagggcttcccaggcagaggagacaagctgagcaaatgtgtggatgtgagttgctggtgtgaggggcgaggctgagcgtgtaaactggtgccatgaagaaggaccgtgatggccaggcttggcccttactccctccatgacaatttcagacagatgagcaggagagtggcagggtgcaggactggaggacaaaagaccagaggagatggaggccctgcagacagcaggggagggaaggaggatgaggtggtgtagacagcggagtcagcaggacttggtctgtccaggggtgaggagagaggtggcccaagctttccaggctgagcatagagagaccacaggaattgaagccttgggcaggggggtgcccagaatgcacctgccttctgtttcagggctccatactcaaccaaggtgcccctcagccagaactggacacattgccagagaactccaggggtcatctggtcggctcagcctcccggtttccgacagacagtaagcccaccatgactccctccatcgggaaagggaccctcaagactttgatcagacctttggactgggggtccttcccttcactgtgtctcaagtaaggcactggtctagaggaaataaggtgaagtcagatgatagcaataccactaccagtgcagtggcacatgcctgcactcccagctactacggaggctaaggtgggaggatcacttgagcccaggagtttgagaccagcatttatttatttactaacagactaaataaataaaccaacaataccaccaaccagtaaatgagaacttccatgctaaacacttcatgagcttatctggaaattgcacctctcctgatagcaatgagattggtgtgggaattccatttactcataagaagacagcctcggccgggctcagtggctcacgcctgtaatcccagtactttgggaggcgaggtgggtggatcacgaggtcaagagttcaagaccagcctggccaaaatggtgaaaccccgtctctactaaaaataaaaataattagccaggggtgatagcgggcgcctgtaatcccagctactcgggaggctgaggcagagaactgcttgaatccgggaggcggaggttacagtgagccgagatcgtgccgctgcactccagcctgggcgacagagcgagactctgtctgagaaaaaaaaaaattaaagaaaaaaacgaaaacagcctcactggccaggaactcgcccaggatcgcggccgggccagtatacagttgagctggttcaaacccgaggtctatcatgtccttaatgtcctatcatgtcagtcagttagcctgcctttcatattttccacacttacaggtcaccatagactcacctgaactgtgagaagtagaggaaggcgtcccagaggaggtgattttaaagcccaggtttgagatgggtatgcatttccaggcaagagagcccggccggtgcaaaagcaaggcttggctcacaaacgggaatgtggggggtggagacagggaagggagaagtcaatccctgggcaagacctcctggagtctctctaacaaataaatactactttccatgcagtagacgctgttctaaacactttacaaatattaactcacttggtctttctacaaccctacgaggtggtactgttactatccctagtgcaccgaagtcacccagcggccgagtgagaactccagtccagctttccacccgctactccgcgcatcccagcttgccttacagccgggtaccggctccaccattttgctagagaaggccgcggaggctcagagaggtgcgcacacttgccctgagtcacacagcgaatgccctccgcggtcccaacgcagagagaacgagccgatcggcagcctgagcgaggcagtggttagggggggccccggccccggccactcccctcaccccctccccgcagagcgccgcccaggacaggctgggccccaggccccgccccgaggtcctgcccacacacccctgacacaccggcgtcgccagccaatggccggggtcctataaacgctacggtccgcgcgctctctggcaagaggcaagaggtagcaacagcgagcgtgccggtcgctagtcgcgggtccccgagtgagcacgccagggagcaggagaccaaacgacgggggtcggagtcagagtcgcagtgggagtccccggaccggagcacgagcctgagcgggagagcgccgctcgcacgcccgtcgccacccgcgtacccggcgcagccagagccaccagcgcagcgctgccatggagcccagcagcaaggtgagtcgcgcgcccgcgggccctcccgccaggaacaaaggcgcagactcctgcccgccttacgccggccagggcctcccccgccgccccgctgcgctgtgcgcccggggcgggccgcgcgcctctccgagcctggctcggtgcgggtcccgagcgcagcgccccgccgggccgctggccgcagtggggatgggcttcggatctagcgggccggagggcgccgcgtgcgtagttggcgccggcactgagcacatggcctccttccgggggcgccgcgccgtccacgcggccctgctggggctggggacacagggcccgggagcggcacgtcgcacacgacctcggcagcagcagcccagcctcggcccctcccggtgcgggggagggggcccgagcgcggcgcccattggctgagcgggccgagcccccggcccggccccggccccggcgcgcggaggagtcaggagccgcccccgctctccgtctgctcccctagcccggacgcccctgtaggtgggcggcctggtgcgaggtgtcccaccggcctcccctactcctcccgccagtcccccgcggtgacgaggccgaggccgaggggagggcacttttctccaggcccgggctcgaacgcgggggttgagatgaacctccggtctcggaggctctcctttgcgaggagtgcaggccccaaagctttggcccagtctcgcggagatgtgttccgcggaggcaggtttaccctcggggccaggcggggagcgcaaccggaggggcgggggatctggggg

SEQ ID NO: 3975 - DNA, 6000 bp, Homo sapiens
atggtcctatttctgctctcctgactcccactcacttagctctgcggaaaacatcacagccttctaaactggtacactccttatggtctcccacccagtggggccttccacttagctgttcactaagctttcccagcattccatcatcagttactccagagtgaaccacttccctacaattctttatcccatcacctacccatcccccatgttcagcaactacctaacatctgactgaaggaaaaaatagactcctttagacaaaactccctcaatttcctcccattccactgacgaacttactctatttccgttctccttagccagaggctactctcttcatgtgtatgctggatcccattgtcactctccatacagcatataaacatgctttggcctcttcccattaagaacaaccatctagcatcaatctggaggtgagagccaggcactgatattttaaaagctccccagttgattctagttgcagccagggctgaaaaacatatacagaataaaatccagtcttcttgctgtggcatacaaggctcttcataaactgactcatgcctacctttcttgccctcccatatgccctctgaactggagtcataccaaactacttagcgttcccaaacccgccacatctcttgcttctatgccttcacatacatgcttcgctccacttagaatgcctttccctgcttcctagaaagtgtccttttttttctttcttttttttttttttgagatggagtctcgctcttgtcgcccaggctggagtgcagtggtacaacctcagctcactgcaacctccgcctcctgccttcaagtggttctcctgcctcagcctcctgagtagctggaatttcaggcgcctgccaccaggcctggctaatttttgtgtattttttagtagagacagggtttcaccatgttggccagtctggtctcgaactcctgacctcaggtgatccaccgacctcagcctcctaaagtgctgggattacaggcatgagccaccttacgcggcctagaaagtgacctttaatgctcaattaagtgtcatttttgcatcacctttaagaattagcctccatactgagttaaggtgcccccgcaccccagtgctttcataaccctctgggtttatctctatgggaacactcaccacatatataattgctcatctatatgtctgtcttttccatcagactgagtgttttgcaggaaccccagggccatgaagatgccatttggtaggatttggggctaagtggtctatatcagatatttgagcatcctcaaatatttggcaaacatccattcactgtttgccaaactgaacaaaagaaactcaggaagggggagaggggtatgatagaacctgggacaagagctgaacaactgtctttgagcatgttcattcatgtagtcagtcagcatttattgagggcctgccatggtcatttacaaatgtggtccaggtaaataaaaacacagttgaagtttcctatcactgctgtgtttggcctctgggacagtttcatcatctataatagtctgctttgtctctagtgcactcttatgatggacatttaatccaaaatctctcaatagtgctctcacaacagtggtttgcacacagtaactgtttaggaaagattattaaaagaatgctcatgaatctacatataagtatgtaccttcctgatactttgggcactttcccaccttgtccattaaatgttgagacagaaacagtgctgaacaccttacatgtgttatctctttcagtctttacagcaatcctatgagataggaactcttattgctccaattttatagaggttcagcaacttacataaggtcacacaggtactaattggaacatttaaactcatggctttggagtcaggtgtgaacctgaagtcattagagtatacctggaacacaggctttcaataaatatttatggactcagtgatactgttcccaagggaaatggaaaggctttctaattcttattgtcctctccacttgactctggttcccttggcctctcttcctttcccacgtcatcccattcacactaacattcattcaacaaaggtagagggccaactgagtaccagataacgggccagatgctggagatacagagatgacaaaacatggcccatgctgagaggagcttatagttttgcgatgcagataagcatataattacaattgtgggagcaagaggagggagtgatttactgcctaggagacctgactgttccttgtgctgagccagggggcaaggtttgagggttgaggggggtatgaaagatgctgacatcctcggggaatggttaaagcactgggtggggcccaggagagtgtcacaggtagaatgagaggacaaggcagggaccagatcagttaggaccttagtgttggagccttttaaacagtgaattctgccatttcctttcaaggatgggtactaataggctgggtcatatctgtactttggctcagacctcttacctaaactctaggactaaactttcacatagctatatcccaccatttgtggagttatttatttatttatttatttatttagagacaaggtttctatcactcagactggagtgcagtggcgcagtcttggcttactgcaacctccacttcctgggctcaagtcatcctcccacctcagcctccagagtagctgggactataggcatgcatcaccatgcccagctgattttttgtattttttgtagagccggggtctcacgatgttgcccaggctcgaacttgtgagctcaagtgatctgcctgcctcagccttacaaagtgctaggattacaggtgtgagcctccatccccagcctatcctaccatttatgaacatcttttttttttttttttttttttctggagacgagtcttgctctgttgcccaggctgtagtgcagtggcatgatctcggcttactgcaccctctgcctcccaggttcaagcaattctcctgcctcagcctcccaagtagctgggacaacaggcgcacaccaccatgcccagctaatttttttttaaatgtattttagtagagatggggtttcactgtgttgcccaggctggtctccgaattcccttttttttttttttttgagacggagtcttgccctgcactccaggctggagtgcagtggcttgatctcggctcactgcaacctccgcctcccaggttcaagcaattcttctgcctcagcctcccgagtagctgggattacaggcttgcgccaccatgcctggctaatttttgtattttcagtagagacggggtttcaccatgttggccaggctgttctcaaactcctgacctcaggtgatctgcccgcctcagcctcccaaagtgctgggattacaggcgtgagccaacgcacccggccttttttttttttttttttttttttttgagacagagtcttgctctattgctcaggctggagtgcagtggtgcgatctcggctcactgcaagctctgcctcccgggttcacaccattctgtctcagtctcccgagtagctgggactacagacgcccgccaccacgcccggctaattttttgtatttttagtagagatggggtttcaccgtgttagccaggatggtctcgatctcctgacctcgtgatccgcctgccttggcctcccaaagtgctgggattacaggcgtgagccaccgcgcccggcctttttttaaaaaaatgtgtttattttccttgcggagcagggctgccccataagcagtgtgcccagagtagcccaaattccctaattctgtccgcacttacaccatccaatcatacaagcagttgttagatcgttgtgtgctactgttccaggggccgctggaggtagaaattccatttcactaaaatctagtctgtcctttgcccccactagttgagtccagttagtgagtgtggaggtgggggctggaggtgtagaagagataaataaatatatagagagccagtccagctgtctggaggacattgtccgcctcctccaatcccatcagttgccacatcttctttggtcaggctggctttctcacctggtctcctttctgtgccctcctcacactggctgccaaagtgattcagccagatagactgcaagccccgtgagtgcacggacggtgggtggtccataaacgtctgatgaactaatgatacaagcttgaatatagtctcctaaaaaaatctttagtttctcctctgcttctagaataaaaatcagatcgccccatttggccttcaagacctactacattcagccacagtcagcttcatttcccttttttcctttcactacctcgaaggccagattagccagtgattcactatgcttgccccgggccacttgtatcctctcacctccgttccaggcagccctcgcagcagatcctaacgcttagggctcctccaagtgtacaggctcgtgaggcttccctcccgctaagaccagtgcgccctcagcacacgcagtgtggtctcgcccgccgctctgcgctcgccctgcaggagagggagctctttgaaggcaaggccgaacctcccccgagccctgagctgggcctgccgccacagatgtgcagtcctgccggggagcagtcacccggggacagggccgggccccgggctgcacgtcgggaagagacagcgtgctcctgaggtggccaggccgctgcaactggccagggcgggcccgggcggcgagggaaggggtgggaagcccgggccgcggcgcttcctgctgggacccggcggcacgcccctgcccccgccccggccgagcctgcgctgccggcctccggccctgccggccgcccaatcagcgggcgccccccgcgcggcccgcccctccccctctggtgacagaaagtcggcccagcagatgaggaagtggcaggcaggcaggctggccccggggacttctctctggccctgctccctccgagcgctccgccgttgcccgcctggcccctacgggtgagtctggaccttccacggactctccacgtgccggcgccccctgcctggccagcccggcccagcccggcccagccctgccctgccctgcccaggctgtgggcgagggtgttcccggggccagtgggtgggaggtcccagctccctggggccgggcctcgccagcaccctccctcccccacacccccgtctctggcccccatttgcctacacccgggccttcctccaccacccctgcatttacctctctccctcctcctctcccctccctccccccgctaccctaactttgccaggcaccttttcccttccatccatcttaaaggaaggaagggacgggctgagttccccgacgagagacacacccagattttcctgcagcttggggagaggtcctcccaggagccttggtccctcctggcctgccgggtgtgtgggttgatattgggggctggtggttgagagataacaggctggctggctcccatgtgtcagggaggaacctgtgttggcgccctcgccccggcctgggccctgccggcgatgggcggccagcaagcccgatggtgggggagcaagtaaggaggggatccgagcgtggccaggcagcgcgcacacgtgtgtgagtggccccgcgggtgagcccgtgcgtgtgcctgggcggtggccgagctgcgtgagggccgggagccatgcgtgtcagcccacggaggtgttgcgtggtgtgtcaggcaggagacgtgtgtgccagccctcggcgtggcaccttcgctgttgggggtggagagctaggtgagaggtgggtgtggaccgcaggcttggggcctgaccacggtgggcctaaagaagccgggcctcctggaggtgaggggtgtgcggggcagggaggtgtcagaggtgcgcctcttcacttggcatctgcagaggtgcttctctggaagcag

SEQ ID NO: 3976 - DNA, 6000 bp, Homo sapiens
ttcagccagccccagctggcctttcccctcttccggcctgctccccacctgctccctgggccagcccatggtaagaggcttatcacatatgtgtgggggacagataaggcagggccccacgcagggcttatccagccctgccatccctgctggggagctaccagcagatggagccccgcccgcggtctggggtcactccttgtgatgctgccagagctctttatgatgccataatttgtagtgacatcattgctgtgtccctcctttgagtctgagagggttactcagataagagttggggaagtggagtcagacaggagccctactgaggctccaagtcagtgggccgggttgggctggactggaggagagagtggtgccagaggatcctccccagggcagatggctatttttggtgtcgactgctcggcttatagccacccctcttcctgtcttcccaatccaaagaggctctgggtccagcaggggcaggagcagtaggagaaatctttagccctgcagcagggcagctctggggtcagtctctagctcaggaaccagcctgttcctccctacagtgaggcctgaccctcagtacctcgggtctgaggggaaggggggccttacttccaatccttgaaatagcagtgaggcaaagagagattattaggatggccagacagacggacacagccagacccaccataatagtcacacacattaacttgctgatgtgggctgcaggcacagcctcacgccaacaccatcacactcacagccattcattctcatagccatgcccacagctacacgtgggccacagatggctgaaccacacggacataccagcacaggcacaatgtcacctgtcccatctgggagaacaggaaccccttctctctcacggttgtactcccagagaggagctcaattcccagcacatggcagatgcgcactaatatttggtgagtgaataaatggacattcagtgccacagggcctgtgaccaggctgggctgaggccagagggaacgccatcccacctgcaagcctgctcgacctctccagacccaggatgggagcatcgaggaagaactacaactgccagcaccaccccagccccaacttcagtcatggccactcctcagataataggtcactgaagggacctcggttatgtagggaccctggttatgcagggaccccactccctccctccaggtgcagtgaattggaacactggcactctgaaaatggaatgttatgaacattgggtgctctggatgttgggtaccccaggccccctggaatttggcactgggggctctgggttttgggtcctctacagtgttgggtgctctggcacccttgacattgggaattcaggactttgggagctcaaagcgattgaggagtctgggtgttgaaagctctggagattggggctgccccttggacaacgccaaagtcaatacttcctgtctatatgcctgattttacctggagccactgaggtccagcccggaacccctgttctgaaccccatgattggcttatgctgccccaaggctggggtggcagggctggggtggcggggtttcaggggtagagaaaccacaacaggatggcctaaggggtacctggagccccagagacagctctcaggtctgaaaccaatctaacctgctcctctgcattgggacagggcagtggaggtgccaggcactgaccactgggctccaggttcaagaaaggaagaatctgagagcagagcccaggcaggcacctcccagtaatgcttcctggctactgaggctggggttctaaggaggtggagacccctggccaggcctggcttcaactacaggcaatgtccaccctcccccaccttctcagcaggcccccagcaccactccatcaaggtgcccagtgctgccagctcctgcagtgaccaccagaagtggcccaagtctggcattattcatattcctactagacacacacctaagctgactatgtgcatctcgaaacagaggccttgatcctgcaggctgatgacaccactcgaggaaaccagccagccctgggggctctgacgctggatgcagccctcccaggaaatagctccactggctgcagtaactggaggctcctgagccacatttcagcctgcagtgggtggtgggtgggccccagcccaactgctgccctgccccaggaagaagcaggcccgtcaaaatgtctgaccccgtccgtcccccatcccctcccctgccccagtctgtcctcagtcctgatccccctgcccgccccacagtggcccaggctggccatgcccttcccaccctgcaggccagctgctcagagccaggggctcacagccagggacggaggctatcccagctcccacccgggctgggcccaaacctgcctcctttgggcctcattctgattggaaaaaaacagcctctctagtccctgtctcaggaagatgacttttcaaaccagaatctttctcacaagtgtctcctcaggacacagctgtgtggtttcctgaagctctttctggttcaaggtgggtaaaacacacatatccatgaatctgtttctatgtatacaaatagactttgagctatgccagtgttagtctaataaagccctctggccaacatccccaatctccctaaacactccaaggaaaattttctcttcaccccacgtccctgtccctaggttagtccccaagccttcctctttctgacggagcctcagagggctggcccctgagcacccatcctcctctcttctaacagcccaggccccaagcccctaggcctgagggcatcctggaagtctggcttgcagcaccctacacctgcctcccttcatatggattccctgagccatgaaaactctcggaatcttcactgagtgttcttagcgctcagtgccctcttctaggcctgtccccaccccagcctactgctggaagggagaaggagggaggccttttccccttcatactcttccttgtccgccttcctctacttgggggcctcttcgacatcctccatctgccttccctggggtggtatcccttttgatgagccccagcgaggaggcaaggaggaagatcctaaaaaaaacttatggaggaagttacgtcctggcaggagagatatagagggcttggaccccatctgcccagtcccaggaattgagcacacacataactacacagacctgctgcagtgcacacaatcagtcttccacagatgtacctacacaaatacacaatcggggctcaggtgtctgggggcacagacacaacaggttgcctagatccaggtgtgtgtgcacacaactcacgcaagaaacacctgcacttggcttgtaggagactaaaaatcccaaacatgctatacctactaggtttggggacaaagtaaaagtgaaaataatctcgctgataagactaaggtgtcttcccagatctgatcaggagtccaatgtgaataggagacaacagagagctgtctttgtactttggctctgaggaaggtttgtggaatggaccgcgtgtggcctgagagagctcgcatttcagggaatgcctgggcttgatgcctgttatcttgttcagtgcctctgataaattaataaactggaatctcactcaacaattggtttcacgtgagtttggcatgtgtgcactcgcttcttggaggctgactgtcccaaggaaaaaaattaaactgtttcctggccagaaaatggtgaggactcagggtccaaagtagaaattgcctctgtgggctgggccccttccctgagcagatgccctactcaggttggggcaaaaaccagttcctctgacagaactaactggccactctccatgaaaggtggtggctctcacaaggtatgcaaatgtgggaggctcattccaaatgccagccaccactccccagaggcagcctggagcaatgggctttatatacacacacatgcatttccttagccccttctctctgtttcacagaggaggaaaccgaggctcaccatgctccttttggcaaagactcttttttagctgagattgtaacccaggtctgtctcaccatggaaggaggagggatcccaggttggtgtctgcagcccctgtaacaccacctcaaaagtagagctgaccaagccggtggtccaggagggaaatttgagaaagggctaccccgagccctccagttccaaggagtaggacctaggccttacccagcaatgcccacagtctctagcggctctgctccaaagggaatggaatttgctctgacttctctctaggggaaacgcaggcgcagaaggccaggggcctggagggctaactccagcctcagccccccatagtgccccaggccttctggcttcattccagcctagcccgaaggggcccacatctgcttgctcaagggccccagctggagggcagcgaggcaggggcggagaaggggactcctttgtggcgctcactcccaggggttcgtggggatcaatcatctgaaagctggagagacttgtaattttattccctgggaggaggagcctgagaagtcggcacgggaggaggggatgggatggagaggggaggacggccaggggagccgttcgggtaggggagggacttggctagatctcccaagccttctccactcttcaaactttcaccaaactcttagcccccgcctccccgaaaccaaaacacaacaggctgtggaagagctgcgagcggcgcggcggggcgggcgaactcggcgcggcacagagcctcgggaggctgatgcaactttccctttaagaaagccacctgggcgcaccgcggtgcggacccagcacgcctgggccgggggctgcagcatggtaagggggctgggggaagggacgctggggcccgcgcctccgtctgtcctgccgtcggtctgagtgttcggcggctccgcggggctgagccccaggaccagcgtgtgcgtgtgtgtgtgtgtgtgtgtgtgtgtgtgtgatcgcgcatgtatgcgggcatctgtgggtaagagtgtgggtgcacgcaccgggatgtctgtctcgccgcaaagatcggggtaggtgcgcgcgtctgggtgtcaccgctgtcaccaaggagctgaagcgggagggagagggaagtggggggagctcctgcgtggggtggcgggggggcgccagacgccggttcgatcgggggcggcgggcgcaggctgtgcgggtagcgccggagccagagcgtggcactgtccgtccgaggagccagtggttctgcgctctgggggcctgcaggggtcgacagtcggccgtgcctgcacccagcgtgcgggctcccgctcgctccatcgcctctcagcgcccgccagcctggctgcctatctggcccctccagccggcctgcctccctatctgccctcccggtgccggttccagtgcccgtgcgcccgcgggacccgggaagccgcgcgggagagtcctggcgcactcagcctctctttgtccgcgctctggccgcggctttgggaagggactgcgagcgagccgggagttctctgggggttgctaccctgggaagaatccgtgccctccccaccccaaccctcattaccggcacacctagggcggggccgggcggccgcaggtgagggcaggggcctagcagccctggagagcccacccccggccggcgctccgcacccggcagccactgcagatctcgagcaggcggcggggccgggccgggcgggagagtggggcttgcccggagggccgggaggggccggtgccggcccgggggcggggccgtggggcggggacctcggcgccccggtacttttccaccgcaggggccgggggcggggccgccgcctccacgccagcttaggcccacacgtggcggctgatgtaacgcccgtgcccccacatctctctccccgattaaagcgg

SEQ ID NO: 3977 - DNA, 6000 bp, Homo sapiens
agagaggctgcatttgttcttagcctgtctccttcccccacacttaaagtgaaggaccattccctaatctctggctgcagccctggcaccaaatacttgataggtacgccaggcgcggtggctcacgcctgtaatccctgcactttgggaggccaaggtgggtggatcacctgaggtcaggagttcaagaccagcctggccaccatgatgaaaccccatccctactaaaaatacaaaaagttagcccgacgtggtggcgggcgcctgtaatcccagctattcaggaggctgaggcaggagaatcgcttgaacccaggaggtgaaggttatagttagccaagatggcaccactgcactccagcctgagcaacaagagcaaaactccatctcaaacaaacaaatacttgataggtgctattggcctcaacctgcccacagggaaggagcatacatacccaggcttggcccctaaatataacaggtggtgatggggctgcccaggacccccacttccctcctccacatctcagggtcattgactctgcttggcctagataacagaagcagccaaaagctggcgagtgagaagcctagaggaatgccagagaaagcaagcctgccttgcctccaccatgaattaactcccacatgaacccacccctgaagccagactggtcactttacccagcactgtgtgtatgtgagtgtgggctgcctcacttttcctggcactgttcctcagccatatgtattatctcatttaatccttatgttaatgtcagagattatgtgacttccctgagatctcacaaccagcaaatgaaagatccagaccatgagccattccttttccttttagattctgtcatcctcccacctctcccatccagttcctttcacttctggaaacatccctgagtacccccaactcagtggtttcccctgtggtctctgtgctccccctcaggctatgaacttctaaaaagcaggtaccctgcaacaccagaacccagcaaaggaatggacacataagagatcccaaggctgggcgcggtggctcatgcctgtaatcccagcactttgggaggccgaggcgggtggattgcctgagctcagagttcaagaccagcctgggcaaaacggtgaaactctgtctctactaaaatacaaaaaaattagccaggcgtggtgtcacgcgcctgtggtcccagctactcgggaggctgagatgggaggatcacttgagcctgggcagtagaggctgcagtgcaccaagatcatgccactgcactgcagcctgggtgacagaatgagaccctgtctcattgaaaaaatttaaaaaaaggagatcccaagacgtttgtttcatgagtcagtaatgagatttaattagattgcttttatcctgttatttggagaatatctctagtttaggcccaaaacacgtacccaggaccagtggaaatgacagtgaaacaagctgttctatcataaaggaggctgcttgcagaaagagaagagaagcctctttatcccttcctattcctggggtctatggctttggctctggctgagcttagctgggctcaggaaaccattttgtttgggagaagacaggtcattttgtagcttggagcagccagacagcactaggccctaggttggaaaggctggaaactgtagacccatttcttccatcctagtctttgaactataaggcaagaggtttccttaatagacagacttggccttggaagcatccatagaaatggtggactttgtcacaattgttagcagtgatgggcctatgatgaaagcagagtcccaaggcccaagtggttacaaatctatttatccatggaccttatgtcttgcagagtctggtaaaaaggaaggagattaagacttacttaaagcatagcatcgggagttgtactcctgatgacaaccagtgctgagtccaggccactccctgtcttcagctattgccccaagagcaaactaggggcccatacagacttaagttagaggctgtttctatttcagagacttgctaggggtacagttctttttaaccttaaattttttatgttatcattattattgttttttgaggcagggtctcactttgtcgcccaggctggagtgcaatggcacaatcacagctcgctgcagcctctatcaactctcctgcctcagcctcccaagtagctgggactacaggtgtgcgccaccacacccagctaattttttattttttgtagagatggggtctcactatgttgccagggcttgaactcctggcctcaagcaatcctcccgcctcagcttcccaaagggctgggattacaagcatgagctaccatgccactttatgctcagcaggacacactctataacagggagaagaaagtgctattcaggtaggctgcttttcatgtgcagttactgtttggccaacagcatcatacatatattagttcctccataggcatttttctgggtgaatggacaaatggaaatggcaaacctgttaggtgttcaccccttcaacctaaatgttcctcttccccaggactgaggctctagagatgatgttaatttgcacaagctttcaaaaaatcagttgagcagtgtgtatcaagagccataaaaatgttcatactctttgacccaaacaacccacttctgggaatctgtcctaaggatattctccaaatgattgattacaaaaactacatagtaacatgaaatatttatgatggaatgattttttttaagtctggaagaactgaccaagaaatttgccagagataatagtagttgtgttagaaaaattagcttattgtagattcattttctctttctcaaactttacatattggaatattgattttaccctactctgccacttgaggtttatcaatcaggaacccaatagaaacagcacactcagataggatagttgaaagtttaatagagggactattgcctctattcttcccaatttccaatcctttacaccctgaattctgcaactcttagtgactcactcaacaattattaagcacctatttattgtctggtgaagaaggcagactttcaagtacataagtttttgtgtcataaatgcaattatacatatataaattgagttgttatgcagagcacaaagaagcaattatctgccaggagagagacatgaatcaaggaaggtttcaaagagggggtaggctgggtacagtggctcacgcctataattccagcactttggaaggcccaggtgggcagatgacctgagcccaggagtttgagaccaacctgggcaacatggcaaaaccctgtctatacaaaattacaaaaattagctaggtgtggtggtgcacacctgtagtcccagccatttgggaggtcgaggtgggaggatcccttgagactgggagctcaaggctgcagtgtgctgtgaaggcaccactgcactccaacctgggcaacagagggagatcctgcctcaaaaaaaaaaaaaaaaaggtgggttttgggggtgattcaagttcagtttttgaagattatctgccaagacaaaaggaccaaaacatgtacaaaggcaggaacgagggaacactgatgtgagggaactatgggagagaaggctttagctagatcacacagggccctgtgctccaagtgggccttgtgctttggagctatcagatttgcatgttagagaaatgactctggtctcagtggagagagtggactgaagagggcaagaatggaagccgggaagagtgaacagaagaaatcttgggctttgattgggtcggaaagaaagtgtggccctacccactttgatgccatctctaagacctactgctacctgacccccgacctctggaaggagactgtattcaccaagtctccctatcaggaattcactgaccacctcgtcaagacccacaccagagtctccgcgcagaggatccaggctccagctgtggctacaacatagggtttttatacaagaaaaataaagtgaattaagcctgaaaaaaaaaaaaaagaaaagaaaaagaaattgtggccctaggccgggcgcggtggctcacgcttgtcatcccaacactttgggaggctgaggcgggcggatatcctgagctcgggagtctgagaccaaccggggcaacatggcgaaacccgttctctaccaaaaatacaaaaagccgggcgtggtggtgcatgcctgtgatcccagctactcgggaggctgaggtgggaggatggcttgagcctggaaggcggagcctgcaagccgagatggagccactgcactccagcctgggtgacagagtgagaccccgtcttaaaaaaaaaaaaaaaagtgtatccctaacagagcccgcaaaggccctttctcagcgtaagcctctggacttacacttggccggcgctgcgcctctccgggatccccctccctcctcctccctggggccccgcgggcgggagggaggcgcggggtggcccagcctgggtggtctcccgccccgccccctgcggcgccgttacctagcagcgggccgggccgcgcggctagggtaatttgcgggcccctcagccaatgggagggcgtcgccccggccagctcccttttctggagctccagccgcctcccggggactgcagttgccacctcgagccctgctgtgcgtctcgggccagcaattccgcctgcgcgcgggacccattcctcctccagccgccgcggcccacggcccacggagcgggtgaatcccggcgccgcgccccggacccgcagctccctgcactcctccctcccagccgctttaacacccacaccccacagtctctcccacgcccgcgccttggcggccccactgaatccctacgcggggcccagcggtaccgggagaccgggctagcctatgggagcgcccagataacgcgggttgggggcgcccgcgccccccatccccgccagcatgactcgatcgccgcccctcagagagctgcccccgagttacacacccccagctcgaaccgcagcaccccaggtgagtagagggggagctggaagaaggaagagagcggagccaggtctgtcactcgggcctctgcaaggtttgtgatgtcttgaagtgccgagtgtcattagatgtctgaaggcaagtgagagccagcaccgcaagcaagttgtgcgtgtgtgtcggtgtgtctgtgccggtgtctcctcatcgtctggccagtgagaatgaatgtctgtgggttcacctctgtgtccacccgacgacaggtgtgtgtacatatgtatcctgctctcagaaaatgggcctatgccggccgggcgcggtgactcacgcctgtaatcccaacactgggaggctgaggcaggcagattacctgaggtcaggagttcgagaccagccaggccaacatggggaaactctgtctctactaaaaataaaaaattagcagggcgtggtggcgggcgcctgtagtcccaactactcgggaggctgaggcaggagaatctcttgaacctgggaggcggaggttgcagtcagccgagatcacaccactgcactccagccagggcaacagagcgagactgcgtctcaaaaaaaaaaaaaaaaaaaaaaaggagagaaaacaaaaagaaaagaaaggaaaataggcctatgccttcctcaggtgtgtgctggggatggtgggtgttacatcttccaagtctgggcctgtgtctgtgttggtgctccctgtcccacatccagaaatcaagaagcgagggctgggcagcagatatacagggtgagaagggaaggatttcatgcattgttgcagtgatgcctggctgacccttctctttccatcccagatcctagctgggagcctgaaggctccactctggcttcgtgcttacttccagggcctgctcttctctctgggatgcgggatccagagacattgtggcaaagtgctctt

SEQ ID NO: 3978 - DNA, 6000 bp, Homo sapiens
gccggggaccggctcccgggggtcctcccttcgccgctgctaaagcggagcaaaaccggtgggtccccgcccgcgcggcgcgggggcgggaggagggcgccgtaacactcagaaaagccgcgcagcaccgtctgtggatgtattcgagtgctgcgcacacaacctctggccctggattgcgtggggctgggcgattctggagttggacctgaaagagcactcggagacctcagcgccttcgccccaccctggcactgaatccagccaggcacacagcaggcgcccaatacatgtttgcagaatgaagtctaagcagcttcagtcagagatgtgggagtttaaggaacagcggtaacagagagctgcagagggcttggaagtcttcctggagcagaggaattgggtataaaacgatgactggattttagctagacacacacacacacacacacacacacacacacacacaccaccccccccccccaggggctagaattcaggctaacggagtagaaaagggcaaccagtactgaagctgaagaggtccacgttgggcttacaagcaagatgctccttaagcttgactgtgcgtatgaattatctgcggatcttgttaaaatgtaggttctgattttgtaaatctggggtggggcttgagatcctgcattttttttttttttttttttttttttttgagacagagtctcgctctgtcgcccaggatgtagcgtggtggcgcgatcttggctcactacaaacctctgcctccctgggttcaagcaattctcctgcctctgcctcctgagtagctgggattacaggcatgcgccaccatgcccagctaatatttttgtatttttagtagagacagggtttcaccatgttggccaggctggtcttgaactcctgacttcaagtgatccgcctgccttggcctcccaaagtgctgggattacaggtgtgagccactgcgcccagccaagatcctgcatttctaataagctcccaggtgatggccatgctgctggtccacacttcaagtaataagggaccacactttgagtaacaaggttacagaaaatggttctgagatgtttgggttttatttaacaggtaatgaacagccatgaaaactctggtttgtttaggcttttaattcaagtaattccagcccatggttgcagaaggatttacaatgagaagatagttacccctaccctaccctttcacacctctaggcccactcccaattggcaaaaaataacttttagtttttttttttcttttggtgttcatacccataacgttattgtttagagttaactaaaagtggttgccaattgggagtgggcctagaggtgtgaaagggtagggtaggagtaactatcctcttattgtaaatcctaccactattttttcttttttagagacagggtcttcctacattgcccaggctggactcaaactcctgggctcaagcaatcctcctgcctcccaagcagctgtgactacaggagtatgccaccatgcccagccacactacttctcaattttaaacattcatctgctgtttattgtcctattcagataaatatggatatatgggtttaactcacactctgtagttcctttcccccattggcaatatatatttcttttcttttctttcttttttctttttttttttttttttgagatggagtctcactctgtcgcccaggctggagtgcagtggcacgatcttgactcactgcaacctgccctcctgggttcaagcgattctcctgcctcagcctcctgagtagctgggattacaggcacgtgccaccatgcccgactaatttttgtatttttagtagagacgggggtttcaccatgttggtcaggctggtctcgaactcttgacctcgtgatctgcctgcctcagcctcccaaagtgctgggattacaggtgtgagccactgcgcccggcctggcactacatatttctatcactctttttagttcatctaaggttacctttgtaattaactttttttaaaatttagatagagtctcgctatgttgcccaggctggtctcgaactcctggcctcaagcaatcctcccaccttagcctcccaaagtgctgggattacaggcatgagccaccatgcctggcctacctttataattttaagtaacatcattttccttggtactttttgatccatggaagggttttaagttagagatagacaaaacatttgtcttttttttttgagacagagtccggctctgttgcccaggctggagtgcagtggcaccatcttggctcattgcaacttctgcctcccaggttcaagccattctcctgcctcagcctcctgagtaactggaattacaggcacctgccacaacacccagctaattcttgtatttttagtagagacggggtttcaccatgttggccaggcggatccatccgcctcaggtgatccacccgccttggcctcccaaagtgccgggattacaggcatgagccaccgaacccggcaacatttgccttaaagaaaatcactctggattttgcaaggagaaaaggataggaggagtaaaaatctagagtcaaggagactggctggaaagcaagaaactgaaatggcctgcactggggctgattgtgaggtcaaagaagaattagactagaatggaaggctctttaggaggtaagactgacaggactaggtgactggttacattcatttatagtggcattcaataaaaatttgttaaaaaatacaaatgaatgatttcaacaaatgttacggagagcttactatgtgccagcctttgtgtgtggtgtagagaatacaatggtgagcaagacatacctggactggtcactggagacagacaaggagtcaagggtgactcccagctgtttggcctggtgcagttcactgaggaggggaacccacaggaaatctaggagtgaaaggaaatgattccagaagttgtgctgttgcgttagaggggcctgtgaagatgtcctgctggacatcaggcagcctggagctcaggaaagaggttagaactgccaatgtcagtttgggcatctagattggtaacagaggtcatgagagaatgagatcatccatgaagagtcagtttgaggagaaaagagggtcaggaaggaaccctgagggacatcttttaattatttatttttatttttttattttttgagacggagtcttgctctgtcactcaggctggagtgcagtggtgcaatctcaactgcaacttctgtctcccaggttcaagcgattctcctgcttcagcctcctgagtagctacgattataggcgcctgtcaccacgcccagctaacttttgtatttttagtagagacggggtttcaccgcgttgggcaggctggtctcaaactcctgacctcaactgaccaccccacctcggcctcccaacctgctgggattacgtgagtcatggtgcccagccgggacatcttttcaaatgtaataaaatgtgttgggttttcttccattcttatacatacttactaggaaaaatcatgtatttctttaactcctaagacaagtactgttaacatttcattttgggggatattaccccaccattcaggaagcagatggaatacagaaagctcaaaaaaatctaactggtcttctggcttcctctgtctgcttccaacccattctccacaaaaaaagtaaaggttctcttaaaacagaaattggattatattgctcccctgcctaaaactgttctatggctatccacttcaaacaagcatcaacatcacctagaaacttctcaggaatgcaaaatcccaccctgccccagaccactgaatctaaaactctagggatggggcccagcacctctgttttaagaagtcatccaggtgattctgacgcaagctaaagtttgagaaccattgtgttaagctaactgctttctatgtatgatgttatttaaacctggcaattcttatgtattgttgccagcagagtgcagtggttaagagcagaatctggagctaggctgagtttcaattccacctctcctagctttgtgatattaggtcttatttctttatctgcgacagggatagtaatagcgcctatagccagcacggtggctcactgcccataatcccagcactttgggaggccaaggcgggcggatcacttgaggtcagaagttcaagaccagcctggccaacatggtgaaaccccgtctctactaaaaatataaaaattagctgggtgtggtggcgcacgaccgtagtcccagctactcaggaggctgaggcaggagaatcgcttgaacccagaaggcggaggttgcagcgagccgagatggtgccactgcactccagcctgggcgacagagcgagactccgtctcaattaaaaaaaaaacaataataatgataatagcgcctacctcatggggttgttgtggaattaaacatcatcagtaaggtgcttagaacagtgacagaacctggattttaatctcccttggcctccaatagctgtgcatgccccaggactaggtaacggccttgcccaggacgggtatggggcgggtggtgtgtgccctgtgtccaagggttgcagcccctctgaccctggcgtgccctgtgatctggtccaaggtgctaggcctctgactggagtcgggcttgccatcggcggtgctggggagcgggctgctctcgtgcaggcagccccaccagccagccgggctgcgaagctgcctagcacggtctgagcattcgccttactcgctggctgcttacaccccgacgccgctgccgccaccgccgccgccgccgccgccgccctaagcaccgcccgtcgccctctcaccccgcggcagcggcggcggcggcggcggcggaagcgggggggcgggccaggccggggcggggccgcaagcggcatggaggaggcggaggccgcggcgagccgggccgagcagtgagggccctagcggggcccgagcggggcccggggcccctaagccgtgagtgcctccgcgtgggtgtccggaacgggtagcgctgccggtgcaggtctcctgagccctcgggcggctccgggccctgggaggaggagagaagctggggcagataggatgggacgagggttgaagactggggcaggagaggtcgctctttgctcaccacaggcttgggaaggcctggaacttggtccttgtaggggctaacgaactttgagccgattatttggcctccacccttggacagccttgattcagagagttactccagtctcagggaatttccaggtgatccaaccccactgaagggtttcctgccagcccagagaagttgagccactttccccatgtcacacagtatgggtgcttgcagggaagagttgctgggaggtcctccctcatctccccagaaggcatcagactttgggaggagcatcttaccccatgtggccctctggtcccttcagattcctgaagtcatgggctggccaggacattggtgacccgccaatccggtatggacgactggaagcccagccccctcatcaagccctttggggctcggaagaagcggagctggtaccttacctggaagtataaactgacaaaccagcgggccctgcggagattctgtcaggtatagagatgtcccaaaccctccccaccgagcgctccctcccagcttcctccccacctaaatcaggcactgggacccctgttggccagccccagtgggaaaggggcagcaggttcctagaggggagacctctatgtgtcatgtccctataggtaatgatttgaacccaaagttctggaatcggaacccaagtacaacttctaagcttctgacggaagcctgaagtctgatcaggctggctttgcagagaggcacacccctgtgaggcagttagggccaggacccaggtctgatcccccgcttgggtccct

SEQ ID NO: 3979 - DNA, 6000 bp, Homo sapiens
tgtgcacatgtatcctagaacttaacgtataatataaaaaaaaaagaatgaaatcatgtcctcttcagcaacatggatacagctggaagccattaccctaagccgattaacacagtaacagaaagccaaatactgcatgttatcacttataactgggacctaaacattggatacacatagacacaaagatgggaatggcagacactgaggactccaaaaagggatgtgatggagggagggggaaaggatggaaaagctacctattaggtactgtgttcactacctgggctaggagcccaaacttcagcatcatgcgatatactcatgtaacaaacctgcacatgtaccctctgaatcaaaaatttaacaaataatattttacaaaaagagaaaaaaagaaataaagccatgcacctacagccatctgatcctcaacaatgttgacaaaaataagcaatgggaaaaggactccctatacaataaatagtactgggaaaactgggtgaccatatgcaaaagaatgcaactggaccctgacttttcaccatataacaattaagttaagatggattaaaggggccgggcacggtggctcacgcttgtaatcccagcactttgggaggccgaggtgggcagatcacgaggttagaaggtcgagaccatcctggctaatatggtgaaaccccatctctactaaaaatacaaaaaattagctgggcgtggtggtgggcacctgtagtcccagctactcaggagggtgaggcaggagaatggcatgaacctgggaggctgagcttgcagtgagccaacatcaaaaaaaaaaaaaaaaaaagacaagatcgattaaaggtttaaatgtaagacctgaaactataagaatcctagatgaaaacctaggaaacatgatgatttacatcagccttgagaaagaatttataactaagtcctcaaaagcaattgcaaaaaagtaaaaattcacaagtgggacttaattaaactgcttctgtacagcaaaagaaacttgagcaaagtaaacagacaacctacagaatggaagaaaatattcataaactatgcatctgacaaaggtctaatatccagaatccctaaagaaattaaacaattcatttttttattatacttcaagttcggagatacatgtgcagaaagtgcaggtttgttacattggtatacatgtgccatggtggtttgctgcacccatcaacccgtcatctacattaggtatttctcctaatgctatccctcccctaaccccccatgccagataggtccctgtgtgtgatgttcccctccctgtgtccatgtgttctcattgttccactcccacttatgagtgagaacaagtggtgtttggttttctgttcttgtgttagtttgctgagaatgatggtttccagcttcatccatgtccctgcaaaggacatgacctcatcctcttttatggctgtatagtgttccatggtgtatacgtgccacagtttctttatctaatctatcattgatgggcatttgggttggctccaagtcttctattgtgaacagtgctgcaatgaacatacatgtgcatgtgtctttatagtagaatgatttataatcctttgggtatatacccagtaatgggattgctgggtcaaatggtatttctggttctagaccttcgaggaattgccacactgccttccacaatggttgaattaatttgcactcccaccaacagtgtaaaagcattcctatttctccacatcctctccagcatctgtggtttcctgactttttaatgattgccattctaactggcatgagatggtatctcattgcggttttggtttgcatttctctaatgaccagtgatgatgagctttttttgctgtttttttggctgcataaatgtcttcttttgagaagtgtctgtgcatatcctttgcccactttttgatggggttgtttttttcttgtgaatttgtttaggttctttgtagattctcgatattagccctttgtcagatggatagatcgcaaaaattttctcccattctgtaggttgccttttcactctgatgatagtttcttttgctctgcagaaactctttagcttaatcagattccatttgtcaactttggcttttgttgccattgcttttgacgttttggacatgaagtccttgcccctgcctatgtcctgaatggtattgcctaggttttcttccaggctttttatggttttacatcttaagtttaagtttttaatccatcttgaaataatttttgtgtaaggtttaaggaagggtccagtttcagttttctgcatatggctagccagttttcccaacaccatatattaaatagggaaccctttccccattgcttgtttttgtcaggtttatcaaagatcagataattgtagataagtggtgttatttctgaggcctctgttctgttccattggtctgtatatctgttttggtaccagcaccatgctgttttgggtactgtagccttgtagtgtagtttgaagtcaggtagcatgatgcctccagctttgttctttctgcttaggattgccttggcaatgggggctctttttttattccatatgaaatttaaagtagttttttctaattctgtgaagaaagtcaatggtagcttgatgggaatagcattgaatctataaattactttgggcagtacggccatttttactatattgtttcttcctatccatgagcatggaatttttttccatttctttgtgtcctctttcattttgttgagcagtggcttgtagttctccttgtagaggtccttcacatcccttgtaagcagtattcctaggtattttattttctttgtagcaattgtgaatgggagttcactcatgatttggctttctgtttctctattattggtgtgtaggaatgcttgtgatttttgcacattgattttgtatcctgagactttgctgaagttgcttatcagcttagggagattttggactgagatgatggggttttctaaatatacagtcatgtcatctgcaaacagagacaatttgacttcctctcttcctatttgaataccctttacttctttctcttacctggccagaacttccaatacaagcgaaaaacaaacaaccccattaaagacacagacacttctctaaagaagacatatgagcagccaaaaaatatttttaaaaatgctcaacatcactaatgagaaatgtgaatcaaaaccacatctcacacaagtcagaatggctattattaaaaagtttcaaagcaacatatgctggctaagctgcagaaaaaaaacataatgtgtatacattgtttgtggaaatgtaaattagttccgccactgtggaaagcagtttggagatttctcaaagaacttaaaatagaactactatttgacccagcaatcccaatattagctatatatcaaaaagaaaataagttgctctaccaaaaagacacctctactcatacattcatcacagcactattcgcaatagcaaagacatggcatcaaccttggtgcccatcaatggtggactggataaagaaaatgtgatacatatacacagtggaatactagacagctataaaaaaataaagaaatcatgttctttgcagcaacatggatgaattgggaggcaataatcctaagcaaattaacacagcaacagaaaaccaaataccgcatgttctcacttataagtgggaactacattttggatacttatggacataaatatgggaacaatagacactggggactactaaaggggtaggtacagatatgagtaagcattggaaatttgactaatatataccatactcactacctgagtggcagaatcatttgtatccaaaccctcagcatcacacaatacaccagtgtaaaaaacctgcatacgtacctgaatctaaaataaaagttgaaattataaaaagaggaaaaaaagaatgctcatgcacagatatgcatgtaaaaatgccagggagggttaattcatagcaacagttgctatttaacctactttacttgaggttggcaaagcaatcattttttaaatattaatttctgtttagtacagattgtccttggtcaggactcctaaacagagtgcaaagttctgattgtgtaattacatactattgtagggtgaaagagaattggtaaacaggctcctgctgtgactatagtactagactgaagtaggactaaaattgctctaggacttactctggtagaaaaggtagacctatcaataggggaaaaagtcatacctaacatgatgtagaatttttttaaattgtcatgtatatgaattgagaaaaaaaatcatgctatgcatattatgagaccagtttccccaatggaataaaataaagtacttgaacagctgctatattagcatctgtttgtccatatcatcatccagttactagaaagacataattcccactcttcactcaatatatagatggaagtggtttttatggtaaataaaattagatttgcaataagacaaaagtaatgattcagggcttggttaatgttaagtttaaatgtacatatcatgttgagaattttctttgaacacataacaaaaaaaaagtgctactgaatgaacattattgcaatgtagtaaagcagaatgcaaattccttgaggtcagcattcaagtctgttttcctcgcagcggtgcccacacacctagcatactgcctggcacacagtaaatgctcattaaatatttgtgaggtacatggacaggggaatgtggtagacagctgatgaagcttttctcccactgttgccctaggtggatcatccatagtcaattgattctgaactctgaggtccaagttctgccctcctccttcactctccccacaagtgggcgggacaatcctccctggatttgagcacagggggacgggggtggtcagagagaggtaggggcactcagagatccagcaggtgctgcaccatgagtgtctctgtgctgagccccagcagactcctgggtgatgtctctggaatcctccaagcggcctccctgctcattctgcttctgctgctgatcaaggcagttcagctctacctgcacaggcagtggctgctcaaagccctccagcagttcccgtgccctccctcccactggctcttcgggcacatccaggaggtagggaggaactcaatgggggagtgggagggcaaagagggatggggctctgagaccctggtcacaaaatccatagagcaaagccttgttttgtaacaaatgtgaggactcaaaggaacacccagcctacctctctggtctcagcttttcccagtcatgaggagctcacttctcccatgaagcccatcctgctggtcctcagctctatcacccgtgccctccttctgcagatatcaagtgtgtcttggcagtcctgcatgtggagggcaatgcctgattgtctccagactgattaccccataagccttggctttcatcaaagaacaaggcttctagatgctctctgcccagtcactcaatgccatcactctgcctggccctgtgtttgccagggagcacagacacccatctgaggaatccatgccatgaggagtttatggtctgtgaagaatacaggcaggaatttgagaaggtgtcagactgcaggaaaggagctcactctgctggggtggatatctgaggcagagatctgctggtataggggaccaactggctaagtaagtttccccaagactcacggaatttccacaacaggtgatttaggatctgaaaacctgacaattatgggtacacatgaggggggcagcctgcacaatgttctccaggtgaggagactggtgtttgagttgcacattgaacagggtgtgttgacctcctggctctcctcccacacacccggactgtgagctccctggcggtgagcatgtcatccccttcctgtg

SEQ ID NO: 3980 - DNA, 6000 bp, Homo sapiens
agtcagccctgcttataaattcccttttaaccaaagccagcttgatttagtttcctagtatttattaacaaaaatcctaactaatttggaaacctaatctaaactggctggagggtttaactttatactttgtcctaacttttatatgcaaatgagaggaagtatgatgcaatggaaagtgcatgggcttttataggcacagaaaagaggctctgagaggttcgctaacttcggcaaagtcgcacaccttccaagccaaaggctgagctttgaatttggttcagggtgactgtagagagttcagtagaactttctgtgatcatggaaacgttctctaactgtgctgtccaacatggtagctactggccacatacagctattgagcccttgaaatgtggctagtgcaacggagggactgaattctaaactatataaatttttttttgagacaggatcctacactgttgcccagcatagagtgcagttccatcacggctcactgcaacttcaaattcccaggcttcaaatgatcctttcacttcagcctgcgaagtacctgagaccacaggcacacacgaccatgcccagtgaatttttaaaattatttgtataagcagggtctccccatgttgcccaggctggtctgaaactcccgggctcaagccatcttcccacctcagcctcccaaagtgctgggattacaggcatgaacctctgggcctggtcctatttaattttgattaatttcaatttaagtagtgtaatggatgctatgtaattgtactgcacagacttagagcccccaggcttgactgacccagtgaatgtggaggggtccctggctccccctggtcagggcccttctaggtgaaggtgtcagagtacccagccagagcctggtacacagtcggtgctcaacacagagcggctcaggggcttatgggcgcccaggcctcatttccattaagtgacagatttagacgggggactggaagggaaaaaggaaggcgtgtgtctgagttgccaccacagagtcactttctcccatcctctgaggcaaatgtgggaaaggactagccctcagcgaggtcaggacagcccctcggtgactaaagctcgcaggaatccacacccagctggatcagctgcatttgttgcccacagaaaaccttcccggaagggcccagcttccagcgagctgggaagacgtgtcagggagattaaggcgcctctggtatgtctctggaaagcagccaacataccccgagctgtcgtcacgacagacccagatgggagctcacccggccagacctaaactcattttgacacatggtggaaggtgtaaggccccagccccgatggccactgcagcccaccgatgcactgctagccctgggaggccctgctgtcacgcctccggcctaaatcagactgtcgtctcccctctcccttgaccagcacccccttccctggcttattgaggcctctgcctaaaccacgtctcctctgggaagccttcctatccccgccttcccaggctgggttggccctgcctgtagccctggcgaatcattaatcattaatcattagcaaataagtcaacccctgctgctctccccacagcataacccaagcagagggcccggtgaagaacagctcaactgcacacctgcttctgcagggtgaggcagctgcacctgtgacttggcgttcattttcgccaacaccatgtctcttctttgccatagcatctcagtctgtccagctcaagcctccccagaagcatctctgaggccgcctgctgcccattatacaacaccttgctcctcaggctatccctagcaccccgctgcccctgccaatataccctccaactttgaggattctccattgaggtgatttcaaatgacatggtaacaaacagagatttgattttattttcatagattcttatttccttgtcagagccacttaaaagggagctaggtgaatccccagctggtgactgtgaagggcctgagttagagtgagaaaaagagaaggtattgtatctagggtaatcagggaaggcttcgaagaagagggggatttaacctgtaactttcgtgacaaggaaggacattctaggccaaggaaatagcacaggcaaaggtgcagaagcctgagacaggatgcagcgttccaggaccctgcagtggtttggtgtcataggagctggaggggtgacggaaggagtaggaggtaatgctgaaagggtgaggaaaagggtgaaagtgccttgcaggggagcatagactcgatgctgcagaccggggtttcccaggcgtgttctccaaacaccaggcccagggagttctctgctccagaggaggggtgggattctctattctccacttggtgacttcctccgacacagccgctactgtaaagactttcatagtaactacctggggctatctgcaaggcactgggccacgctctaaccatggcgcatgcagcactgtatgacccacatcaaaaccctatgatctaggtactgttgcattatccccattttacagggaagttaagaaatgttcccaaggtcacacagctggttgaaggtagagctgaggttttaactctagcagtctgactttgagctgtctcagaggaaataacgtgcttaactttttgtttcgtccagcatttcccaaacttccttttgatgtaattatggaaaaattgtcttgcacatctagtgacattgtaaaaggcagttgattctttgtcaatggtgaactattatagggttctgacccaggagacttgatttgatttgcaaatattcttagtaaactcattatcagtcacttacactttagtgtgaattagtccgttcttggggtctctccactttcttataagcttcctgaaggcagggcaggtactgtctgattcactgttgtgtttctagtacccagggggtgtggcacactaaatggtgctataagaacatttgctagagtgagttgaaattctcctgttgaagaccgtaggaacagtggaaagaatggctgtagtctggtaggcaggtagtggtaggctcagcctgtgggagagaggagtcagtggtggctatagggcacgtcctgggaatgggagtcatggagctgtggtagaaagcaagactcacctatatcatggcacagctaaaggccaggtctgggctgggtgtggtggctcatgcctgcagtcccaacacgttaggaggccaagatgggaggattgtttgagcccaggagttgatcaaaacccaaatccaaatacctacttagcatattttctcttctgggaagtaactaaccacctgattatttggaaaatgaggcatttgttggagttgaaggtgtagcaagaaacttttggttttaagagtcaaagtcagaggaaaaaaaactctcagacttgtattcacccccaccccccaccccaagctactgcaaagagcaggggctttggaagattggtttgttgaaatgaagttcctttgacaaaggtacctgggcccatttctctcattctaaaaaggacaagactgatacccagagacggcaaggtcacagagctgattaaattgggatcagaatcttctcagtcaggagctctgtccatggcttcagagcctgtgccccagtcccctctccccacctctcccctatgccccacttggcccgtcctcttcatcctctgcccctgtctcctatgtcaggaggaggaagcccctgtgtgcaccccaccctttacctcccaccctcactgcagactgcacttcccattccctgctgcctgctgcctgactgctcctaatgagattacagatctctggtgaaatagacgagggttaattcccccaggctttacagggcagggcaggccaggccacaagaaatagcaaaaagacacctattctccaaagcactaagtgtgataatgaccctaagagtccgttcccctgttcagcacaccagggttcacactgcgtttccaaataccctctgggtggaattttgtaccagccctaacaaagtagatgctgttatcatctctattttacagatggagaaactgaggcacagtgagatgaaatgcttgtctgaggtcacacagctagtaagtggcagagctgggacccgaatgtgggtctcttgggctctgtcatctttaaaaaataataggcccagagagcctgcagggtgcccagcaccaggcttgaaacagccctgaagcatctacgtcccatttcccggtgagtggcacagcccacctttgaactcaggtcccctggactcgaatctacattccccacaatactgccaagcacccttgaacctatctgcctgttcatgtggtggaaacagactggcctagccctgacttctgacctctgtgaccatggccaagggactggcttctggggtctcagcctccctttctgaaaaatgaaggtgggaaccctgggatctttgggacaattccctatgattggcatagctaaggcagccagcacaggcctggcccgcagcacatgcacccacccacctcagtttctttatctgtaaaatggtgatattaatagtacttatttcttgggattggtgttaggattaaatatgccagtacatgtaacactcttctagaatggcacctggtgcatagtaaatgcttaattaatgttgagggaaactgatatcttactgtcttgtttttgattctttctggaaggaagcaggggtaaagatcaaaccaaccaagcaaatgttcctcttgttccttccagtacctggtccactcaactgtttaagaggaacgcttggctttgaggcctgaactcctagaccacgtggtctgctctaatttcccaggccctaatctgctcccagctcctaatgatgcagctggtaataggattgtggcttccctctaaggcggccacacgggcatggccgtggggctggcgactggtgtttagcaactccgaccacctgcctgctgaggggctagagccctcagcccagaccctgtgcccccggccgggctctcatgcgtggaatggtgctgtgccccttgccagcaggccaggctcaccatggtgccgcatgccatcttggcacgggggagggacgtgtgcaggcggaatggactcctcatcctgtctgtgctgtctgtcatcgtgggctgcctcctcggcttcttcttgaggacccggcgcctctcaccacaggtcagccacccagagcatctcgggacccctgtccaggaggggcgtgtgggcctgagggatctggggtcccgttctagcatcacagctccctggtgccatgacagtgtgtgaatccctctgcctctctgggtcctggttttctcatctgtaacatgggtgtgataaacactttgcaggactagagggaagaaccagtgatgtggctggggagtgattacaaacccagcaccatcaggtgaggagaggcgagggtgcctcatgatgacaaacacagggccaagagctgtggcggggaaagaggggggtcttgtgtgagttcaaacaggcaccagagaacacctcctaaaggctgctcaaatgacaagagatccaggaagcgtgctctaggcagaggtgacagcagatgccaggtgcagcggccggagcgcagaggccagcaggcccataggtcccatcgccacacgtgggcttgcggcaaccatgagatgcttttgggcagaagagcgacaggccagtttggagcttgggagacccctcaggtgctgagtggagagggggtgattctggggcaggcagggggccgagaaggggcagcctgggggagatgcggcagtgcagacaaaagggacagacgtgagaactgttttcaaaagggggagcttcaggatgtgggggccgattggatgtgggctgggggacaggaaggggagccaggccccgggtttccagcctgtgta

SEQ ID NO: 3981 - DNA, 6000 bp, Homo sapiens
gacccatgcaactaagctgctccccaattcctggcccacagacactgggagagataatacatgtttatttctgtttgaagctgctaagttttgggtaatttgttttgcagcaataggtaattgatagcattaggaaacattagctaatgctaacaatgttttgcagatgagggaattgaggcataaaagtaacttgccccaggtcacacaggtaacaagtcgtttaaaccatggcagtttggatctatgtaaagttcagtaataaattagaatctctcttttacaggaatcaggacactttgcctgctcagagggagagagggaaagagacagagacacaaacacagagagacagtgacatggagaagtgcgccgtgggctcacagtaccatgtgaaggactggggctgcccttctgtaaagtgaaggcagtggagaagtgaagtgaagtgtaagtgaagaggaaagtgaaggatggtagagagcacccttgcccttgcagcctggctgtgtttggcttggggctgctggtctccgaccctggctgggctggtgacacagcctaaggtacctgggggtggaatctggcacccctgagcagacccctccctggctcttgtccccctgtgctgacactctctgtcccaggctctctctgcctccagaccagagctcctccagggaaaaggtggagtcttgttcgtctgtgtccctcacctagcataaggcctgccagagcaggctgggcgaggtgaacacagaaggtcctctggccctggtactggagaggcatcatcactggggacagagtgagaaccaggatgatgctgtttgttactggaggagctcccattggatggaggagccaacaacgacaggccagtgtgatcagggagattgggacacacagtgccgtgggggcccagaggagcagggaggatctctgtggaggaggcgagaagtcttcccagaggaggaggcatttgaggtgaggcccaaacggtaaacagaagccaacccatgcgggagtgttctaggcagagggcatggcctagcagaggtcacagcctggcaaagttctgaagctccagttcctggggggcagtgtgaaagagtaggctgctggggctcccatggctctggagaccaacatgggacttgggagtggcagggtgccatattgacagcaggtgaaatatcacctacatctgtctcatggggaattcattacattttgggttgggtttgggagttttctttggaaactcagggtaggcagggtctgtaagcttgagtcagcccaggatggagaggcagggtaggggagaaccaaagtcacctgggtggccgaagctttaccaggacctcagtgtccatttggtgtcttgtgtgtttcaaggactgagctttctccctttgcccctcacagaaattaaccagtttatgtgccctgaaaaattcccacttccaccctctgggttcgcatgctggctcagtcacttactagctgtgtgacctctctgctgcttagcttactcatctgtaaaatgggataaacacaaaacctgcctgatggagatgtcgtaaggatcaaagaggaaaaagaatttaaaacatttagaatggtgcctgacccccagcaagtatacaataaatattggctattgttgttattttatgtggttttcttttaactttttcaagtaaatataacttacctcatgcttgttatgtgtcaggccttgtatttatcctctgaagacaaagatgaggaagacatagtcctcctaggggtacaaatccttcaataaaggcagaaacaagcattggtcaaatgtgccctgtgccaagaatccaggaatgcaggagagcgggctcctgtcctccagcagctcacagagtgacgagggagacagttgcataagcagactgtggcaacacagggtggtcagggctgcggcaaagggaagcccagggactgcaggagcccggggaagtggcccaaagtgggtggaggctgagaggagccagaaggacctctgctgaggggactgttgagagacaaggatttgcccactttggcaactggcatccttctcccttggggaggtcgggggatgcctgggctcagtcttgattctgggtattggaaagccatcagggttttgtgaacagggaattatgtttgaataatagtaacaataactaacatttctcatgcagctactatatactgtatgctgtgcgtacacaatctcatctcatatcctcaccacaatgctgtgaggtgagtactatcacctttctcatttttcacatttagagccacagagattgagttgcccaagttcacataactagaaagggaaggaacagactcagacccaggcagtctcacccacaggcccatgctctccatttctctcttttttccttccttccttccttccttccttccttcctttctttctttttctttctttctttttttttttttgagacagagtctggtcctgtggcccaggctggagtgcagtggcgcgatctcggctcactgcaacctccgcctcccgggttcacgccattctcttgcctcagcttcctgagtagctgggactacaggtgcccgacaccatgcccggctaattttttgtattttagtagagacagggtttcaccgtgttagccaggatggtctcaatctcctgacctcatgatccgcccgcctcggcctcccaaagtgctgggattacaggtgcgagccaccacgcccggcctcttttcctttcttttcttttcttcatctgctgcctctagacttcggcccacatactaatcttacagttggaatgaacctcagaaattccttatctcttccatttcccagataagaaagtgagactgggagataggattgactttcctaagaccacagagtggaggaggaggagggactgagttggataggtcagtttgggcagcaagacgggcttctatctttatcccacagtcccaggcaccattgtgcttgacacagaatccaaactcccagctgtggcctacaaagccctggtgatcagggccttgccaactccctccagcctcacctgaggcacccactccttccctgtcatcaggccccggcccaccttgattgccattccctttgccaagaatgcccttccgcctgatcttcatgggtcaggatccatcttgccattcagtgaaatgtcacctcctctgtgaggccttgcctgatcacctctacagttacccccattgctctcacctgggtctgttttgttttttccatagaagttatgatgacctgaaataatcttttgttttcctgcttttgtgtgtatctcttccaactaagacataactgcaggagagcagggaggaaccttatctgtttccactgtatccttgagccttgaagggcgtttggcacatataggtgaaaggacgcctgcatttcgttgtctgtgtgctaatggtctgtctccccacaggtcagggacctctccggggctggcaccatgcctgattcaccttggtacccgcaggcccagcacagggttggcacagaacagggcctgaaatgcttgctgaatgactgaatgaacaagggacaggaggggtgatgatggcaggagcaccgtgccgggctctctggggatctaagtccctttctggtggggtggccacagatattgccgctgggctgccctttgggggactacggctcaggaggctgctgaggagacagggtggtttccaggccaagggctaacagcacctgcccatccgcgagggaggtgaaggggcaagaggggagggagggtggacctaacactggctcttggcacctgcaggccggttgttttgagtggccaatgccctggaatctcattctctaaagaaggttgtgtgggttggacccggctcacaagtctgaggctgaaatcgaatcccagctcgctctccgcacccattctccccagtgtgggtgaggcgggctgcagccctccagaggaagaggtgccttctccttcctgcagaagacagcaggggcggacagcgcgggcctaggtgcgcggcccctagcggcagggatggcatcccttccgtgccctccccttcccccccgcccggcccgccccacagacctcgtctttctccatcacagcgaggattccttgtcttccctgcgggccccccctggttgcccctctgactaggggcctggagcgtacttaacgacgatgaatagtctgtgcaccaggcccaatccacctgcctcacgtccccatgatcacatgagcgtgcaacatgcacagatgcacatggcacggaaaccaaaccagccacagggatttataatatcccagccggagcccatgacaggtgcaggggtccagccctgcgcccccagcttctccctgctcatccacatcttgggatctcacccctatccctccctcccccgccccacgcgcacactgcacaggcctgttcgtcctgtaacatcatttcccctcccgcccaggctcactcctagacatccctcagcctctgatccgcctgtcacctcctccaggaagcctctgctgcttcctctggacctgctacctccgtggtgaggggctcgcctggcccatccctgcgtctgcagagcccagcactcaggcgagcccagagcagggccgtggagcgcccgctgagagaagagtggacgaaagacaggagggaggagggcgaggaggcggcggcagggggagcgtggggcggaggcggcagcgggagggagcgcgcgcgctggcggcggccgcccagggccggggccgcgcgcccagcctgagcccgccccgccgccgagcgtcaccgaacctgcttgaaatgcagccgaggagccggggcgggcggcagcggcggcggcggcggcggcgggggcagcggcaaccccggcgccgcggcaaggactcggagggctgagacgcggcggcggcggcgcggggagcgcggggcgcggcggccggagccccgggcccgccatgggcctccccgagccgggccctctccggcttctggcgctgctgctgctgctgctgctgctgctgctgctgcagctccagcatcttgcggcggcagcggctgatccgctgctcggcggccaaggtgcgtgcagccggtctctgactcggctctgctccgccctagccaccaacaaagcgcggccgggaggccggagcggggaggggtccagaacccggggctatcgggggctcccgggcggacaggctccacgcgaagcggctattcctgaatttgccctcggccccccgcccccgcgggcctcggtgttgagggctctgccctctgggcagcggatcttgggggaggggtgcaggggggcttggccagcggggaactttgccggaggggcggccattcatggttccggatgagctgtgtgattctcgccgttggggtttatttgacacgcgcgctccgcggcggtaatgagcagagccgggcggcttctccgcttgacaatgcgtttccgcagacccctgcgcgcggcggagagagagggggctgcctgccagggtgatgtgcctgcggctcccactgcgcctggcgcgcgggcgcggggactccctatgggctgtatctgagcagatctctgactatgggtcgcgtgtgcgggtgagtgcgtctgaatggagggtatacccaggtcgtgtgacactttaagtaggtgcctggtctcgccgtgccaccgagcggcccgacatccacggaacccctgccatcgtgccctccctttggatggagtgtgcctgaagcccccggggtctccataatcgccccctttcctcctccccagcgggtccttccgggtggcccggactgcatggtggggagtggggccgagtccgctgatccagctcacgctccctccccctcgcagggccggccaaggattgcgaaaagg

SEQ ID NO: 3982 - DNA, 6000 bp, Homo sapiens
tattattaatccccattttatagattaagatggacacagagaggctaaataacttgaccaaggtcacgaaggtagtaagtagcagagctgggattttagtaaggcagtctggctccagagtctatgttcttaattattgcattatattgcctccaagacaagatagtaagggaattccaggcaaacaggacagtatatgcaaaggcacagaggaaggaaagagcacaacatctttggggaattgtgaatggttgacattggatgaggcataaataaaaagactagcaggggatgaggcaggcaggcgccaggtcatggaaggccttgggtgtcatgtaaaaaactgtgatctttattgatgggtaatgagaaattattgaaggattaggcaggaaagtgacctgagtagattttcttttctatttgagacatatttctctggtgtaagagtggaagggaggtgaatgcgggatgtcaaaggcagggagacaagtcaacagaccatagcactgctctagatgagaagtatgattctgaacttaaagtggaagacaatcaagtgagtatgggcaagaaggatttttaggaagtaaaactaaaaattggggccaggcgtagtggctcatgcctgtaatcccagcacttcaggaggccaaggagggcagatagcttgagcccagaagttcaagaccagactggacaacatgatgaaatcctgtctctacaaaaaaaaaaaaaaaaaaaaaaaattagccaggtgtggtggcatgtgcctatagtcccagctatgatgtgatcatagtcccatgatcacatcactgcattccagcctgggtgacagagcgagaccctaaaaaaaaaaaaaaaacaaagaaaaaagaaaattggatatgagaaaaaagagttaaggatggttcctagatttctagtcccagttacttggtatacggatatacattaatacaggagaacaaggaagaggtttggaagaaaagctaatgcatttaaggggaatgttattaaatatgccttttgttttattctttttttttttttaaatggtgtctcactttgtcacccaggttgcagtgcagtggtaccatcctggctcactgcaacctccagctcccaggttcaagcaatcctcccagctcagcctcccaagtagctgtgactacaggcgctccccaccatacccagctaacttttgtattttttgtagagatggggttttgccaagctgcccaggctgatctcggactcctgggctcaggtgatccatctgccttggcctcccaatgtgctaggattacaggcatgagccactgagtccagcctgttgttttattcttattccataattttcacatcatttattttcatcatcacacatagtgattttcaactagggcacgagcaggaacccagaggggagagcggtaggaggaggtatattagaatatgggtgtttgggccaggtgccgtggctcacgcctgtaatcccagcactttgggaggccgaggtgggcagatcatgaggtcaggagttcgagaccagcctggccaacatagtgaaaccccatctctactaaaaatacaaaaaattagccaggcgtggtggcgggcacctgtaatccccaccactcgggaggctgaggcaggagactcgcatgaaccagggaggcagaggttgcagggaggcagaggttgcagtgagccaagatcccaccattgccctccagccggggcgacagtgcaaaactccgtctcaaaaaaaaagaaaagaaaagaaaagaaaagaatatgggtgtttgtaggtgtaggtgagtgtatatgtagttcaactattccttcccacctttttcctggagagagtctgacatgatccctcattgagaatcattgctatgtacaattatccatgaatattctgacaaggtagagacagttgaaaaccttgaatgtgttctatgcagtcacagaactgcaagactaggacagactttaaagatcatctagagtttggtagggctcaatcaagtgctgtctggaaaaatgagaaggcattttcagttatcagaatgggaggtgccattggcattaagtgcctgagagccagggatgctaagtatcctgtaaaccaccagcagctccaaataatgaagaattatcttgccccatacaacaatagcaccccttgaagaaacactgatatagttcaatctccacgttttatagatgaggaaactgaggtcttagagaagggactgacttgctactaaagatcacccagttaccagtaaggcctgtttatactctccttcactgctttccaatatgggtctcctaagcctgtgggacatccagaaaaggagtccaattgagtatatgtcaagtactcagaatgctgccttgctcttacaatcctttgcacattttctctagccccagatcctcctcccaccttctgaaacctaggctggaggtgcaggtttggcagttttagcacagaaagcctaaagaatggataatgtcatcctggccaaatacataaaatgtgacagaactctgaggagaacaaacattaggaacctagtggaggaagaagaattggtaaaagaaaatgaaaaagtcagaaatttaagaggcaaggttcaggatgacaaaggggactaagtacaagttgttttgttttgttttagtaaaataattactttagcatttattgggtaactatgttgattgatacattgtatctactctttgcatcttgcttgcagacatcagactgacttcaatgtagcaagagctcattaaaacagcctctttccagctgggcacagtggctcatgcctgtaatctcagcactttgggagacaagaggcgggtggatcattttgaggtcaggagttcaagaccagcctggccaacatggtgaaaccccatctctactaaaaacaaaaaatagccaggcatctgtaatcccagctacttgggaggctgaggcaggaggatcatatgaagccgggaggtggaggttgcagtgagtcaagatcgtgccactgtactgcagtctgggtgacagagtgagaccctgtctgaaaaacaaaaacaacaacaacgacaacaaaaaaacagcctctttcccagtctcagctgaagctgtaaagctgtttgatacagttctgggcagtgtgacagatgtgagagaacagcatcaaagcccaccccttaataagtttgtacagggtaggtatatagaatcatatttggtactttaacattcctaacagactacattttgcaaaagaataacaacgaaggggacttgtcctacgagctagcacacatggtgtaaaccggagtaattacaagggtgtagcaggggtgtgcagaaatttataaatgtaagtctgtacagctatgggcgaaacaaaggaggagtggtcaggtacactttgaggaggaggcataacaagaaataattcataggtctttccacaacagaacctctagcaccaccttgctatcagtcctttgcacatttcctctagccccagatcccctctcaccttcagagattcaatcgtggcctgcttgtaaacctttcctccagaatctttcttctgagggctattctggattctaggcgttcgaatgacgaatttatccattgttaggggactccgactaccttgacgtgcttgcagcgtgttctggtcaagaaagagggcagattctaaaaccccactaaagactgccatgatattttttccccaaagtaacacaattgagttctctggaagaattcatgaattatggggcctcgagtggaattgacaggaagtaagattttctctttaaaagaaagatcttccgaagaattgaaactgtaatcaatcatcagtctacgtcctgagttaggaggttcctagcttccagaagtgcacgctctagcgaggattccaacattgggggaattggcccaatattggaatccccgctagagcgtgcacctaagccctcttccaaataagattgggctgtgaaagggttaggattacattaggctcagtgacgccctcttaacaaccacctcaccacagccataatcccaagggttgccctggtaatcagcaaccgacaaccacctccagaactcagcagagggtctcacaatacgcagcatcccctagaacaaactgctcggtggtcagaggaccctacccacggctgtaatctctggatccccgaacaaggagaaaccccatcctcctcgttcccagcactcaggagcccgggtaggggcacccaacaacggtctgacgtgagacccaccaggaaaagcagccctggtagctgctgttggcgccctccagactgcaacctcgtaggctcccaagcccagtcgtctgtgttgaaactaaacagacgcttcctcccagggcggtagttcctctgaagaaactccgccggccctcgcgcctctgggccacagcgaaccacattccccagaatgcactgcgaagaaatgcgggcggaaggcgcgctgagggcggctgtagttttccgagaccaactttcccgacagcaccgtgcgcctcccgcctacggagaactacatgccccagcctgccccgcgaagggaagaagtcaggaggccccgcttcgcgctaacgcttgcgatggttgaattcccctcctcacgccagcctaggagaagaagttcgtagtcccagaggtgaggcaggaggcggcagtttctggcgggtgagggcggagctgaagtgacagcggaggcggaagcaacggtcggtggggcggagaagggggctggccccaggaggaggaggaaacccttccgagaaaacagcaacaagctgagctgctgtgacagaggggaacaagatggcggcgccgaaggggagcctctgggtgaggacccaactggggctcccgccgctgctgctgctgaccatggccttggccggaggttcggggaccgcttcggctgaagcatttgactcggtcttgggtgatacggcgtcttgccaccgggcctgtcagttgacctaccccttgcacacctaccctaaggtagggcccgtccggagcgggctgcgacccttcccttgcagcccatttctcggctccccacacgtatgtcggctctggcaacctggctgttaaatcggcccttcaatcgctgtctcccatctgtgtagctcctgttttcctccctaatcctgcctgcaccccatttctgctgtcattaccggaagtttgtcctgcactaccctgtgataggctgggggacacaaagatgagaaagacgcgatccctttcctctgggagcttgccgggctgcaggggagtcgagcactcggaggaggataggggaggatatggatgattaatgcggggtcctcacctaagggagcgtaaggggggattgtagaaagggaggcgcagatacgcgagtccacaaatgattgattgataacccttgtttactaagcgcctctcggggccaggagcgcagtcttcggggagtcagacaagtagacgattccactgtggtataaaaagcgtcacgaaggcagctcagggagtagcgagacgctcaggaatgctgtctgcctatgttgagttactgtgtccaagacgctgccaagagggactgggttagagaagaggcaattaggtgtctgcctaccagaaactgaccactcagtgcagaaaacggggaattcgtggagtgggtgaagaaatgagactgtggacaggagggggttcgcagcttacagagaggaatggccctcctctctatgcttcccccctttcttttaattacatacctaaccctcttcacgttggtttttcagcctaagaactctgtttactcaacattctaaattgcttgatgattcccaccacacctttcccatgtatgatttgagtatatgccctcccccacgttgttttatgagagcttttgtt

SEQ ID NO: 3983 - DNA, 6000 bp, Homo sapiens; identical to SEQ ID NO: 1519

SEQ ID NO: 3984 - DNA, 6000 bp, Homo sapiens
tcagttttctcatctgtaaaatgggactaatgatagcaactccacctacttcagtgagttgtaaagataaaaataagataatagatgtgaaagtgcttttaaaatgaaagtactttcacttgtactctcacaagattattagcttaagcaaatggcttttcttagatttcacaaacaatcctgaagaaaacaacatataagtaaatcgttcaagaaaataagtattttgaattaatactttctgaaacctcaagaaattgcatattttaaaaagacaggagttgagaggctgaagatgttattttattcagggaaggatgactacaattaaatggttatattcaaggtggtacttgataaatgctttttaaatagctgtatttaaatgaggtattttgtagaaataaagtgttcattgaaaatattaacattcaacttgccagacgcagtggttcacgcctataatcccagcactttgggaggccaaggtgggcggaccatttgaggacaggagttcaagactagcctggccaacatggtgaaaccccgtctgtactaaaaatacaaaaattagccaggcttggtggccatgcctgtaatcccagctgtggcacgagaatcgcttgaactcaggagggctgcagtgagctgagatcgcgccactgcactccagcccgggtggcagagcaagactctatctcaaagaaaaaacaaaattaacattcaactaatatttattgattgcctattgtgtaccaagcattttcaaatgtattatttcattttatacttttaaaccctcctcacaactacagaaaatgtcagccccatttaaaagttgaggaaactgaggttcagggaggttattcagcttgcctcaggtcaaacagcagaaacccttctgctaatcccctgccccttcctgccttttctcaggagtattacggtagatgtttccattcagtcctctggaagcactcgtgatatcaaatccaacacttatagcagcaagctagcaatttttgtttagtaaaaaccagaggtggaatatgaatataacagtttggaagaatctggataaacagactcttcttagtcaaaatgtctatgtcttcttaagttaacttcaatggcttaagaaacttaggctcttactttttgaccatacaattttatataaaagggactcagctactttcctcttcaatatttctagagccaattcataccttttcaaaactaaaaataattaattattaaatattgggagtcaaaaagagagagaaagaaaattatgaggtaacgagagatcttagaaatgaaggccatttaaatgttgggaggtatcagttatgtaagaatgatgtgctgttgttgtcacacacaataagtcaatcttaaaaaggcatttatccctgctgatattatagtttttatacagaccaatttaatgaactggatgtcattttgatgtgtgaattttggtaagtttgtttgccagaaattctaattacttaattaccttgaaatgacaccattctaaattatcaagtctgttttattgcaatttatttgctggtaagattattcaactttagggtttaaggcaaagaggccttcaagtttatatgtctggttagctgctttatttcccattatctaaagaaatatgttgacactatattttattacttgttcaaatcagttttataataacaagtatttgtagcggtcctttgaagagttacccaaatataatacctgtttgcatagaactacatacatcaattaacactatgatcttttagttatggaaaaatagcccacagagccttataaatggaaatataaaagtcttatttaaacatccatttattatcccttttatctgcttttggaataacaggctttttgagacagagtctccctctgttgctcagactggagtgcagtggcatgatctgggctcactgcaacatccacctgcccagttcaagcaattctcgtgtctcagcctcagggagtagctgggactatgggtctgtaccaccacaccagtatttttagtagagatggggtttcaccatgttggccaggctgatcttggagtcctggcctcaagccatctgcctgtcttggcctcccaaagagctacgattataggcgtgagccactgcgcccagccagtctgacttttaaaaatatgtgtattcttaaattaataaaagtcatttcacagataaggaaaagcagacaggaaacatacagggaggtacctataaaattcatgtagttactatttctttctttgacttaggatttcaccattattgattgtggtattaaggtcaaggctctcgcctcatggagctaacaatgtttgagggacaaattatgaccacttgcaagtaagacaagccactatattccactgcacatgaccctgtcttattatttcactttgcaagtaatttcatgatttgcaaagtgaagtaatcagatagggccgtgtccagtggaataagaccttgagtatctactcaaggtcttttagagctccaaggagggaaagatcagagaggcctgcagtttcaagaaagcttgcttttagattggaattccaaaagcatggtttggtgactaagaatttcaaagatgactataattacaaagacaattgagtaggcaaagaccctggaatcctgaattcctcttagaatgtcagtaattatgaacctggccttgttttgtttccactcttttaacttttcaagagaaggtgtttctcaagaaaaagctatctcaagcatctgccttctgaactaccctggcttttacctgtgctatttgaattgagagtgctgtgtgtgatttgcagttggatgcttcagctccaaaacttcttgggagagtcagatcttcttgcttccagaagatagcaatgttgtctttctttgcaagccccacttactaaccggtgctaacttgagcttaattcagtacacagcaaatcccgtgctaggtactagagagatgccgcggcgctgataacctacacagtttgctagtctttaccatctgtaacaccaaatcaggctgacataggctcatgcctgtaatcctagcactttgggaggccgaggcaggcgatcatgacgtcaggaatttgagaccagcctgaccaacatggtgaagccccatctctactaaaaatacaaaaatagccgtgtgtggtggcacgagcctgtaatctcagctactcaggaggctgaggcaagagaatcctttgaatccgggaggcggagattgcagtgagccaagattgaggcactgcactccagcctgggcgatagagtgagacgccatctcgggggaaaaaaaaatagttagaagcaaagagttgacagtgaagttaattctgtgcaggaatgaagaaagtactcagagaggaggtgacatttcagaggatactaaagcaagagaagcatttccctaactagaggaggaaagggtatgcattataggcagagcgtgcaggagagcaggggtgtggagtgtgaaaggattgtaccagaaagggcaattgtaccagaaagggttgatggtggctgcatataaagttatcaaaacccaaaacaagtcagtgtaagaaagaacatgattcatataatgtatcaaaaagctacaaatatttccatttctgaatgcacacaaagaaccacctggaaaaaacatccatttattgtccactgtgcccaggtccatgctaggcactatagaagatacaagggaaggcccttgccctggaaatgtttattctctatctggaaaaaagattaactcacataaaataattaaaaataagatgccagcctctaaggaaaaatgttagattgtctgaaactcaagcagagagcattttggctgccctggaattccccatagtagtagaattactcttggggccaagagaggggttgcctgagactccttcacccagaaaaaaggtaattgctaaccctcacagagcacttcctatgtactgggcactgttctaggagcttatacggattaacaaattaagtcttcacaaccaccctatatgaaaaggaacagttatctctagttacatacggggaaactgaggcacagagtcacaggattgaaatccaggagatgtggttccacagtcgtgcagtctttttcattttagtattctcaaaatctagcgtagtacccggtgttggatgttaagatcttaaacaaacaaacaacttgttttccttaaaaattatattttcagggtaatacaattcaagtcacaataaagacctgaaagcctcaggtttgtaggtgaggaaaaatgcattttagctgtacagccctaacttttacttgacccaaggccagcaagaaaatgtttctttttatttatatatattttttctttggtgacaatttggtgtttctgaacgctaggggctcccggtttctctggtttgagagtaacttttccttttaggacttttttttttttttttgaagggggtgggggaaaatgtggccttaattatcctacgtcttaggcagcttaaggaaggggctgtgctttcggaatcccatccgagccaagtaaggaggtccctctctctctctccccccacgtcttctctttttaaaggacctcgtgaaataaaagtgcagaaaacaaacccaggcgatcacagcagcagccgccgcggcagcagcaccaacagcaggaggagcaggaggagccggaggaggaggaggaggaggaggcaaagttagagttggggctggcgctccggagttgctgggctcagcgcagctcccattcattaaggaaccagctgcggaggaaggtggccgagcgcccgcgctgcccactcgctcgctcgcgcactcagacgcgcgccacaacagcgcgccccaagctgcgcagctctgcaaaagtttctgctcgggatctggctctcttccccttggactttagaacgatttagggttgacagaggaaagcagaggcgcgcaggaggagcagaaaacaccaccttctgcagttggaggcaggcagccccggctgcactctagccgccgcgcccggagccggggccgacccgccactatccgcagcagcctcggccaggaggcgacccgggcgcctgggtgtgtggctgctgttgcgggacgtcttcgcggggcgggaggctcgcgccgcagccagcgccatgcaaaactacaagtacgacaaagcgatcgtcccggagagcaagaacggcggcagcccggcgctcaacaacaacccgaggaggagcggcagcaagcgggtgctgctcatctgcctcgacctcttctgcctcttcatgggtgagcccagccccgctgtccctcggcccctcggcccctcgtccctcggcgcgcgtcccagcccagtccggggccgcgcagcgccgcgccgcgccgcgccgtcagctccggggggcccccgcagccttcctggggagcctttgcgccgcccaggcccgaagcccccgccctccccgatcccaccgacttcttggcctgtacttgagtgggtctgggcgtgcttaagcgttcgtgggcaactgttaaaccagctcagtaaaagtcgtctccacgttggaagcccgggcggaatcccgcggaaggtgtgggttcgtccttttagcgtaggggaagttggttgagccgcgctctagagccagcgtatagctagctggtcgccctccatccgagtgaaatggatcgccccgagagtcgggctcctgcctggagccgagctgccttcccggcggctgtatgtaaacatccagcccttccgcctttgctgcccaggctcgccagactggctagccggccttttcacttgctcctctcctgtaggtgctttccccgggcttggtgctgggcacggcttcagcaatcacttgagtgcctactgtgtgccaggtggtaggc

SEQ ID NO: 3985 - DNA, 6000 bp, Homo sapiens
agttcacttttttggataaacaggttttcaacagtttttaatgctgaaaatataacttcttagttgtaatcacaagtaatgattgattaatgggttattggtttattcagaaatgtgggtggcataaggaccaataaagggaataatctgataatttctctctgttattctgcccactagtaatactaagacaatatgttatatatgttctactcagtttcacttgtatttttccatgtgtgtgctttaatttaaaaaaaatgtacacaatgtcaaactttttttcttcttccttttttaaatatcaactcaatgatttgggggactggttaatacaatgctgagaacttggttgggctcccagaggaaaaactaatgataatatggggtccctctaagactaggctccccagaatttctaaactctgaatcttattcacactgagcatctagcaatttgtcaattacagcttaaatataaaatttcaattttgaatttaaagtttaaattttcctactgtggtactggtggtttctgctccctaggctctgatccattaacctgtgattgtttgcatttacccggattgtgtgtctctaattttaggagtaaaagtttgccctgttatcttacttttcttatcaatctaagaagagttgttaactttctgtttgttcagcttttttcttgttgcgaagacaggagtgatgacttccaagctccattcacactggactggaaaccagacatatttacaaatactttgtatagcagttaaaaggagaaaggagaagaaatacgcatttatgccatcttttatgattgcataatgaactttgcaatttgtgtttccacgtagtgtctaattactgcctagggtcattttctttcaatctaaggacattcttaagtatttgttaaagtctgctagcaataaattctctcatttgttgtatttttttaatctggagatagctgttttttccttcatttaaaaaaaaataaaccatctgcttcatataagattcttggctgacacttttttttagggagaaaacattcacaaatcatatatttgataagattaatatacagaatacataaataactcccataattaaacagtaaaaaattaaacagcccaattaaaaattggcaaagaacctgaatacacatttttccaaagaagatatataaatgaacaaccagaacatgaaaatatacttagcatcactaattattagggaaattaagatcaaaatcacaataagatgctactttacacatattaggatgaatagtataacagaagataacaaatacagatgaagtggtggagatattgaaaatcttgggcacagcttctaggaatgcaaaatggtgtaatcactatgaaaaacagcatggtagttcctacaaatattaagaaatagaactaccatatgatccagcaactctgtctctgggaacacacccaaaagaattgaaagcagaatctcagagatatttacacaccctcatttgtagcagcagtattcacaaaaaccaacaggtggacacaactcaagtgggttaacagttttctgagtttttttcttttcttttagcacttagaatatatcatcctactgccttttggtctccgttttctctaattacaagtcggccgttaatctttttggagttccaacttactgaatgaactatttctctcatgctgcttgcaggatttcctctttgtctttgtctttcagtatttttactatgatgtatttgagtgtggattcctttgcatttatcctacttggagctcactgaaatttttggatacatggattaatgcttttcgtgaaattttggaaattttacagctattatttcttcaaatatgtttctgctcttttctcgccattgtattctatggtattctgattacatatatgctggtgtgtttagtgatgtcccacatttctctgagattgtttgttctttttttctgtctctgttttctatgttgcataatctatatcaagctatcttacagttcactgattctttcctcttctactttacatctactgttgatcccctatagtgatttttaaaatttcagttattgcaattttcaattcaaaattccacttttttataatttctatctcattattgatatcctctatctgttgagacattgtctcataccttactttactttcttcaccatgattttgtttagttctttggacatatttataattaagttgctttacagtctttgctacgtttgacatctggctctctcacaggcagtttcagttgcctactttctttcctgtgctgggtcacactttcctgcttctttgcatgtcttatcattttttggtgaaaactgtacattttagataatatattatggcaattatggctaatgatctgctcttctctcccaattctttttgtttgtaatttcatttgtttactgacttgacaggactgactaatttagtgaaacatattttccccacagtgtaaagcctctgacatcacttacctgagggcatggacttgggtgtacacacagtcacaatacaacgacattggttttagcagggctgtctttgactttttctctgttctgtatttaaaactgtctgcccctgttggtattacacacagtctctgctgacttccagctgattgctctactgttttcaacaatgccttggggcatacattacttcaaaatttgatgcaattaaatttgggcttcttctcaggaatagtctttgaggccagactttgagatttgttctggtcccaagagggttcttcctagctaactcttgtgctgaccgactttggtaaacttctagttagcctatggtttatcctcttgttctcatagaattaccagcctcctattaattgcttaccaccaaaatctctattgtttcaggcattcatctctggtgtttgtggctaacctctcccagtgtggaacctctatctcatgagaaagctgggatgagggcaattatggcccggggtaggtattatttctgccttacaagtcagggctggatggaggaggatatccctagacctcttagccagtcttgcctagaatagagcttctgcaacatgacattctgggggctgggtataagaaatgctggcagtttttccatctcagggagatactgtagccttcatttgagagctagggaaagtgttcttggatttaactgtctagaatggggtttctgtcacgttgatctggggactaggagaaagagtgagttatggctcaaatgccacagactcttactgtgtttactagcatttagtagattcttcttaaataaaatttatttatttactgtatgcctttagaacaattttcagggacttaaattattttagttttataaataatttttagcaatcacaattttttactaggaagaggttctgtggggtttctcatgctgccattatggaagtcattcccctgcatcattctttaatgcaaaaaataaaaaggaaggagagatataacaaacctgacgtccactgatacgggaatgagcaaataaattgtggcatagtaatagaatactatccatctattaaattaagtgaattagagccacatatatcagtcaggataaatctcaaacacataatactgagttgtagaataattcgtgtaaaaatatcatatataaatattagaaatattgtatggatgcataacagctgtagtaaaacaggaaaatgtggactagaaggataaaagctaagctctgactagtatttctctctggaccttagaaagagaacaagagacttcaactctcatttcatttcttgctcacacctgtaatcctagcactttaggtggctgaggtgggcagatcacctatggtcaggagattgagaccagcctgaccaacacggcgaaaccccatctgtaccaaaaatacaaaaattagccgggcatggtggcatgtgcctgtagtcccagctacatgggaggctgaagcagaagaatcgcttgaacccgggaggtggaggttgcagtgagctgaactccagcctgggcgacagagcaagactctgtctcaaaaataaagaaataaaataaaatattgtaagcagaatatgtgactctatgttgagtacatgagtgtgtactatactattcctgagctatgtttcatgttttcagtctcaccatttgtgaaacccaagcaggcactcaccagatggtatgaaaggctggaacctggaggtcccacagtcttggggctttggagaggagcctaatagagcaaaccagcaaggatcggaactaagacattccttcaacaaatgttaattaagcacttattatggctgctgctcagtgctagcagctttggtgtagtgccttttaatcttccagacactttcaaatacaggacctcgtttagatgtgtttcagaagggtggatttatttgttcaccacatacttagtacttaacttttctgtttcctcaacagcaagatgagactaccgagagcttctccttcataattttgtcaaaatgaaataataatctatgtaaagaggcggatgtgctgcctggcatatagtaagagcccaagaaatgttaggtactgctgttgttatcgctgtttaccaggcacagttccaatcataggagagacggtgattgaaccgaacagaggctcaaatgtctgtggcgctctcagtaaacccatgagctttctaaatagaaaagaaactgctcctagcctggccttttctgagaccggtgcgtgtcctcccgggaatccagcgcctggcatcttcgcagggtgctgcgaaggggcgggctgggaggcggggcacggctgggagcgaggcggggcggggaccgtcgcctgctgggaccgccgcctgcttggaccgcagaagagcaggaggacgtctgagccatgctcgcggcgatgggctctctggcggctgccctctgggcagtggtccatcctcggactctcctactgggcactgtcgcctttctgctcgctgctgactttctcaaaagacggcgcccaaagaactacccgccggggccctggcgcctgcccttccttggcaacttcttccttgtggacttcgagcagtcgcacctggaggttcagctggtaggagtgggagaaggtgcctagcgtgtcctgaccctaactctgttctgcagcacaagggacgttccggcaacgtgggtggggtgggggatgaagggcaggaagaggtgtggctaacgctggtaacctggtaaaacccactttgagtttcatttcctaacccattaactggcatgattccacctgcactttctagggatggaatattattaaatgtttactatttgcatgttgtcatgttaaacattactggaacaccttacttgtaatgtgattaccttgccctcttttatatgattgtccttaaaaatgctatactttctttctgagaaacttcatttcccatacataaaatggtgataatactacctcaatcttgatcatttctcaactgagttattcccactacactaactgagccctccagcttcaacctccttcccttgcagtgcactctcactaagtaataattttaaaatgttcttcctctgcttaaatttttgccaaacggtgttcagactcctgactgaaccacctgggacccttcttgatgcagcttctttccgtctctatacaataatctcctatcagggctccccgactctggtgaccaagttctttcaagttctctcagacatcaaaccctatctcaagaaaccaatactggttttcctgccactcagcacaggtaacttgctgagagacaacagtgtgacaagtgattatgaagattagataaaatagtgaatggtcaatactgacatatagttggtacataacaaatagtagttcccctttccctgca

SEQ ID NO: 3986 - DNA, 6000 bp, Homo sapiens
aaggaggcaggagtgtccagtggaggaacacagaataaatgctaaacagacctaggaccgaatctgtacacagtcacttagagctgtgggatgcagtgtatgtctaatactccctctcagcccttgttttcctgtttatatgttgtttcaccatacctgcttctcacagtggttagggtgaaatgagataatgaattacaagagaagcacattgtgaggctcatcatcagtggacaataagttcattctttgcagtccaatgtagaaaagtacaaggcactgcagagaagagaagctccatgctgattctcagaatttttaaagtattgttcaaataggaaacatgtatgacctttgctccttgactataaagtaaccagctgtgcagcacagcaggtcactgggtatgatctaggttggcagtgaaataggaaactggtgaatgcaggtggataacaaaagaggcctatatacattccactatgagaggagcaagtgggccaaggaaaagggagaagcgtggagaaaagaagtaatataagctatgttttaaaaaactgtgtacagaatcaatattccctcaatgaaaaacaggatacctaacggcaatgttttgataaaaagacatcatttaatactaagaagagtttttgctagtaattctacccagtaagatgtaaaatttatcaacccacaaagttgacctttccaaatagagtacacttgtacctaagtgagaacatttaattcagtctttcttatcttgaacaactttttaagatatatttcaatatttattcagtttcacccaatgatgtgtaaatactccatatataattctgtgattaatattactgaagtgaggaaacagatctgaggacctaaaataccaaaatttaccccaaagtctaagtacctataacatgggaaagagataaaaatcctactagagatggcacctatcttatctttgtgggtacctaatgagaatgcttgactccattaaactctatagcattttactgggggtccacagcaaccaaatcattactggagctgagaaaatccaatgcagttcatggcctgtgataggtcttaaatatttgttaattaataaagtaatcatgctgagaaaaacagtagttgcctggatcagcactcttatttttattttctgtaatcataacttatgattttgaaaatttgtacctggcatttcatacttccacagggtagaacttgaaatattatctcacctcttccattgttctccattgctgccctcttgactttataaaagagggtttcattttcataccgtgttagcaggaataaaaaatgagtataaactctttggaggttgttaatttggaatttcctcaattctattaatttttttattaaaaagtagccttaactaagcaattctacttctagaaatttatacttgcacaaagttgaatggacaagcattgtttgtacactgaaaaatggcaataacttaaatgtctatagggttacatgatgatgcatccaactaatggaatactctgaagcctttgaaaagaatgaggttaagtttaagcgttgccacagaaagaccatcaaggaatagtaagtgaaaagaggaagactgcctaataatactagtgataacagtaattgtaataaacactcatattatgttctaagcactttacattcattaactcatttaattctcattgtaactctatgaggtgggtactattgttatccccattttacaggtgaggaaattgaagcacagtgatgtctagtaatttgcccaaggtcacaaaactactaagtgtcagcagcagtgtgtggcttgaggattagtgttcttctctggttctattccaggtatgttttttaaaatgtgtaaaaatgtgtatatatgtatatatttgctttttattatgagggtcattgttacttctataatattttttctgcaaggatgtttcttaaaatacaatgttttagttatttttccttttgaagctagcagtcaaggaagaaatttaatcattttccttgtttccattgattcaatcaactaaaatatctaaactgtgttaggcacccttgcctgccactgtcctcaagaagcaactgtctagtggaagagagtgatatgtaaacatgtaatgcagagcccctttgctacggtctgtatgtgtcctccaaaattcatatgttgaaacttaatcaccaatgtgatattattaagaggcaggccctttaggaggtgactaagtcatgagggctctgcctttgtgagtaggattcatgccttatgagagaggtttcacacagtgtttgtccctttctgaccttctgtcccttctgccatgtgaggacatggtgttcttccccttcagaggatgcagtggttaaggtggcaccttgatcttggacttctcagcctccagaagtgtgagaaaataaatttctattttttatatgttatccagtctcaggtattttgttatagcagcagcagcagatggacactctataaagggggtatataaagatgcggtaggagaggcacaaaggagagagatcaattatgtagagggaagtggggggcagtgtgaaggctgcccagagaagaggtaatgttctgccaaaatacggaaggaaatgtaagagtttttcaggagctgggtgagaggaggaagagaaaaagcagcccagatggagggaataatgggagtaaagacacagaagccggaacccacattgttgatttatctgcaccttaggggagggaaacgtgaatagtgcctctggagatgtgggtaggaaccacattatctaggaccttgtaggctatgttaagaacctcatcctgtgtaccagttttttaagaaacacttgaagaacataggtgttctcaaagtaactcaaaagatataaaccaattatacacatataatttaatattattcagccttaaaaagggaggacattctaacatatgctacaacgtggctgaaccttgaagacattacgttaatgaagtaagttcatcacgaaaggacaaatactacatgattccacttatatgaggtacctagagtagtcaaattcacagagacagaaagtagaacactggttaacagcagagagggaaggaagtagggaaacagggagtgattgtttaaaggggaaagagtttcactttgggatggtgaaaaagttctaaagatggattagtgatgatggctgcaaaacgatgtgaatgcagttaatgccatgcaattgcatactcaaaaagggttaaaatgataaattttatactttgtatattttgccacaatttatttctttctttaagatggtcttgtgctgttgcccaggctggagtgcagtagtatgatcatagctcattgcagccttgacctcctgggctcaagccatcctcccacctcagcctcctgagtagctgggaccacaggcgtgcgccaccacatctggctaatttttttattttcttgtagagagagggtctcactttgttgcccagcatggtctcaaactcccgggctcaggcattccacctgctcccaaagtgctggtattacaggtgtgaaccactatacctggtttaccaaaatataaaaataagaaaaaaaaaaaaaagaaatttaaaaagatacagaccaagcacttagaaaaataattcaaagttcttctttcctaatctattaaagttcaatacgtaatttctttgcttaaaccgatcataatgatttgcttctgttatacaataatgactaccatttaccgaaaactagctctttgctagctacacatccacagagatcaggttcagggaggtcatctaattggtccaagacacacaataaggagtgagtgtgttggtggggggggggggggtcgtcatttctaggaatcctacaattggaaatcaagtcttttaggctccaaacaccttgtgctttccccaatccccaagctgcttatcttgctactttttgggatatgtcaacatttttcttaaaacaaacaaacgaaacttctcaatctgaaaagtattgtttggtgttttctgggttcagaaaatgtaagaagcctgaggcattgcggaatgaaattttcgttgagtgtttactgttgatccacatctgatacttttgaagggtttttaccccctgcaagagagactaaaagagcattcagaattagtctagacgcagtgtactgtaactacttggccggccacctgtaacagaggggaggagggtctgcacttagttgcggcagttatccggagaatacggccttccagcccctctgccaccagactccccacgccccaggtacgcgccccgcggagagacccagcgcgtgctcgtgcgcaggcgcagggcgactgtcacccggagtctgtggtttgtcgcccggcgctctggtgtctcgatgtagttcccctggcttctccttatccgcctcgggcaggggggtcgccactgccccttctccaggctctctccaacccctgcccaggctaagcccggcgcggccctactctctgaccccgcgttgcacaatgcccgagcaaagtctccaggggtgtgaaccccggcgtccctgcccctgggcggggacaggcggcggccaagcggggagtcgaggcggcgagcgcgcagctggcctagtctgcggtccccaactcctggagtcccctgggagctgccgctgcaggcccccgagccgctaggccccgccgccaggccaccgctgctgcggcagccatggcggaagttcatagacgtcagcatgctcgggttaaaggagaagcccccgcgaaatcctccacactccgagatgaggaggagctggggatggcgtcggccgaaacgctgaccgtgtttctgaagctgctggccgccggcttttacggcgtgagctccttcctgatcgtggtggtgaataagagcgtgctcaccaattacaggtagggccgaggcggcggcggcccaggccgcggaggaggagcgggcggcggcggcggcgcggcgccggctccctggactttgactgccaaagttaaagccgaacaaagttgggcgggagctggggagggcgggcggctgacgcgcgcggcccgggcagcggagccggcctggcgagcgggcctgtggcaggggtccgctccctgcgcggagctccggccggcccggcacatttggggctcgcctgccatgccctgggcgcaccgccccgaaaaccctgcccttcagagagatggagcaaagtgatttgcttggtgacttttgagccgttatgcctgtcgatcagggaggagagcgagggaagcctccctcctccgcagcctggacagggggccggggcttcagtgtcccctgcacccgctgacagcctctggggacgtacgcatcctcaacccagcagacaattattcccttgctaacactgggacccagaggcagaagttggttgtttttttttttaaggtgtgtgaaatcgttgcagagatctgtatctgcactgccttgagaaatcctttgcaggcagcggactgaaactgtagactcggacaagatgggacaagcggccgcccgaggctacatcagcggggtggactgacaaccaacaggcagagagttttctcccaagatttttgtttgatttaggggcggacgttgatgtggcttgtatcggaatgccttattaacgttgccgatgtgcaaattgaattcacggagctaagttaggtttgttctgatcttgtttttttctttgccctttttgtagatttccctcctcactatgtgttggacttggccaggttagttggaatcctcaccattacgtggtttatgttgttagaacttctgtgtgtgtctttatgtgtagaacagtgaatctgtgttctcttgtttacagatggtggccacagtggcagttctctgggtgggaaag

SEQ ID NO: 3987 - DNA, 6000 bp, Homo sapiens
ggggcggcggcgcccgccccagccgagccgagccgagctgagcgcgcagcccggccgccgctgctgctcgcagatgccatcacagcaacaaagagctcgctgagctgagagccgcggcgagggctcgcctgggagctgcgcggcagccggaggaagcgcgtggggggtccgggggagggaaggggacagaagatggccaagaagagaaagccccccagcatcaagggtgagtcccgctccctcctcccctcgccgcctcccctctctcacccgccctctgcccctcgggccggcctgtttacatccaggcgcggccaagtggaaggctcctgccggggaagagtttgccgtgtccggggagggggtgggggaaaccgcggcgccgctgcacctcccctggcctccggggacactgacaggagtttgtgccccttttgcaacctggggaaacctggagactcctctctcaccccacccctttgctactcggcgagcttgggtatctatctgttgcacctcctagcctctgggcagtggggagagaagcgactgggctcctagcatcttgtcttttccggaatctctctctctctccctctcgtgtgtgtgtgtgtgtgtgtgtgtgtgtgtgtgtgtgtgtgtatgtatgtgtgtgtgtgtgtaagagagagagagagtttttcatggtctcttctattcttttcttccaatcccccctccctccgccccttcgtccctagggtgacaagttctgcatccatttccccaacctccatcctcaggaggagattggagctggctgcctctccttttccctgcggtcaaggggacttgctaccggccgagtccctgcaggctacttcctgctccccaacctgtcgagacgggcagtggctccggctaagcagtctccctgttgctcctttggaacccgggcttccaaagttggaaagttcgcggagagaagcgatggcggggaggacaaggaagagcttgttgctggggtgacgaggcattgcggcgtggtccggggcgcgactcgggagggagcctcctgggctgcgtcttgcctaggggtcgcagagccggcgcgcggggagcaggtgcaagccacccgctcccgcagcgcggactcgcagaggtcgcagcttgtcggctccctagctctcgctgggggactcgcagagccctagaggttgtctgcagcactgcagagaggtggaagtgggctcgacaccatgcgcggtgaggaaggctgtgcgcgggggaactggacctgaggatggtggcaaggaaggggcgtcgttcgaagttggatttcaacacaatgggcccaatgacctgggaggcagcgacttactgagcctttggggttatataaaaaaggacaggaactcagatgagaactgaggggtgaagggtattactgaatacattggcttggactacagcagcgctcaggctttggcgtgctttttgcttttcctcccaagtctggcttgtgggagcttagctccgctctagaggtcactagggggacacaactttatcttggcgcgtcagcttgctttttaattgctccggagtactcaaagcacttactggaaagcgtttaaaatcatgatccttaattcttaagaagacattactatgaaaacacctgggactttttgttgttaaaaattataacctatgtatgacaattttattgcaatgccttttcttaaaatattatagctcctgtaaaattagaggggctttaaacctctgattccccccctccataaattagcgcatgggtatagagatacacgagtaaagaaagaagagagaatatattcacctacaaacagattcctctctttatcataatatcaaataattagtctaagcccagattgacaaggcgtatgagctacacttttggttcgctccttttttatggagccatatggcacgatgagtgaaacagaaggattggttttcagcactgctgatgtggctatccattggcagaaatacatttcattcccaccccaaaccttgcagattgtaaatggtccatgaagagtggaaaaaattttacagttttacagtacatggtagccagagaaaatcttacccttgaaattaataatcttggcagaagcacaaaaagatacaattagattgatgaaatgagctcatataagagatttgatgaaaaagacacctcccctttattcttccgtcccctcaaaacaccaaaaagtttttgttttgtaggtcagtatggaatcatttgtattttcttgaataagtttaatttgatagtgaaataattgaagaatagcagttaagtgttaacagtttctctggaaggattaataatcaagctttcttacgacatgtggtctcaataaattttatgtagtactttaaaaataaggttttctcatgctacatgtttttcttaaaggaaaagttatgttacttagctcctatcaacttgtgttgagttgttcttgttttttaaaacaagttcatttagtatttcacagaaagaaggacacctttaaaaacaaatccttggagtttcactttagcgaagcaggatgaattgtgatatttgatagatgacagaagcaaacccagaaagttgtaatctattgacttgcctcaattttgccttttaagaggagagctctacaaaagcatctgactgcaggcttgctgaactgctctcagatgtctgcttctaagctacaaccaactaaactgggactgcctggtaggaaaaatttctaggctttattggcaggggcaggctactggggtgaactttgctggataaaacactgtagatttagcaatattccatgctgtgttggttattctcttacaagagctgcttctctgcttagctacaccgcatgcagggagagatcattcgtcggatcttgtgacaggcaagttgctcattggcttctgaagtcctagcaagagagactatccataagcctagaaattggccaaagagaaatgcagtttcttaacattgatagaagaataagatctgttggcaggatttctcaagggacattagcattcatttgtgacatctcatcaaaaggacagtctttcagaaaggccaatggaatcttttacaatccaatattgataatgtttttaacgaaaaaatgctatagttcataatcaatacaagtcttataaatgcaagctggttacattggttataatcacgtcaccacccccacccctgccttttccaatattagtacaacaaagacttcttgctcaattacttaagtgtaaaacttatgtttaggttaatttattcatttattcatttagcacatatttattgagcactgaatatgtaccagattctgtgcaaaacactagggatacggtaatgaacatgatagacaatgaagtaagaggaggcctggaagaagcaggtgacaaataatatgaaccagaaaatttcacatagtgattaataccaggagaaataaaacaaagtgatgtgcgagcaaatgattttgaggttactttagattgtctggaaaggtggcatttgtgtcgggaaacaagtgatgaagagtaatttgcatgccaagaactggaacataacacttcaggccttaaggtagaaatgaggtggtagcttggcacattcacatacaaaaggaagaggtgtaatgtgtaaggaagagacagttagggagaagccaggcctttttggtcataaaaaggaatatagagtttaagtgcaatgagaagccattggatattcacttgctatttggggatacattcctctcctggaagattatttcagggagaggagcattcctacatcaactccctaggccaactaaggtgacctaatagacttcacttttctaaaaggtccagttatactcacgttattttctcttgctattcaccagaatacctatgcaatttcaggctgagatattgatagcatctctaggaatccctgcttagaaaacaattctagagagaatgaggattaatttaacatttagtacaagatgataagattagtcacttccctggcaagcctttcaatgcaagtaagtcttaggaaaaacatattgtaatggtagagggggattctgaggggtccagaacatgactgtgcagtaggcagaatgtggaaggcagcatgaggggctcctagataacagaaaggggtccacagaaggagaagagtgatgtttggaaggggacatgagaaagcctctaaaacaacatcagccaattcgtgattttgccaagtggaagcctgatatgagcatgttccaagagaaacattctcattcaaacacagaaaaagtttaaaccagggtacttttatgcttttgactgatctttttataatgaagcatttgtaacaataaaagcacacagatgtttacaaagtctctttgattttacttaatcactgtcaggttgttctgatggattacagacctcacaaatgaaaatagcatgaacatattaatgataactgctgtttgttggaggtagttgcttgatagctagttaaggaaatcatgctcttgggtctcattttactgtagagatgttggtaagtgggatatggggtatattggatgattttctttcccctaagcatttgtgacaagaaggtgctatgatattcaggaaagacacaaataatagtagattattttaaaggtaatcatggcctacttccacctccaaactacctacttctttgccaaggattaacaatgaaaaaatatactatagctccaggactttgttcagtctcctccccctctttatactccaagtgactcctttgaggctagcaaggctagtaggacctcagggattacctaagaatggggtatggcccttagtgatactggaacacaatgtgtttatgacatcagcttttttttcacagtagtgaatcgtagcatgttagagttagaaggttcagtgttgatggagttattgaagaaatgatggagtaagaggtgagtgatactgctaaatgcaagaagtctatgtctgtaggaaaattggtcaagtttgttattcataagtacgtattctatacaactcaagaaatacacacacacacacacatatatatagtgaagtctgaatataaattaggaactgagcacttcctctccgtgtgtgtgtgtgtatatatatagatatcctgggggattatttaaagagagtagtatttttacatcagctccctaggccaagtaaggtgacccaatggacttcacttttctaaaaagtccagttacacttatgtatcttctcttaatattcaccaaaatatcgacaatatttcgggctgagatgttgataacatctctaggaatccttacctactggtattcacacctgttcatactccccttccaaaatgaatcacagctgaccatgtgatcagtactgtacagcagaaaactacatcataaagacatacactatggcttctgccttgttcttttgtattctttgctttcttatgttgctcattttggggaaaccagatgccatgttttaaaaatactcaaggatcccttggattattttttgaagcagaggttcatacagatattattaacatttcagcccaaaatattgtcggtattttgatgaatagtaagagaagatacataagtataactgcactttttagaaaagtgaagtccattgggtcaccttacttggcctagggagctgatgtagaaatattgctctctctaaataattctccaggatatctatgtgtatataggtatatgtatgtatatgtatatacctatggagagagaagaagagctcagttcctaatttatattcagacttcactatgtgtgtgtgtgtgtgtgtgtgtgtgtgtgtgtgtgtgtatttcttgacttgcatagaagtcttgaatcttagctctgtgtgggaagaactgaggcc

SEQ ID NO: 3988 - DNA, 6000 bp, Homo sapiens
gttcaattttattattatttttgtaaatatcttactatgcctaatttataaattaaactttatcatagatacatatatgtaggaaaaaacagtacatatagggttcagcgctatctgtgatttcaggtatccactggggggcttgatacatatcccccttggataagggggactcctgtaccaaaatatattccagatagttaaacgtaaaattaacacaaaataaaactagtaaaaaataaatattagaaatgtgccacccgcagatgtttgcatcgctagttctttcttgtcattcaggtctcagatttcacaccacctttgcagagaggttttcactgaccacctcactgaagtagtgtctccctctcccttcagtttctgtcatcttaccttatttgtatcaccatgagaatttattgtattcatttttcttttttcttattgtctgttttccttactggaatgtaaggttcgtgagagcaagaacctcctatgtatttccagctacaatatcctggtatgttatgtcaactaaagaaaaaaaaacaggcttttaaataattaaagttaattttattcagaagtcctactgagtactgcaacctgggagaatctttcaaagagtttgttatattgctgcaaagcattgattcaccccatagcttaaacataggtggtggttgctctgcatgtgttaagaagttacatcaaatgtgctcagaaattacattaatgacatggtttggctgtgtccccactcaaatctcatcttgaattgtagctcccataatccccatgtgtcaatggtaggacccggtgggaagtaatttaatcatgggggcaagtttttcccctgctggtctcatgatagtgaataaatctcaggaaatctgatggtttcataaagggcagttcctccgcacatgctctctctcttgccttgctgccaggtaagatgtgtctttgctcctcctttgccttctgtcacgattgtgaggcctccccagccatgtggaactgtgagtccactgaacctctttttctttataaattacccagtcttggctatttcttcacagtagtatgaaaatggactaatacagtaaattggaactgaggtagtggggctctgctataaggttaacagaaaatgttgaagcaactttggaacagggtaacaggcagaggttggaacagtttggagggctcagaagaagacaggaaaatgtgggaaactctggaacttcctagagacttggagggctcagaagacagaaagatgtaggaaagtttggaacttcctagagacttgttgaatggctttgatcagaaggctaatagggatacggacaaagaagtccaggctgaggtggtctcagatggagatgaggaacttgttgggaaatggaataaaggtcactcttgctatgctttagcaaagagactggtggcattttgcccctgccctagttatctgtggaactttgaactttagagagatgatttagggtacctgagggaagaaatttctaagtggcaaagcgttcaagaggaagcagagcataaaaggaaaacttgcagcctgatgacgtgatagaaaagaaaaacccattttttgcggagaaattcaagcctgctgcagaaatttgcataagtaacaagaagccacatgttaattaccacgacaatgggaaaaatgtctccagggcatgtaagaggtcttcctggaagtccctctcatcacaagccaggaggccaaggaggaaaaatgggtttatgggctgggcccagggccttgctgctttgtgcagtctcaggctgctcacatgtgatattgggactgtgggtgcacggaagtcaagaattgaggtttgggaaccctgcctagatttcagaggatgtatggaaacacccggatgttcaggcagaggtgtgctgcaggggcagggccctcatgcacgacctctgctaaggcagaagggcaatgcagaagggaaatgtggggtgggatcccccacacagagtccccactggggcagtgcctagtggagctgtgagaagagggccaccatcctccagaccccaggatggtagatccaccaacagcttgcagcatatgcctgggaaagccagagacactcaatgccagcctgttaaagcagctgggaaggaggctgtatcttgcaaagccacaggggcagagctgcccaagaccatggcaacctacctcttgtatcaacgtgaactggatgtgagacacggagtcaaagcagatcattttggagctttaagatttgactgccctgctggattttggacttgcatgggccctgtagtcccttcattttggcctatttctcccatttggaatgggtgtatttacccaatgcttgtacccccattgtatttaggaagtaacttaacttgcttatgattttacaagctcataggcagaagggacttgccttgtctcagatgagactttggactgtagacttttgagttaatgctgaaatgagttaagactttgggggactgctggtaaggcatgattgcttttgaaatgtgaggacaggagattttggaggggccagggtggaatgatatggtttggctgtgtcccaacccaaatctcatcttgaattgtagctcccataatccccaagtgtcaagggagggacctgatgggaagtaatttaattatgggatcagttaccctcatgttgtcatggtagtgagttctcacgagctctgatggttttatttatctatctatttatttatttttattttatttcattttattttttgagacaaagtctggctctgttgcccaggctggagtacagtagcgtgatcttggctcactgcaacctctgcctcccaggttcaagcgattctcctgcctcagcctccctagtagctggtattacaggcatgtgcccccacactgagctaattttgaaacatggggttttgccatgttggccaggctggtcttgaatgcctgacctcagatgatctgcctgcctcggcctcccaaagtgctaggattacaggtgtgagccactgcacctggcctctgatggttttataaagggtagttcctctgcacatgctctctcacctgctgccatgtaagatgtgcctttgctccttcttcatcttctaccatgattgtgaggcttccccagccatgtggaactgtgagtccactaagcctttttctttagaaattatgcagtcttgggtatttcttcatagcagtatgaaaatgggttaatacaagtaaagtctcatcaaagtgtgggtatgaagttacatctggtcatgaatttgaggcataatcattaatcttgtcagacattatcttatgtacaggaagaggcaagggctaggatcaccaaacttaccttttgtaaaaattcagtgattcaggcaagagatgtgcaaacctattccctatcctgcttatggtcttcaaggcattcttccacaaggctgctcacagtcaatgagtcaggggctttgtgaaatattgctggcaaaggagcagaatgagcaaatggcttcttatctttgctactttgtttcataatcatcagcatccaatagatatctgttgaattaatgaatacatggaagatattctggcagtgtatttactttctaggattcacgtaacggaaaacctaaatttgactaaatagcatgaaacctctcacaaagtgcaatagcaaaagaaacaaataaaaggaaaagagagacaagagaatgggaaaagcaatagcataaaatatggcaaaggctaatgttacttatttataaatatattattcaaattcatatgcaaaacataaatatataaacaaagaatttacatcagaggacacagagatagtttagaaacacaagaaagacatcagatcttgatagtaaccaaagaattataagtatagttacctaggggtaacatttcataccaaagaatttaaaggaaaaaaaatggtatggtttggtgttgtgtattctgatagtgctgtaagcttgttcattttggaaagcaacatcatttatagttattaaaatgttttggaatattttgaccccaaattcctagttcaggaaaattatacaaacaaaataattcaacagatttaaaaagccaaacacacaaaagatactctttacaatattattttcatagtaaaacttaaaaactttgcattgtgcagcagagggacaattactttggctgaggcatcaataatggatggaattttatctcaccattaaatgttaaaattgtgaggaagcagcgtggaaacgtttatgtcatactagatgaaatgcataaattaaaactgaactcacataataaagagaatggtggaccatacatatacaccagctgtgtctcttccagataggctttagttccataattacagaagatactcaagaaacaaaaacgtaactagcttcccatgttaatcctttcaccaggtagtagaccccaagcctctaaattgcagcgcccacccacattttccatttatagtttatccaattaatcatctttttgtgccaaaacgcttgttcttcccaccacatccagcttcatattttcaaagaattggcagcactcggcaaaataaataaataaataaataaataaataaataaaataaataagggaacagagaaataagtttttaaagtttaaggagttacgggttttccctccactcacctttcaattttttttcttaaatgttatacctattttacaacctccaaactgaaaatgcagttaaaaataaaaaggtcaatatcctgcgtctaccttgtcccggactctcgagctccacaaaaccgcagagttctaaagccggaccagagggccacctcgaagaggcgcggatggtgtcgcaaaaacccgcagcgctactttacggcactgcctccgccccttcaggtgcgggaagtctgaagccggtaaacatggccgtcaccgacagcctcagccgggctgcgactgtcttggcaactgtgttgctcttgtccttcggcagcgtggccgctagtcatatcgaggtaggagtcaggctcatttgaccacagccgggaggccggctgtgagccctccagcagatgtccgatacacagtagctgagggacgcctcctggagtcaatcagcccctgacccaggctgggtttgaggagggtatcactgggcacgggttaggacactgttggtctgtttcagcgttttaaaacgatgaattgaaataatcaaaccctcggagacagaggaggacctgatcctttgctcctacatgtgtgcagttcttaggtgaaatacgagcaagaggctcgtgaaatgtcagtgtgcagcaactgctttcctactactcaactgcagccctctgttttgataggagtcagacggaactggagagatgagggcaattttaagaatccagataatagaatttagtgataattagaacatgggataaatataagtgtttattaaaactctcaagtttctggcttaggggcaacacgtctgggttaagaaatggaagagaaaaggggtgcttagttttatcctgggctcctccagcttcccatttttaaacgtggacacaggatgttctggtgctctataatgcttttactattcaccatactctgatgattcctcagtcccggtctacaatctagatgtctggtatctttttcaggcctgcatatccagctgactaagaatccgggatagtcaggagacatttgaaaatccgtgtgcaaagttttatcttctgcttatcctacctcctcttaaaaagacactgaaaaactaagcaccccttttctcctccatttctcaaccagatgtgctgctcctaagctagaaacctgagagtcttaatctctttatcccatattctaattatcactaaattttgtgatctgagttcttaaaattgccc

SEQ ID NO: 3989 - DNA, 6000 bp, Homo sapiens
ggtggtaggcacctgtattcccagctacttaggaggtggaggcaggaaaatcgcttgaactcaggaggcagaggttgcagtgaaccaagactgcaccactgcactctagcctgggtgacagtgcaagactccgtttcaaaaaaaaaaaaggaaatatgagactctctttttatgagtagaaggtgtctttcacctgtagcacaaagtggaggttcagagcatgaacggattctgtagccaggccacctgactctgccacttgctggttgtgtgaccttgggcaagttacataacctctctgtgcatcatttcctaatctgtaaaatgaggataatagctgggcacagtagctcatgcctgtaatcccagcaccttgggaggctgaggcaggtggatcacgaggtcaggagtttgagaccagcctggccaatatggtgaaaccttgtctctactaaaaatacaaaaattagcagggcgtggtggcgtgtgcctttagtcccagctactcgggaagctgaggcagaagaatcacttgaacccaggaggtggaggttgcagtgagccaagatggcgccactgcactccggcctgggcaacaagacggaaactgtgtctcaaaaaaaaaaaaaaaaaaaaaaaaaaagattatagagaaacaaccaaatgatttttctaatgataaagtcttttagactttatctgattaaagaaagtctgattagcagactgtgaactgctaatcaacagaatctggagacatgccactaaatctgagtcactgtcaacatgtgagtccacacctacaggaggggtggttccttgtatgaaaaacagcctcagtaaatcactgaaactctgctggcaaacatttttaatgcaagtaatgcacctcaatttcacccccctgcttacaatcctgtttgaaacaattccaaacaaatgaccaagaaaccactttggaccaaaagaaagctggtatcttacagtaacaaatactgtagcttgaatgcagttctccatgagaaattagtgaaagggagcatccattcccttagaaatcagttaatattgccattaataagaggttgggcaactgggcacggcagctcacgcctgtaatcccaacactgtgggaggccaaggtgggtggatcacttgaggtcaggagttatggcaaaaccctgtctctactgaaaatacaaatatcaaccaggcatggtggtgggtgctggtaatcccagctacttgagaggctgaggcatgagaatcacttgaacctgggaggtgggggtgggggttgcagtgagctgagatcgcgctgctgcactctagtctgggcaacaagagggaaactccgtctcaaaaaagaaagaaagaaagaaaagaggtaggggaacccttttttatagagctttgctcaggaaccaaaaattcaagtttattttaaacctttcgtctatgcttgaggtatctggatttctgcttttaatatcatattgtaaagatttaaagagaaaacatctctgtagacattgttaattttgtaaatactgatgtaatttcttgtgtttttccatatcatctactgaaactaaatagctcagaattaaaaaaaagagcccttttattttgccagtctataaagcttctgatgacaggtagaagaacctggtggttaaggacttaggttttgaggtcggtggatgtgagattgaatcgtggacaggttttgaggtcggtggatgtgagattgaatcgtggacaagatctcagtttgtataaaggcatgtatatcggcctcatttatacatattcttagagggctgtgagaagtaaatgtgtttatatgtatagaatttagtacccatggccaggcgcagtggctcatgcctgtaatctcagcagtttgggaggccaaggcgggtggatcacttgaggtcaggagttcgagagcagcctggccaacatggtatgaaaccccgtctctactaaaaatacaaaaattagccaggcatggtggtgcgtgcttgtcaatcccagctactcaggaggctgaggcaggagaattgcttgagcccaggaggcagaggttgcagtgagctgagattgcgccactgcactccagcctcggcagcagagcgagactctgtctcaaaacaaaaacaaacaaacaaaaaagaattcagtacccacgctggctcagatgttgatggttactgttgtgaatctggctctacggggaccagtcacttcatcactctttaaagacaagacactcctaaattatctaccaggccattttatttagaaggccttaacatgattgatacatttaatttaattttatttttttgagacagagtgttgctcttgtccaggctagagtgcaatggcaccatctcagctcactgcaacctctgcctcctgggttcaaacgattctcttgcctcagcctcccaagtagctgggattacaggtgcccgccaccatgcctggctaatttttgtattttagttgagatggggtttcaccatgttggtcaggctggtctagaactcctgacctcaagtgatccacccacctcggcttcccaaattgctgagattataggcatgagccacctcacctggccgatgcatttaaatgtgggattaaatattcacacctagttcaagtgttcacatctgtacttgaaactaaaacttgttaacaaggcataaatactgtattagtctgttttcatgctgctgataaagacatacccgagactgggcaatttacaaaggaaaggtttattggacttacagttccacatggctggggagacctcacaatcatggcagaaggtaaggaggagcaagtcacatatcacgtggatggcagcaggcagagagagctggtacacggagactcctgtttttaaagccatcagatctcgtgagacttattcactatcatgagaacagcacaggaaaaactcatccccaagattcaattacctcccattgggttcctcctaggacacatggggattgtgggacttacaattcgagatgagatttgggtggggacacagccaaaccatatcaaatactgtttaatttgagtctaggagaaatcttaaggccttaaacttagactttataaaagcagaggctagctccatctggactgtttattccttcagaatattatgcctacttgtattcccaatgcctgactcagggctctcccatagtcagtgctcaatgaatattggtaaggaaaaaaatggttcagtgaggagatttttgcagtaattcaggtgactgatgacatttgacctttgtgaatgaatctccaattctgcaattgggtggattctctgcctataggtacaagaggaagaggacgagaaatatttcctgttctctcaataactttccaaataacatgtcataagaagcctcctcattctactctccaacatattaaaagcctaggattgagccaggtgcagcggctaacgcctctaatcccagcactttgggaggccaaggcaggcgaatctcttgagctcaggagtttgagaccagcctgggcaactaagtgagacccccgccctgccaaccccctctacaaaaaatacaaaaagttagctgggcgtggtggcatttgtcagtaatcccagctactcaggaggctgaggtgggagaatcgcttgagcctgagaagcggaggttgtagcgagctgagattgagattgtgccactgcactccagcctgggcgacagggcgagactccatctcaaaaaaaaaaaaaaaaaaaaaaaaaaaggcataggtccatagccctttagaactggaagaagccttctaggccaagcccttcatttgaactgagccttgacgggtattagccgttagccatttgtggaaggtcgcacagtagtcaggactggaagtctggtctttgaaacctgtcagtccacggtcatttcacctgcctgtttgtaaaacaatgtcctgttacttaagtatactttttaataagaaaaactgggtgtaagcaagagtatcagagtggtgttctggtgccagcagttcaacttctgcagcgtgtacttcacaggcacaggtacttaggacgtcgcacaggcacaggtacttaggacgttgccccgccgagactgtcgttcatatcgcgcccacctccgggtaacgccggtaatgctgacctagctccattatttgtattaatttatttagctagcagggggaacggctgggtaatgcagtctcagctgctggaggggaagaggcaagactccgccggcgcccaccatcagagcgtgacaacaagcgggaccggaggttgggaaaaagcacagggacagaatgaatgtgtgcatgggggagctctgctggggagagggcaagaggctgtgatcagattatctgaggtttcagaacttttatataaagaccaaggaaccaaatgaaaatccaactcttccagggagccctggaaagttcaaaggacctcgtttgagggagcgagtccccgcagctcgtgcccacgtctccctcgcgcttcccccaggacaggggccgccccaacccgggcacgctgagcccggccgcgcccctagccccttctctctcggcctcctcgtcccgaagggaagcacaggctcgagcagcattcggggctcatccatcagccgcggaggcaaagggggaggagagaggaggcgggaggcgggaggcgggaggaggagtttctgggcggccgagagcccccggtggggccggcggaggagcgcccttccccccgcgcgctgattgctgtggcgtcctgcccgtccccgcccgcgtgtgtgcgagggagggcgagtgcgccgggtcggcctgatgggggtaatcgagggtttcggggacgccgagcggcactttcctcttcccagcgagtgaaggagggcagtcggcggctctcgcgccccggccactttccctgcgcgattcccggagctccctgcaggaggtgagagtccccagcgggtccggatggcgtagttttgccgcggcgcagcagctgccggagctcgccgccgccgagcgctgggcggggaaacttgccgccgctttcctccaacttgctgcgggtggatctccgctggacacaccgcctccgaggtacgtgccggcccagccccgcggcgctgcagcccgcccgggctgtgggctctgcaggctgcgcgggtgcccgtcggcgcggcgcgggctgccagtgcctacttaccggccagggtcgctccagccgccaggacctccggccttgggagggaggcgctggtggggcggtgtttaccctccggggagcaggcaccggtggccagcggtgcgtgggcagcggccgcacggggcaggcagtgcccccggcgatgcgcagtgctggggaggaattctccacgcccgccctcactcttcctctccgcgggtccttctgacccctgcggggcgcggcggccacttccctccgggcgcgtgacagcttcggtgggaatggtttgttgtgggttcgcagtcaattgccgtggcccaggctgtggctcccggactcgtgcacggacgcggtttgcgttccccgctggccgcgccctcagggtgccttgcgggctgagccgcaagctgcagctcggcccccccccgccccggtttattttgaaggctctcttcttgtattcatttggttaggacaaacttggaaatcttggactgtcgctagaagaatctgcttgcagacttgatcttattagggcatttgccccgctttgcagaatcgcatagtgtcaggagccgacgtgtcaagcatgaattaccttggcaaagtagaacttagtggatttggtgtcctcacgaaaagctggaagaagaaaaccgttccatttccctagctgtgaagtgaggatagtagtacttgccccgtaaagttgctgtgagcatctaatgatttaatgt

SEQ ID NO: 3990 - DNA, 6000 bp, Homo sapiens
gtacccaatatcaccaataaaataacacctcaaacatttgaatgtttaataattctataggtaagaactaggtaaggtacttaggtatagtttcactttgaatttatcttattatgagtgaaattggacaccttttcattagtttggatatcacttttatttctttttccgttcatgtcttttgcccattgggttactgatatttttgttctcaatttctaggagatctttacacactagattagccttttgtctttgatcggcattatcattattgttttcccaattaaggcacatatacaataagaatgatcagcaatttgaatgaggatagagatcaaatttcttagaattacataccatgtaaacatggaatttgaatttgtttctaaaaagtagattcagacagcttcattaagcagattcgttacaaaaaggaaagctcttaatggttggctttccgaagtggaaagagcaaatacatatccaaaaagattatgtgcaaccatatctgtgtatatacatgtagggagtcgggggaacaaagaataggaagagagtgtaaaaggagataaaagagttgagtgaggaagagggataaatgcagggagataaatatgtgatagaataagaaaaaggaagagagtttcagaccaagcaaagatctctaacatcattgacaaaatagataatgaaaagagaacagtgccatactatccaaagtacttgatccaggctttaaatggtgggtataccttaactacttaataaacaattgattacctattatgtataagatgtagtgttaaaatcaaggggattataatttacttaagaagacatttaactgcaaaaaggtaataaatatgtaagtttaaaagtagagtaatacaccaagataactactttcttgttagaacataaaaagaacaattatatttaaattcttgagtaccatagtaaaagattatggaaaccatgaataaggtatttaaagaaaaaatttttttctttaatttaattttaaaattaaaaaaaattttttttaagtagacaggcctaaaaccaaaacttcttttaactagataggtctaaaaacaataaccttatctcttggctttttttgaaaatcagtgctgctaccagatattttacagacgttttcataaggtgaataattcaaaagtccagggtggctaggctgaacatccaaaattagcttttcagaccttgaaggattaggggcataatcagaattttcacttggactaacactagagaaaaaagaaaaaacatatttcagttcttggatagtttattcactacaaattgctatacattaaataagaaaatagaaaacctgaaatgctgctaagcagattcacagttatgaacataaggcaatgtttccactaaattttaaataaatcataattacttttaaactagcaaactgtatttctaaagcctctacgctaagattacttaagattcaaaaaaatcataaaaaattagtaaagcccaaaatatatattttatactgagttctaatacactgaaagtgtttttaatatgcaaagaggcttctctaatattccttatttttccctaaactgaaagttacattaaaaagtataagaaaattatttcttattccagaggcaggttagaaacaatacatcataatgaaatccacacattttacattgatgtatttaaggcacagtgaattctatatgtgattttacttacttacctggataactcttcccctaaactctgcaaactccattctgttatcttcagttcatgtcttaaggaagcaacatttgcaagcaaactttcctcttcattgtctttattatagtagtctgatgaactagattccatttcttaaaaaaaaaatgaatttcttgtaccttgtctgaaagattctgtagtttcagtcaaaatactcacatgaatagaatttaactcattagttttctattttaaatgttgtgaaatctttcatggtggtttaaaacaaaacaaaaaatcaataataatgaatttatctgtagtgtaaagccataaaggaattcaatacaatttcaatgaatgaatttttcattttagccagggtctagttattatagttctcttttgtaagcatacctgatcttcctaacaattgttaattattttcattacatgttaaggaaactaagaatcagacattaaataacttgctcaaagtcacacaaactgtaaatggtgaaatcaagatttgaatccaagtcattaggatgcaaagaccattaaattatgtcgcattgtagctttattacatattacatatcaatttcaatatgaggtgtttgaactttcataattacattacaagtactggacatctgattaaatggtatcattacattcatattttgttagaagggaatttattaccagataaaagctgtctcctcctcctacgcccaatagttataaaattttaaaaagacacatttacaagtcacaaccacagggatcaaaataacatttggcaggtcaactcatagaaatgaagaaaagcttttgtttcttcagtggatgagtatctctagggttgtgaaactactaaatttctttgcatataaaaatcacaataaagcatcacattttattattgtaattaatacaataaaaaactaaagctttataatctccactactacagagctttctgcgcaatcttaaaattacattcctctttcagatcccatttacctttttcactgtagcatctccttcaacgcccttcttagcattctgatcccatcccaagttccaaaaggttaaaagtcctgtgcattacgttcaggaccgcaatgtacttagagaagctcaatattttgaatgaattaacgaatactaaactgtccttccttccctcatccagttagaatggtatgttacatttattccccactcaaaaattctcagatgtagggaggaagattaaaaagaaaactcccaccttatggaaagaaagtggcaggaaattaaatgagatactatgtaatcttaatagacaaactggttctatcctctttcccttttttgtttccacaaatttgcttctgcttaagtgacaagactctcgcagacaagtcaataaatcaggtccccatcctgctttacctattcaacatctctagctctctgtaggatggtgaaggagaaaagggtagagaaaattgggcaaattctataataccatttggtactatatatttcatcttaaatcaggttttagttcaacatctgtgtattgccatgcaagaaataactcccagtccgggcgcggtggctcacgccggtaatcccagcactttgggaggtcaaggcgggtggatcacgaggtcaaaagttaaagaccaacctggccaagatggtgaaaccccgtatctactaaaaatacaaaaaaattagccgggggtggtggcgagcgcctgtaatctcagctactcgggaggctgaggcagagaattgcttgaacctgggaggcggaggttgcagtgagccgagatcgcgccactgcactccagcctgggcgacagagtgagactcggtctcaaaaaaaaaagaaagaactccctaactcttctgcagtagcaatgaatatatttgatactaaaatgttttcattttcctagtgggacatttactgtcaaatgaatgtccttaacttcaatttacagtagttacccaaaaaaggctatcttcactgactatgcatacctagaaaagcacatcatcctactcaccgaccttaacaacatcatctttcggccctaattaacaatgtgtttgtaggtttgcacacgcacacccatcaaacgaaggacaagtgttcttttataccctatgtatgtgatacaatgggctgtagtcgaaaaagattcctcattttggaaagaagtcataactttatgtagtagtctcctgtctcaagatcgcttgacacagctaatcttacatccgtctgaaagaagcgggggcgggggtgggggacggaagtgacagtttcctctttttttttttttttttaattttatagagacagtggctcgccatattgccaaggctggcctcgaactcctgggctcaagcaatccttccgcctcgacatcccaaagtgctgaggtaacaggcgtaagccactgcgcccggcctcctatttttcatcaaataaaatacaaccgttcagagcagcatgctcagcaaccacgaggaccagtcccagcgcatccaaggtgccgggagggaaaggaacagaactcccccaggtaagccggtttccccacgccaaggcgcagtcgctcaccacccaaatcgtcgctggggagagacccacccggcgactgcgcgcttcgcactcgagtctgcgttaggaagcctctgaccctttcccgggcccctgcgcgtggaagcctcggacacaactcggagaaccagcgaaccccggcagcacagaattcgaaccgccgcgggagccgttgggacgcgcctacccggtcactgccccgccccggcgcagactgcgtgaggcgccgccgaaggcgcggggcttgccggggatcgtggtcggcgagcgcgcccgagcccactagcggagcccgcccgggactacatttcccacaattaccgccatgatgcccattggtgggggaagccatgggaaccggaggccgtcagggggagaggcgggcggcgctcacgcctggcctgagggggccgagactgaggcggttgcggaataggactgctagccccgcccagagtccctaccctttggagaactgcgcttctctttcggagggagtgttcgccgccgccgcggccgccacctggagtttcttcagactccagatttccctgtcaaccacgaggagtccagagaggaaacgcggagcggagacaacagtacctgacgcctctttcagcccgggatcgccccagcagggatgggcgacaagatctggctgcccttccccgtgctccttctggccgctctgcctccggtgctgctgcctggggcggccggcttcacaccttccctcgatagcgacttcacctttacccttcccgccggccagaaggagtgcttctaccagcccatgcccctgaaggcctcgctggagatcgagtaccaagtaagtgcggaggataaaccagcctccttcctttaacccagctgcactgcgttgtcgcctctcacccgtttagaaacttctggtggacggccctggtggtgaagaggcgagggccgttcaggaagccagcccgctccgcgcaggcgcgcgaggcgaggcgaggctctcgctggggccggggacccagaacttaggctggacctggaattgatgactacccgccttctcccctttcctccggtgggaaggaggccagaactggtgatgtcgctggcttttctctttgtttcctaattcgcccactgcttttcttagccactacacgctctcatactgagaatttcacaatgcagaactgatacacgttctccttcatcattggacaaggtgatgacacttgtttgaatcacccccacccctttcacacagttcagatgttacaaatcactgtctttgcttcagttaagggtttttggattatgatcgtgtaattggcattaagcccgattttgaaattttttggaagacgctgttgctatatttaatgatacatttccgtttaagttatatatccattattttcaaaagatcaaatcgtatattaaaactttataacctttcttttcattttttcattgagcattgtaagcatttccctcgtgtcattgttttttttttttttttttgagacggagtctcgctttgttgctcaagctagagttggagtgcagtggcgctatctcggctcattgcaacctccgcctcccgggttcaagcgattctcctgcctcagccttccgag

SEQ ID NO: 3991 - DNA, 6000 bp, Homo sapiens
acgtacacaaactgaacctagtgacccagcatggcctctaatttctcaacacttctgtacttctgtaatgattaacccatgcttctcacagatccatgccccaaatttctgtgaataggccctgactggcccagctaagatcatgtgactgcacatgaccagtccactttggcattaacaagcctactgcagactcttcccttggtgttggagtcactcctagaaaagagcaaatctttgtgagccaggcagtcaacctgctggcagcttccactcagccttggagttttttctatgtgtaactttcataaactgagccttatttatttattttttgcactatcatctcatgaaatattattgcgtaagctgaggaaacatgttattcatgatgactggagtttcaagttttaattgtacaatgatttagttttgagtttggtagaaataaaatcaaatttaaaaatcagatatttttcatcttacattatgatgtcccaaaactgcctttatgcttgtgacatagattcataatgtcttctcattccacctgtaatcactgtttgaaataaacatatgtctaatgatatatttggggacattctattttcttcagcttgttgcaagtgaattgatggtgatcttttggtattggtttcattatcaaatttatctccactccaaaattacagtaatttcaaagtaatttagtctatatatttttccatagcttttcttccaaatagaaactgtaaaaagttataaattacttctctccactactgaatttttgtttgcagaataactgatgtaagtagcagaatgcctcttcctagttcaaccctcaggaatagaagtgagaagatctttaaaacttcaccattttccttgacttgtttataattctgaatgtaaatgtgaattgatatggtctatcgcttaacaccacaactcttaatctatgtgcagggtcgtagctcaaaactactgccaggaccacatcaatttcatattcaccctgatcaatgtgtattaatggtgataactatgagaatgaaatgtacagttatcagtatcatttttgactcactaggtatatcctcagaaatatatgaaaaaactaaacacagcttttagtttgacataatttttaaacaactggagttaccttgggagaaaaatcctaccaaatatctataatattgaaagagtaaaaaagagttaaatgtccttaacatcattaatcattagggacatgcaaatcaaaaccacagtgaaataccatctcacaccctttaggatggtggtgataagaagaaaaacagagcataacaagtgttggccaggatgtggaaaagctggaaccattgtgcactgctgattggaaagtacaatggtgcagctgctaagggaaatagtatggtagttcttcaaaaaataaacagttataccatttgattcagcagtttcactcctaggtatataccccaaagaattgaaagcagaatctcaaatatttgtacacctatgttcatagcagcattactcacaatagccaaaaggtggaaacaacccgaatgaccctggatggacgaatggataaacaaaatgaggtctatactgacaataggatattaattgaccttaaaaaggaaagaaattctggccgggcacggtggctcacacctgtaataccagcactttgggaggccaaggcaggcagatcacctgaggttgggagtttgagaccagcctgaccaacatggagaaacctcatatctacttaaaatacaaaaaaaaaaattagccaagcatggtggcgcctgcctgtaatcccaggtactcagtaggctgaggcaggagaatcgcttgaacaggaagcagaggttgcaatgagctgagattgcaccatcacactccagcctgggcaacaagagtgaaactgcatctcaaaaaaaaaaaaaacaaaaaaaacaaaaaaagaaattctgacacatctgctatggtctaaattatgtgttcctctaaaattcataaattgaaatcctaacccccaaggtgatggtattaggaggtgaggctttgtggaggtgattaggtcatgagggtacaaccctcgtgaatgggactagtgccctcataaaaagaagcccaagagagaccccttttcccttccactggatgaggtcacaccaagaagttaccatctacatgtcaggaaataggccctcaccagacaccaaatctattggcaccttgatcttggacttcccagcctgcaaagctgtgagaaataagttcctgttgtttataaaccacccagtttatggtattttgttatagcagctcaaacagattaagatggcttgctacaacatagatgaactttaaagattatgcttttctatgattccacttagatggggtaccaagagtagtcaagttcattgagacagaaaatagagtggttggcaggggctagggggagggaactctggggagttagtgtttaatggatacagagtttcagttttgcaaaatgaaaaagttctgaagatggatggtgctgatggctgcacaatatgaatgtatcaacactactcaactgtacacttaaaataaggttcaaatgatacattttatttcatgtgtgtgtcaatctcaacaaacagatttgttcaggcaaggaaactggttagatgcgaataatactattagagcatcatcaattgaatattaacaaagtgctcatagtttaactttctagctcaaggaagaatggaccattttgaaactatgacagaacattacttatatagctgatgtctttgggaattggaaggaggcatattccttcaccagctgtggctccccttcagcaacctcatatactctccaagcttctctttcctgggtcacctgtttaatcactcccgggacttaatcttccacctatatgttgaccactcacaaatctatgtctccatctcacaagcttattcttgactccagacccaagtattcaactgcctgctgaatacgtgtggtcagatgtcatagaacttcagcttcagtatatcaaatgcaaacccctgttccccccaactgcctcctactccccactggccttcctctggcattccctcctcagttatgagcaccaccgtctcactagccagccagtcaagccccaaactccatctagctgacttctgcctcttcctcaccaccctcttccagtaactcatcaggcactgctgtgtctcattccttcctatccctccagtccctccccttctctccatcatggctgtcactgcatggttcaggctctctggctccccccaaaccacccccacattgctgccgaggtgaactgactactcttggcagccactggattaaaatctttcatcatcttcagcatgataaaacccatatcctttagcatgtaacaaggtcttaatgattctgccagagcttgcttgggggtagcctgcacttgtgggccactccagtcacttcacaggtgctcagtaaatctcagttgaatcagtcatcatcatcatcatcatcatcatcatcatcatcatcatcaatttttcagtctggttcctgtctccttttccagcatcctccattcatagcctcatagccttcactccagccatgtttcacttgtggttttcctgggcaagataagctattcctccctgtctttgcagagtttaaatgactcacttgttcaagtacccaccgttgccatgtgggaccgtgagcaaagtacttaatctcactaagcttcacgttcctcatctgtaaaacagcaaatatggacctcacaaaattgtagtgaggctaaaatgaaataacatatgcaaaagcagtttataaataataaacttactataaaatattattttgtaattctgcaagcttgtcttaaatgccatcacctccaaggagcctttttgccatcataagcagaaactatctctctcttcttggaagctccaccatgcacagcctatgggccctcatcacactccttgagttattcgagttcaagtcccgtgtttacaaccagaccgcaaactctatgaagtcagcatccattcctctctgtggttctccctccgccccatccaggtctcaagggtctagagtctttcaaagagaacacattctgagatttgaggaggcagagacaaaaagttccactgcgaagtgccagggaggcttctgtttggggtgtcccttgggatcacagatcccccacctggtgatgagtcaacccagcaccaccccattgcagggctggaatgacagtaatgggcccacctgctgcctctcctcatacccgcaccccagtcagacattgcaagtcagtcacggctctgtcctgctgggcctggagtgttccagtgccttttccatcacagcaccaagcagccactactagtcgatcaatttcagcacaagagataaacatcattaccctctgctaagctcagagataacccaactagctgaccataatgacttcagtcattacggagcaagataaaagactaaaagagggagggatcacttcagatctgccgagtgagtcgattggacttaaagggccagtcaaaccctgactgccggctcatggcaggctcttgccgaggacaaatgcccagcctatatttatgcaaagagattttgttccaaacttaaggtcaaagatacctaaagacatccccctcaggaacccctctcatggaggagagtgcctgagggtcttggtttcccattgcatcccccacctcaatttccctggtgcccagccacttgtgtctttagggttctctttctctccataaaagggagccaacacagtgtcggcctcctctccccaactaagggcttatgtgtaattaaaagggattatgctttgaaggggaaaagtagcctttaatcaccaggagaaggacacagcgtccggagccagaggcgctcttaacggcgtttatgtcctttgctgtctgaggggcctcagctctgaccaatctggtcttcgtgtggtcattagcatgggcttcgtgagacagatacagcttttgctctggaagaactggaccctgcggaaaaggcaaaaggtaacagttactgtctgtggtttaaaaatgaggtgtggagcaaataaacaggttggaagtgtggggtggggtggtggggtagggtggtggggcagggtggggggttgtgagcagtcagtgggcttgtcgccgattagcactgaagcagtgtttagctggacggcctttctgtgggcccctctgacagtgcccttcccaggaagatgtgtttctctgtcctcagccacatgaaaatcttttgcctaccgtgcctgtcaatccattgcctgcccgcccctcccccaccccccgttttacacctgcctgtccagtctaccgctctctagggcatccacgctgagcagtgggaagaactttaagccctgaagagcaggccaaaggcaagcaagaaccccctcgaacagcttcccagcttagtgaggccttatttcattgattctctgaggcacattgttttttcacatgttagcatttctgaaattgggatgcagctcacgatcaagtcacagtttaactggacacattatttttctttcttagtggtgcagaaaagtaacagtgtgtcttacaattgactgcgtcctagattctgtgagatgcaatacgttattaaccatcacgcacatttcctgaactctttcaatgagcagacaccagcctgggttagactggagccctaaaagcacgacacagattccaccctggactggcttctgttctgcctgggaaaacccaaagtacgtttggagaccaagagcaacataaagtagcataggtggaatagtccatgagaagtgcgagcaaaaggtgccggagatcagagaacaccaagactgtacttgtaaatgacaactgg

SEQ ID NO: 3992 - DNA, 6000 bp, Homo sapiens
acatgcttttaagctgattattttacttgtttttttccttacgtgaggaatctcctcctacttggttatcttttctgctagacttgcctttttataaagctgtctttcttgttgagcttcatatattttttccatattcaaaactttgagagttcatcaatacgttcaaactgatagagaatgtatattttaaacctgtaagtcattttctgagttaaagatacctatttgatgaactgatcatgacacacctaaatctttttggggggaggacagaatgaaatttgtaaataaacaacactgttaagattgttttatatccaattcaaatgctgacagaaaatcattcaaaccataaaatctgccgggcatggtggttcacacctgtaatcccggcactttggggggcagaggcaggcggatcacctgaggtcgggagtttgagaccagcctgaccaacatagataaacctgtatgtactaaaaatacaaaattagctgggcatggtggcacatgcctgtaatcccagttactcaggaggctgaggcaggagaattgctttgaacctgggaggtggagttgcagtgagccgagattgtgccattgcactccagcctggggcaacaagagcgaaactctgtctcaaaaaacaaacaaacaaacataaaatctggacataagtaggaatgatgatatgtttaacaggaaagggacttctttgttttactctgtacatccagagtctagcaaagaacccagtatctggtggacattcaagcatttgttgaatgaatgaatttctgttcatcaaatttagtacatatgtcaggtataaagagttacagaaatgaggaattaagagatgcttaagtaaatgataccatatacaaaattttaaatcacataaatattatattaataagaacataggttaagggttttcattttaaatgactttttgttactaaaataatacccacaattcatatttattatttatctattttgtcaccattgtatgtagataataaaataatatttactgttcatcaaaatgaaagttgaaaggtagtttgataagctttacgtttataaaaatagatgtctgctgaaaataccaatcccagtctaagacttgaattggaaggtttttctctaaagttacatttttcagaatactggtgctatgtgataactcatttagcaaagcttcttgtaagctgttctagacagttgatagaagtattttgaatgaccaggataatagattttatcatactgactttcaactgtttaattttggtctaaatgaactgttggactagtatattgctattttcacaaaatgcataatcatgactgccaatttttccatgactaactatacccagccagatgtttcttaggttctgctgagtcacttttttccttttcctccagaactctgtgttcctactaactcctaattccctctggccttttctcatactttgccttttacctgaattttgggtaatggtttcattgctctttttaccatttcatatgcataaaataagtttctctgaattattctcaattttacttgctatcatgtatcttaacctatctctttcctgggaaataaacattttgaggaatttgttttaaaaagttattcagcctctgtatgcaaggaaaactatcaacaacctcatcgcatgatgaagtatattctgaatcatcgtagaatccagtcttttaaaaaaatgctagctagtttccaaacttctgtatctggtttctgcttctcagctatctctcctcctggtgagattttctggtggtgcagagatagctaatcactggttagactgctagaacttgcggtcgagtggtgcctttccagtcatgatggatttgtattttcttaccaatctcagcatcatgaaacactcactgcctggcccctagaaagagttttcagtgacagatttcatctcttgaacaccagtgaaatatttggttgcactcatagttttataaagtattcattgactcaaaaggtattaagtgcctattatgtgctgataattgtggaaagggttgagagaggaaaaaaacagacaaaaaacccaatccaacaggaaagattaacaggtaaacacacaagtgagattaagtgaagttctcaatgaaaatgagtcggtaaaattggcagcaagtactataaaagtacagtggaagggctgaaacatctccgcagttattttcagacttctcatcaaccacatttcatcactggttatgcaaagggaattcaaactcttctacgtgtctccttgtctgtctatttcaaggactaaccatcaggatatttctgcctaagaacaatgagttccccaaactgcaaagtattttctatactttgtgtgcagtttttgtgcagttttgcacttttctgcactttgtgtacatgcagaacatttttgagtgcttatggatggattaattaatcattcatttgatggatttaccacccagtcttactttccttcattgggagtaggagaaagcctggtgatggaaggaaagcccccggggtcagaagaccagatctgcactgtgtggttaggcaagccagtttactcagatcagctggccacagggttctcatccataaaagaatgtctgtgaggttctcccatcctctgacatcctaaaatccaatgagaaagggactggtcaagccagagagattattgttatagtttagtaactttttgaacttctcagagcctccaagatagatcatggaggagggaactgttaactgctaagcttgactttactgacaggagtaaaaaaaattgtgttaaggttagggaataattttaacagtcaatttgttcttgtgaacaaatttcaacagtgaaattttagatatgtactttttaatggtgccaagcagcagttattatagatcaactgctgtttggcaccattaaaaagtacacttcgcaccgtcaaaaagtagatctggccacaattagatcagtcagggaaaaacacttcgcaatgaaatattatttaccacgttttcttcctccctcttcttgaaaatagtaatgattttagcatttttaaatcttgaagaatgtcattccgtactgactaaaaagcctgtgcaaacacccaacatcttctctttcctgtctattttaatggatatacaaaataaatattcatctaatttatcaatatttaaggcacattgtgtatcacaatccaatggtaaacatttttcttatcaaatggctgatcttgacattgtttaaagccctatatgatttcagaaaagtcagtgactccaagtggaattgcaacaatttcttgggtcttgtaacaaacctgaagtgtaactatttctcttcagctaccttcaatcccagagagcaaagaatcacatcccaggtggagctgaagatctcttagggaaaatgactcaggctagagcctgcataaaaagaggattgcatggcttagttttgcaaacataaattttgtgggtttcagagctggcagagagctcaaagaggaaatcatcaagggcaactttctgcttcgaggaaggaaagtctacaagggctaaacctggatgtgctatttcagttcaggcaaaggaggaaaattaaaattttgcacagttttattctgttaaaacaagtggttcagtaagctaaacgagatatgtatatagtatgcattaaaatgcaagactgacttccctgggaaaacgtgggaaagaaggagagaggaaacaaacaattcttacactaagaattctccagtcgtgtcttgcaggcaatatagagtaataataataaaaatgacaggagatactttgacaggatggcttaaaatgccactcaatagatgaagagttgttctcatgcttggcaagtttacagcaaagcccagaaggagaagccagaaaataatttagaaaaaccaaagcttaaaactagtggcacacaactctggttacatttttcattttcatttttggttcctctgcatttcggtggaactcagtcccacagatgtcttcttcaatgtgggaaccatcctttctggaaccacagagctgcagatgtcacgctggaattctcccagaggcaaactgccagatgtgaggctgctcttcctcagtcactatctctggtcgtaccgggcgatgcctgagccaactgaccctcagacctgtgagccgagccggtcacaccgtggctgacaccggcattcccaccgcctttctcctgtgcgacccgctaagggccccgcgaggtgggcaggccaggtattcttgaccttcgtggggtagaagaagccaccgtggctgggagagggccctgctcacagccacacgtttacttcgctgcaggtcccgagcttctgccccaggtgggcaaagcatccgggaaatgccctccgctgcccgaggggagcccagagcccgtgctttctattaaatgttgtaaatgccgcctctcccactttatcaccaaatggaagggaagaattcttccaaggcgccctccctttcctgccatagacctgcaacccacctaagctgcacgtcggagtcgcgggcctgggtgaatccgggggccttgggggacccgggcaactagacccgcctgcgtcctccagggcagctccgcgctcggtggcgcggttgaatcactggggtgagtcatcccttgcagggtcccggagtttcctaccgggaggaggcggggcaggggtgtggactcgccgggggccgcccaccgcgacggcaagtgacccgggccgggggcggggagtcgggaggagcggcgggggcgggcgccgggggcgggcagaggcgcgggagagcgcgccgccggccctttatagcgcgcggggcaccggctccccaagactgcgagctccccgcaccccctcgcactccctctggccggcccagggcgccttcagcccaacctccccagccccacgggcgccacggaacccgctcgatctcgccgccaactggtagacatggagacccctgcctggccccgggtcccgcgccccgagaccgccgtcgctcggacgctcctgctcggctgggtcttcgcccaggtggccggcgcttcaggtgagtggcaccagcccctggaagcccggggcgcgccacacgcaggagggaggcgacagtcctggctggcagcgggctcgccctggttccccggggcgcccatgttgtcccccgcgcctacgggactcggctgcgctcacccagcccggcttgaatgaaccgagtccgtcgggcgccggcgggagttgcagggagggagttggcgccccagaccccgctgccccttccgctggagagttttgctcggggtgtccgagtaattggactgttgttgcataagcggacttttagctcccgctttaactctggggaaagggcttcccagtgagttgcgaccttcaatatgataggacttgtgcctgcgtctgcacgtgttggcgtgcagaggtttggatattatctttcattatatgtgcatcttcccttaataaagagcgtccctggtcttttcctggccatctttgttctaggtttgggtagaggcaatccaaaagggctggattgctgcttagattggagcaggtacaacgttgtgcatgccccgtatttctacgaggtgttcgggacggcgtagagactgggacctgctgcgtactggcaaagcagaccttcataagaaataatcctgatccaatacagccgacggtgtgacaggccacacgtccccgtgggtctctgtggaagtttcagtgtagcgacatttcagataaaagtggaaaaagtgaagtttggcttttttcatttgtatgcagtcctaactcttgtcacacgtgtgggatttatctttttccataacttactgaaaacccttcctggcgggctgaacctgactcttc

SEQ ID NO: 3993 - DNA, 6000 bp, Homo sapiens
attttaggtttttgttttgttttgaaacagagtattactctgttgcccaggctgtggggcggtggctcaatctcggctcactgcaacctctgcctcccaggttcaagggatgctggtgtctcagcctccatgtagctgagattacaggtgtgcagagtttttctgtaacttgaaaacaaacttaaccgtagatgatacaaaaccacattgttacactatgttaccttgagattagtcagttactcaacaataaattagtaaatgaaaaataaaatactagaaggaagggaaaaatcacatagaatttctaccattttcctcccaatttctaagagtgagagaatggaatttaatgttttgtcattgctgtttttccttaacggggtagttaccatttttagtataggtagtgtaattccatacattaattattccctcattctttcatttagcaaatatgtattaagcatccactatgtgctatgtactgaagtgcctgcataagatagaaaagatccctacattaatacagtttacgttctagtgggaaggtgaaaggtagcagatatttattgaggggaaaaacacacaacaactacctattgttccactgaagagacctactcatcatctaaaatataaatcaactataattaagttcttcctttaaaatgaaggctctgaaaaagaaccagaacaatttaacatttgttaaaattagatcaactgcttctatgaacctttatttgtgaagtgagtgttttattcacgtttcagtcctctataggaaaaaaattcttggttatttcatgttctcaacaagttgaaatttatttttacagaatgaaattcaacaaggaattgactaatacacaaaatgagttttggaagaaatttaatcaaggaactgaaaagctaatataacctacaggaacacagataatcttctggtcatataaagaaattattgatcagtcaacaaaaggaactaaaaattttggtgtctaaataaaacacagaaagccagattattaaaaggccagagaaatgcctaaatctgcccaaatatcaatgacaagagatctgtattaaaaattaatatttaagaataattggttgtagatctggagattaacataaataggcatgagatgacggatacgtgctaaatgaactaagtacaacatgcactggagctagatttcaaatctagctagaagacataacacaatgaaaaacagtatataagctgcactagtaaagaaaagcaagtcccctaagggtaaaagaacaagtcgactacaactaatgtttttgttatgcactgatgcatactgacttaaaaaataatggttctggtaatctccccaacagatctctacagatcaaaagagttactatatacttaactttccatgaaaggtggtttaggaacttcaagtgtgaatctcttgaatgagatatttcacagagtgacttatgtaatggaaagccatagtgaaacactgcaatagaaactatctgtagcaaaatatgcatatataagctatgatacactcttgatacaaaatatgcatatacaagctatgatacactcttgatacaaaatatgcatatataagctatgatacactcctgatacaatcagcacatatcccaaaattaatttggcataatttaggaagagaaaaatgtaaaatatactgtaaatattatatatttatgataaagtatgattattcaagtacaagtgctttcaacatctacagtatattaaagtgtgttaatactatgggattaaaaaattaatctatgatggggtatccttcaaattaacacatctgattcccaaaggattcaaaatggttattacatatattaagatttcattgtgccaatatgcctttatacccaactgttgactaaaccaataaccttcataatctgctggttattgagtattttttatagaactgaattgacggttgaattgaaagaagcccaagcattatataaaagtatacatgtcacaaaacctggtgatattacctgtcaatgtttgatctcaacagaagatcaaggacagcgattttctctgaaaatgggtcttaaacaacagagactaagtctatttaataaatagaaaacaggttcttaatctagagtccaagatttagtacagggaacccaacaacatcctgaagctttatgtacaattctgagtattggctttcatcagatttttgaaggagtatgggatctaaagacagaattagtacacctaggagtgtgacagtcttgttagcagaacaacttcataagaccttaagttactcaacagcaaatacctgaataatagtaacttcactgccacagagttacacactagattttcctcctcctaaggatgtttcaaaaaaaacaaaaaccctcaaaggtgccaccaaaacccaagaaatgttgtttctagaaactatatgggatttttacatcgcagttaagactacaggaaaatcatgagacagtttcggcattaaagagagaagagaatgacacatattcctcccgatatcactttataaaacctcccattccaagccccaataacaaactaagtagaacatctcagatatactctctcagaatcttaagggtgaaatccaaatgccactcccccccgagagaggcagcaaacaagtttctcccaattccaacaaagtgggtaaacctaaggcctacaattagaaatgaaagattctgcccatctgctaaaataaggaggggcttgtcagtcttgtctgatggaactggaggggagcgtgacaagagaggttgcacaggataggcccagatcttactcaagaactgtagccctaccagattggtgtgggtatgagaaagcaactcagcagcagaggtaggtaacaaaggtaggacctgaacctcctagtgaggagctacgtggcattaagcaaacagtgcttcgtctccctcacacccagcttccgcccaaaccattttcccctttggttaccagttgctccagatgccgtagagtagttccacaaaagcgaaagagaggttcaggcacaggaagaaaaacaggttccgggaagtcttgtcggacagtatagacctgggaatgatacacgtggaaaagagccgggagagttaaggaggtgccgggaccccgaggctgggtaccctcttcaagaccctcccagttcacatgctcctttcttcacagctaggggttgacggggagtttttgactctccctcactggacctcgggccatcctgaggtctgggccttctccctttctgccggacaccccctccccgcaaacacagcaccccgcacctaaaccagcccgagatcttgccgaacaaattgaacttgggtggtttgtattcatcgtctttgatggacaggggcaacatcttctctgcccggcgaagggccgggtctactcccctctagaagtggctccgtggggtgatggcagtgacagtagtgacgcctcaaacgggaatccccagcgcttgtccggggccgcgcgccgctgcgagacacagacagacacagacacacacccgggaattcgcttacttccggcccgggccgcgcaacgcgtcctgggacaggaaaggagggaggccggtcgcgggcggggcctgcgcggcggagggcgtggcttgcggcgggggcgggatgagaaaggtgctggagctgttggagggacgccaggaggtggcaactaccagggggtgtgaggggctgacctgggatggaatcctgccacccggactcaggaagaaaatcctgaggtggcgacctgcagactgggctgggagatggagagcccgctcacgcccacccgaccgcctaccaccagtgttcccggatgcatgggctccagcgcctgccctttcgccatttcctcccaactggcattaaatcctggtgtggtagatatcagtgattaagagtctaggcagccacgtgttctattgccgccagtccgcaggaaacgcaagtgatcgttttgctgcgttaactctatgggcgcccaaatcttaggaatccattccacgccaccccgaaaacagcgcttgacccttctggactgccacgcaggaggcgatcaatgtttttctttctttatttttttaagagacaaggtctcgccctgtcacctaggctggagcacaatgaggctcactacagcctggaactcccggacgcaagtgatcctcctcagcctccggagtagctgagacctcaggcgtgcgccaccatgcctggcatcaatcaatgtctttcaaaataaaggctgttaaacgtagtataggaaagaagctttttaatggtaggttctaccagacgtgtttgtttgatttttaggtttggttaatgcattgtttcccgtacaatctcaacccgcggaaaccccgaaactctagaattcgtgccggtctctttcgcttccaggtcatccccggggcaacggccgccgctctaattcttgtcagaacctccaggccagtttcagcaacgtgcaggcagaagctggcccctcggtgggatgcgagggcgtgtggagcgcggggaggagagccccacaggcctttcctgggcacccgcggtggatgggaaggctccttcgggcgcctttcagggaagttgtttggctgagggaaggtggtccgtcacgtgaatgtttaaaagttgttaccttggagaagaaatggaggaaaggattggctttcggaggtgggctggaaactacaaaaccgagcttcctgggaatgccttttaggccgacaggaagtggagcgtcaccgaaagggaggggcggccactcggggactgtcccttgctccaggcgctcactttgcgggcggcactttttccaggttgttaatccagctaatggagaaggatagatgcacgctacttggtttagaaaaaaaaacaaaaatgagcaaacgagacgccccttccgttttatgataactaagctgcagggaaataaatcggctggccctactgcaatctactgcactcgaggtaaggagacacagcaaaatgctccagtattagtatttttctttttgtagtgaggatatatgcatgttttgctctcgttctgagaactttgtgtgtgtgtatggagtattcggtggttttatttttgaaaatatgtacttattctacaattttgaaaaatgttaattaaaactgctgtgtaaaaacagctaggtttcagaagtaagttctgggaagagtattttgtatttgcctttgttagcgtatatttcattcttttaatttaagtgtagaaatatttaaaattagtagcatttactctttttttggaaggaagtttttgtattagcagtagaccttgaattttactctactgcactgctgaggaaaaattaattgggtgcaaactagatagtttaaagataaataattctatggtaattggatttttctccaaaacgcccttattcaatatgatttaacttgggagaaggcgggagaagtaatagaaataattaaatttcagcaactgatttccagcataatcctaactcatcaaggtcagctgcattttgaacttttttgtattctgcctttgaaaataagtcctatattttatactgtattgctacaaatcagaaatcgcttaagtggtttatggagaaacctacattacctcttttcaaatagttttgaaatgggtacgagaaattgaagtttaatttcagttacatcagtttccagagactcccaaattcccccactccccatcccccaagatatatgataggtattcccatgaggaccttctcctttcaaaaagtgatggtgatgtcttcacatctttcagtcttaaagagcataatgaccaaatttaaaactaaaggcattttatttgcaatataaaagtgtaggtggacactatttaaatcaggaaaagttctatga

SEQ ID NO: 3994 - DNA, 6000 bp, Homo sapiens
ccaacctgggcaacagagcaagactccgtaccaaaaaaaaaaggttgtctgtgaagggccatgacctggaattgtgcatgtgtggaagagaagagcactgggcaataggtagggtggatctctgaccaagtcatgttaagtatgttcaaagtgaaaaattgagctatggtaatgggctggttttgatttaaatgaagcaagttacctgtcgggcatggtggcttactcctgtatagtcccagcactttgggaggctgaggtggggagatcagttgaggctatgaattggagagcagcctgggcaacatggagaaactccatctttacaaaaaaaatacaaaaattagccggatgtggtggtgtgtgcctgtagtcccagctactcaggaggctgaagggagagaatcacctgagcctgggaggtcaaggctgcagtgagccatgatcatatcactgcactccagcctgggtgacagagtgagatcctgtctcaatttaaaaaaaaaaaaaaaaaaaaaaggttatgaggctgcatccaaatctgtagcactgaactacctgtggaactggagatgtgtaaagaggaaacctcttgataatgaaacactagaccagcagcatgacttcagatgctcaacagcaggcccgtttcccaattcgtaataggagaggtcaagctggatcacctgcagtccctcctctctgctgttctaagggatgagggactgacaaggggtgggattaaggagatgatgggagaggagtgtgtgagtgtgtgtattggtaagggggcgagttcctccttctgtgcacccttgtcctgggctcctggtgactctcctcagagtgttcgtgtgtgtgattgcacaggactcccacccacagggacacagcttgtcctagaatccagctctgcctcctctgggatacattgaaaacacacactccctatttcccacccagaagcaggtaggtcacatgcaaacagtgatatgataaggcttatttataataatatataaaaaattaagtaaacaaataaatcttggtgtcatataatggcctgcctggttcttctgacacagcttcttcccagataatggccctgttctagagtcattcagcctactgttacagtagtctccctttcctactccacccttaagccccaagacttgtgaacagtggtagtgtgaagcaatcatacttgatctaggcagttgcccaggcttccagtgtaactttgacatttaaaccacagaatttgaaggttcaaggcagttggagctaagatgactctctgccagctataatattctcctggtaacactgagatggttcatcttggggggttggaaaagagccatcattaagcgcatcaggactgcagatcattcacaaagagatgaggggaatgagtggctgccttgacctcagtcctaggatatgcatgcctaaaacttttgtgtttgtgttttaatttctcaagaattccaagtcaaattctgttccaattatcctggccatcgtgggattgatgctggtcacagtcgtagcaggagtgctcattgtgaagaaatatgtctgtgggggaaggtaaggaacacagaagtcaatccaaggtactgagttcaagccagaaggctgatctagggcatatggctgagtctactcttggcaaaaactaggtacttgcagtactgttcctgaaaaatcaggcccaaatcttctcatgtcgtacatttttcatatgtcaaccatggactgtgctttctgtgtctgtgatgcgttcctgagtgtataaaactgagaaagtccacagtcctgtaagaagtgcacccctgctgtgtaccaccgagtgttaaggaggtttctgttcacaggttcctggtgcatcgatactctgtgctgcagcagcatgcagaggccaatggtgtggatggtgtggatgctttggacacagcctcccacactaataaaagtggttatcatgatgactcagatgaggtgaggctatttcttcttgaatggtagtacccccccccccaaaaaatacaagaaaataaagtctgtcttctattcatgatcaagatatgccagggccaaggcgacttaatgaccataagatttggcaagcccagaaactaggtgattgcttttgaaataggagtgttgtggtctgtcggtaatatggtgcatgtctttttcaggacctcttggaatagctcttcagaggagctggacccagcatggatggtggaaccacagtacctcttacactccctgtggctccaacttcaggaaataaatttcccattgcgagggacccagctctgtttctgctgcttccatcaaagccaaaaggacctacactaaagaaatgcagggtgggggtggggaaccctgagcacttttttacaattggctctgagaaaaagggagacattttaaattctttaacttcttatttctcgtcctgtctctttgcaaagtatgggcttttttgtttttgttttttaagggaaacgaaatggaattcgaagggaccttttcactaaccccacttctgtgtgttctgcatggcgcctgccccagggcatctgccaactccagtatcagctctcacagtgtacttggtaccatccctgggctctgctggcgagacgaaacagctgtagagatgaaaacaggctgcagaggctggcacagcctggccggcttttctccatctggggacagtcctactccaagaacactgcacaccagctcctcacacagatcccacttactctttttttttttttcagagaccacagaccacagtgatttttcttttcccttgtttaattaggcaatacccttgttaattgccctttggcaactaacttaaccatgtgcttcccacacagtacatcaggaaaacttacagggcaatatttttaacttggggcaggaagaagggagcagcagagaattgactagatatagcacctattaaaagagaactcttgcttcttctgagatttttcaagctgtgctttgtgtgtgtgccagtagacttacgcaaggacagggtacaaacttagctggaagtctgcccaggctgaatgatctcttccctagagttgattgtcgggtacacagtgtgaacccccgaagacggaacctcacagtcttccatgttcccttcttaactgtcgtgtggctcgttgctaaatcatgacaatggctgcctatctgctgcttcttaggttgctgttgtacatggaaccaggactagagattttttcagatttatagacttaaaaaattagaattttattaccaggctttccttctcaccccttttttctgactttgccaagtaatttgttgacacgaaaattttggaggaaccaattgaaaacacacttccagtctagatgatgctttgtgtgatacattaagttcttattttggattaaaagaagttttccatttgatacctctctaaattaaataaattatagaatgtagttgggtggattttggggtggccatatagtaatggaaagctgcaataattagttttaatacagcttgaatatttgctatatagaaatatagtatggaaagtttttggtcttaatgtagctactgtgcgggtcacagtttctcccaatgattatgactgggacattctttggtagataccatttgctactagtttattttgtggctagaaagtcagttttgtgtgtttttttttttttttatttgaagtgccaaattaactttagtcagaatgtgagcagatggctaagttctctcctccccagaatggattaacagctgcgtggaaagtgggggagagagtggatggagacttttagagatgttaaaactgcagtagaatgaaatgagtcagggagcttcagttagaaaataaagttgaggcagtttttgtgaagataatatggttagggctggagtgcactagtctttttgcttattcattttgcatggttttaaaattaaaaataattccgaagatacaccagctcacaaatgaaaacgtcagcctctgccccaccctccctcctgcccaaagtgaatttggtactcagaaaagaactgtttataccactcacctttctcccagcatgtactcactgtgggcagatgcaccaatacatggtaatcctcttactcattttaagacgtaggaaactcaatattcttctctaaccatatacgatagggctcttcgcttttaatgatatctgggatttctgtggaacttggcaaattttcagagcaccttcactcacataatgtcatttgaacctcacaatgttcttgggatggagtcagttgttcagggtccccgtgtgtgtgataagcagtgctggctggctgtcttcagaactcttggaaatctttacacatgcgagtgctaaccactttgagcaaggctgccttcttgtagatgacttgctgttctttatgacagggatcagtggcatttgtttcctagcagtatttagcacctttttgccaccttggtgaacagaaaattgtattttcctgtctttcatggctgaaaacaaaagtaatgggaattttaaatacgtttgcagaaactgcccctcccctcattgagggtcactgctcaagagtgcaggagtggactctccactgatgggtctccctccccatcctggtttccaccccgggctggctagctctgttggtttgaagactgacagccagcctggctcattctcattattggctagttagctttctttatcaacctgctcactcacaaatgtgtgccctcagccagagagtaagaaagcccaaatctgttacagcttctaaaaaaatagatttctaatttgtcctactcatgttaggagcattatctttgaaggtaaaacatagtgtatcattgtgtaaactcccaggcttgatgtagcagaagagatcatttctggaggcttcagcaatggaatttagcattataagagagattggacaaaccagtccaaagtggtccgagttcttaaatccaggtagggaactcactcttctttcttctctggacctaattgggcattgggctttagtgagaccacagaccaggcccgtctctcctgtaggcttttaattcaatggcaactctatttcaaagaataaaagcctttggagagttgcggcagttctgggggcgggctcaggagagtccatagatcagccgtaactggaacgtagaatctacgtctgcctctgaatggacttcccacctcctctctcttgctctgatgcttgcctctgggcctctccatgcccaaggtggtctttcatccttgacaggctggtaatgtgctggccacctccagctcctgcatcgagtctgtaaaccagagctggttctcatggccttcgtcacgataccaggatacggaggggagcccagggccatccatacccaccccagggtaacggggctggcctggcattagtcattatttagtttccaggccaaccatccagatagagattccctctttcctttgagcagtgctctcaagagctccgtgcctgtccacaatgacctagagtgcatcctgctcattgtcagtgtagcccctcgcccctatattcatccaggatacttggaagtgctaaaataggaagggattcggctttcaactttgctaccatcttccctgaagcaggaaaatgaacatggacttaaatgttctttgaaaaaaccaaagttttaagatttgctgtgtgatgaagtgacagggagggccggagtcagcaggtgccagactttctgttctgtctgccatgggtttgtccagctcaggtagctctaggagcaccatcctgccctagcagagcccaggccttgccctcatgaagcatcattgaaatagcaggagcatgttgatttcttggttaggttgcattataataacaagagtcagaacattaattcgaaacaac

SEQ ID NO: 3995 - DNA, 6000 bp, Homo sapiens
ccatctgtactaaaaatacaaaaaattagatgggcgtggtggcctgtgcctgtagtcccagctactcgggaggctgaggcaggggaatcacttgaacccaggaggcggaggttgcagtgagccgagatcgcaccactgcactccagcctggagacagagcaaaactttgtctaaaaaaaaaaaaaaaagggctcaacctagtggtgagggctaaaatattagccatttaagcaattcataacaaaagactcatctttattgctacccacccccaaatagcctaatttttagaggccccccctttttggagacatccaaaaaaatacaaagttgctaatatgagtaatactattgggatctccacaaaatacaagaatacttaaaatatttaaatttttaaattttttttggagacagagtcttgctctgttgcccaggctggagtgtagtggcatgatttcggctcactgaaacctctgcctcccaggttcaagcaattctcatgcctcagcctcctgggtagctgggattacaggtgtgtcatcacaccaggctaatttttgtatttttagtggagacggggtttcgtcatgttggccaggctggtttcgaactcctggcctaaagatctgccctccttggcctcccaaagtgctgggattacaggcgtgagccactgtacccggccagaagatagcttcttaatagggtgtcttccctcggcattctccgctctaagtcttttttcttttcttttctttttttttttttttttttttttttttttgatacagggtctggctctgttgtccaggctggagtgcagtggcatgatcttggctcactgcaacctctgcctcctgggctcaagccatcttcccacttcagcctcccaagtagctgggactacagaagcatgccaccatgcctggttaatttttgtattttaagtagagacagggtttctccatgttgcccaggctggtcttgaactcctgagcttaaatgatccacctgccttgacctgctaaagtgctgggatcacaggcataagccactgctaccagccttctccactctgattctgatggctagtattagctattaagaaagcaaaaaatacttgtagtgtggagaaaaggaattcatccagtctcataaactgggagacacatccagctgcttttgctcaagtgctgagctaaccaaacaacctctcaaattgcatttaggaatattgagttggtccattccagcaaatggaaatacatactcactaaataacctgttgctatttatcttgcccagatcttcttttgttgtgaattaatagttgttccggtctaaagagcacctgtgggaaagttattatgagtcaattatctaaaccagtgccatcatgaaactttctgtgacaatgcgttgttcaacagggtagctggccacatatggccataaacatttgaaatgtggctaaggaaactgaagaagtgatttatatttaattttaattaatttaagtagccacaaatgctgctggctaccaattaggcagcacaactctagatccttgctacttaaaatgtggtctcaaagaagcattggcatcatcttgttagtttgctggaaaagcagaatctcaggccacaccccagtcctggtgattcagaatctccatgattataagataccccgctgatttgtctgcacattaacattttaaaaggatatggttagtttatatttttatttatttatttattctgagacagagtctctgtcacccaggctggagcacagtggcatgatctcagctcacggcaacttccacctcccaggttcaagtgattctcatgcctcagctacccgagtagctgggattacaggcatgtaccaccacgcccagctaatttttgtatttttagtagagatggagttttgccatgttggccaggctggtctcgaactcctgcttcatgtgatttgcctgcctcagcctcccaaagggctggaattacaggggtgagccaccgcacccagccaaaatgattacttttaaaaggatatggattagctgaaaaaagagactgattaaagaacatatcgtgtggtgacccttccaaattgtagacacccactcttgaaactggtatccatcataaggggcctttttctttctatctgtctctctcccacgccttggacacagcagaaagaggaaagggaggccgggcatggtggcttacacctgtaattccagcactttgggaggccgaggcaggcagattacctgaggtcaggagttcgagaccagcctggccaacatggtgaaaccctgtcattactaaaaatataaaaattagctgggcatggtagcaggcatccgtaatcccagctacttgggaggctgaggcaggagaaccacttgaacccaggaggcggaggttgcagtgagccaagatcatgccacggcactgcagcctgggtgacaacagcgaaactctgtctaaaaaataaaaataaagaggaaagggagaggagagagcctggaacaacactggggtgaaaagaaaatatgcaacatgcagatgaggggtggggtgagaggagcatatgtttctcaggaatatttgtacaaaataaaatgatgacatttctttaataattattgaaatgggtgatgggtatatgggagttcattgtactattcacttttgtgtatgtttgaaaattctcaaaattaaaaaatagatgtaacttcagagatgatgtgtgtgatagccagcctccaagatggtcccaatgatcctctcttcctggtatttgtgcccttgtgtagttcttccatattgaatcaggaattgcatatgtgaccaaagtggaggtgatatccatcacttcaaagagccagatcactgtgacttctgtcttgctgtctcttgcatctcttgctctgagggaagtcagctaccgtgttgtgaggaaactcaagctgtcttgtggagagacctttatggataagaatagaggtttcctgccaacagccagccacatgaatttaagtgagcctctatggccccagtgaagccttctaatgactgtagctccatctaacgcataactgcatgagaaactgccaagccagaactgtccaccagactgctcttgaatctgaccaacagacactgtgaaaggcaataaatgtatattgctgtaggaagtcactaagttttggggtaatgtgattatgcagcaatagataactgatgcaatgtgatttcaagattcttcacaccttgtcctccaaaaagattaccctcctcatcttttcaatgatgcctgaaatgaacagaacagaacatctttctcttttttctttctttctttctttctttctttctttctttctttctttctttctttcttttttttttttttttttgagacaggatcttgctctgtcacccaggctggaatgcagtgacacaaacatggctcactgcagccttgacctccagggctcaagtgatcctccgacctcagcctctcaagtagtgggcaccacaggtgcgtgccaccatgccttttttttttttaagagacagagtctcaccatgttgcccaggctgctctcgaactcctgggttcaagcaatcctcctgccgcagcctcccaaagtgctgggattacaggtgtgagccactgcaccttgcagaaagaccttttcacactatgcataagattaacacgctaatactccttgaagagataatatattcactaaaattcatggtaaaacatgtgacagatataaattctttttaaaactcttagcaagctaatctactgagacattaatttcagtcttgatcttgctgttataagagactggaacaaataaaaaggtaatttcttatggtccaccatctcaagaacagctaacatcttgaatgataaggtctaggctcttcctgcatctctctctttcctcacccccaaacccaaacaacatacactagtaacagcttcttgttgtttcaggggccaccctaaagaagaaacccctccacctccaccactggccttcatcttgaggattaggtaacagagaaactatgttgcaattgctccataaggggagtggggagctggcactggtttaggaagaaggcaagtggccagacctaagggctgaatgacttcctccgggctgggaagggtttcggagtttccaggaatggaaattgtccctggcttgtatgcagtccgtgtgtgtgtgtgtgtgtgtgtgtgtgtgtgtgtgtgtgtgtgtagcaggtggagtggggagaggtgcatgaggtgtctgtaaaggggtgttctggggcctgggctcaccaaacaccccctttcccctcactcctgcgcagctggcttgcaggctaaggagctgtgcccttcagtggtacctcaagggtcatgaactagtagcatcaagacgggggtggggtggggggaacccctcccccaatttttgagaccccacagccacagagagaagggagggggaacctcagaatgtgactaatgaatttcccgccaacattggcaggcgggagctgagccagatttcttcaatttgcgaaattaaaagacatgtgacgcctcttgcccgagtaggtgcagcgaattcactttagttagacttttcctgagagccggtctgtgtagcgagaagggtgctgggagatgggggaatgggggatggaggaagttatagcggagcctaaggggccagtgccgctcttcctgccaattttcgtctttagctcagcgtccggagctcgctggttgagggaacgaccccgcgcgcgtccgcccggccggctccgacacaaacacacgcacgtgcgccccgcccccgccgcgcgcacgcgccccgaggctccggcggcggcgacgggcgcgcgcgcggtgctcgctgcccccacgccgctccctccgctgggatcgctgcgcctccggctccccgcaccgatccgcgccaggcctgcggacctggaggcagcgaccgcggtcggtgggctccggcgggctcagcggtcgaggcggtggcagggtgagcggagcggggccccgcaagtccccgggaggcgacggtgccgggcgcgggcccctgcgtaaggtgggcgcagtgacaggccggccggtgaggcgccgccgggagaggccgcgacggagctcccagaccggccatgggctgagacacgtcctcgccgagcaggtgcagtgaccggaggccccggggggagcccgcccctacaggccccggggaccctcaaccccgaccggacgcgtcctacccagcccggtgccctgttgaccttccctcagctcctcccaaaaggcacaccgaccccacctccaaaccctgcccgtgccatccctgtgactcccagcagtccctgccatcctgtgcatacctgcagcctgcacccctgtgaccccagcccagtaggccctcgggccacctcctcttcggccgatatttacagcccactgcctgcacagtgcctggaaactacccagcatctctctctcctagcccaaagggggtggaggtaagggtgggaggggaagtgggagagggtgtccttccctctggagtccttggtgaccacaaacccatcctctttctctcaagtgacccttccgtaccccaccagaacatgcccgggtgacctcctcccagatcttccttgtggccttcctcgcccactccagtgacactatgcacccccaccgtgacccgagaggcctctggctcctgctgccgtccttgtccctgctgctttttgaggtggccagagctggccgagccgtggttagctgtcctgccgcctgcttgtgcgccagcaacatcctcagctgctccaagcagcagctgcccaatgtgccccattccttgcccagttacacagcactactggacctcagtcacaacaacctgagccgcctgcg

SEQ ID NO: 3996 - DNA, 6000 bp, Homo sapiens
ttgtaaatgcaccaatcagcactctgtgtctagctcagggtttgtaaatacaccaatctacaccctgtatctagctaatctagtggggatgtggagaacttttgtgtctagctcagggattgtaaacgcaccaatcagcaccctgtcaaaatggaccaatcacctctctgtaaaacagaccaatcggctctctgtaaaatggaccaatcagcaggatgtgggtggggccagataagagagtaaaagcaggctgcctgagccagcagtgagtggcaaactcgtgtggtttctttccagactgtggaagctttgttctttcactctttgcaatgaatctggctactgctcactctttgggtctacattgtctttatgagctgtaacactgacggcgaaggtctgcagcttcactcctgagccagcgagaccacgaacccaccagaaggaagaaactctgaacacatctgaacatcagaaggaacaaactccagacacgccacctttaagaactgtaacactcacggccagggtctgcggcttcattcttgaagtgagtgagaccaagaacccaccaattccgggcacactgggattataggtatgagccaccacgaacagcctcccattgcatttagaattaaaaagttatggctgggcacagcggttcatgcctgtaatcctagcactctgggaggccgagaggggcagatcacttgaggtccagagttcgagaccagcctggccaatatggtgaaatcccatttctactaaaaatccaaaaaaattagctgggtgtggtggtgcacatgatcccagctactcaggaggatgaggcacaagaatcacctgaacccaggaggcggaggttgcagtgagatgagattgtgccattgcactccagcctgggctgtgactgagcgagaccctgtatccaaaaaaaaaaataagttctaaccatgacctcccaacccctgcataattcaagccctgctaaccccttgggccacatctcatgccaccctgtgtctaccacatatccccctctggcacagcgtctggcacataggaagcaattgtttttattgaatgaaataaatgaacatacattctcatttattcttcacagcaccctttgaggtaggatataatgtatccaatttatcaatgaaacataagatgtgctggaaagagcttgaggctggaaaaggctcattttctagtctgtacagagccaaagctgaagtatgcttgtatgagggagtcccaggacacttctataatagttaattttatgtgtcagcttggctgggctatgggatgctcaggtatttggctagacattattttggggtgtaaccgtgaaggtgtttctggatgagatcagcatttgaatcagtagactgaagaagactgccctccccaatgtgagcggaactcatgcaatccattaaaggcctgaatagaataaaaggctaagaaagaatttctcactgcctgactgtcttggagtcgggacatcagtcttctcctgactttggactcaaactcagaatggaacttacacaaatggctctcctggttctcaggccctctcagactaaaacttacaccatcagcacttctggttttcaggcttctggactcagactggaactacaccatcaactctcttgagtgtcccgcttgctgaccagagtgcaggcttttcagtctccataatcatgtgagtcaattctcatagtaaatcaaccttaatatctcctcccccatcactggttcttgctctggagaatattctattctttctcgagaacccagactcattcaacccctcaggtttgataattcactaggatgactcacaggactgagcatttagttgttgtacttacatggtttattaaagtgaaaggatacaaagctgactcaacaaaggcaaaaggaggatggggcaaagtccagaagaaaccaggcagaagcttgcaagaattcttctatcagtgaagatacacaggatgcagttaattcctccagcaatgagttgtaacaacatgtgtgaaatgttgccaatccagaaagcttagtagagactcagtgcccaagggggctggtcaccaaagtaccctctctgcctagcacatatcaaaattccaagctcccgaaaaaagcaaatgttcagcataaaaattgtattgtttacatagtttaagcacaatgattcactattatcatttaaggaatggtaggaaccctcctgaaatctaagttcccagttgccagccagaggccaaccatgtaaacaggcctttcaaagaataggaatctcaggccagcgatgttaactcttttctgaacaaggattgaatgagggcaaggagagagtcaactaaaaataaagtatcttaattctagttggtaaagcttattaaagtctaaatccataagtgttaaaaattattcctgggctggctatgtttgacactgggatgggggtaatagtggtgattgccaaatcatgctgcattcttgctgaatagctttagggccaagagttaaaaggttagaagttgagggaattgtttatgtttcgttaaagaccctacaagctttattaagacaattgggtacagatgccaaaatgttaactaatatcccaaaggtggcttaagaattctttcttcttgctattaggcctcatttgactaacaaaaattatttttcatgaaccaagtaccaatagtaggtccaatgtgcagtcatcttacattatatattgttaatcctcacaacaaccttgcaaaatattagctacgctttagagttttagaaacagactcaaagagagtaaattgcccagagtctacgggcttaaaaactgacaaaattgagattatcaccaagcctgcatttctgttcatgtgcctctatgaaacatatgtttgaagttcatctctgattactttgctgtcctcttggcctctatgaatgacttgctgttctgccgcatttcaaatctgaccccaggcattagcatcagagttctctatcaatataaagcctattataagacaaagatgaataggaatatatacacacatatataatgtattgtttacataggttaggcacaatgattcactattatcatttaaggaatggtaggaaccctcctgaaatctaacttcccagttgtatatgttcctatatgtatatgtgtgtatatatatattcctctgtgtgtgtgtgtgtaagaaaaatatatatatagcctagcatcatttcatcctgtgattagaattatggatagctggctccttacagtggtttatgcctgtaatcctaatactttgggaggtcaggatgggaggatcgcttgagcccaggacattgcaaacagcctgggcaacagagtgaaacccccatctcttaaaaaaaaaaaaaattaattagctgagcatggtggtgcatgcctgtagtcccagctactcaggaggctgaggtaggaggattgcttgagctggggaggtcaaggctgcagtaaaccatgattatgccactgactccagcctgggcaatagagcaggccctgtctcaagaaaaaaagaaatcatagatagccctgctttaaaagagcaacaagcgtgccaccaaaaaaataaataaatcagtcttgtttactaaaaaatgttttcaggctggccacggtggcttacgtctgtaatcccagcactttggcaggctaaggcaggcggattgcctgagctcaggagtttgagaccagcccgggcaacacggtgaaaccccgtttctactaaaatacaaaaaattagctgggcgtggtggtatgcgcctgtagtaccaggtacttgggagactgaggcaggagaatcacttgaacacgggaggcagaggttgcagtgaaccgaaattgcaccactgcactccagcctgggcgacagagtgagactctgtctcaaaaaaaaaaaagttgtctagagtgtattcataattacaaacagctctctgaaaagcatttatttgccttctctctttgggttttctccttctgttgaatgtttatttgatccttgccaccagcatcatgtaactgcataatccttccatgcttacacttacagggcaccctcccaaaccactaagctgtccttctgcaagcactttaatcaaaaagtattatagagtttgattttaagaatctgagaagcctcttgcttcttaaaaaggaacatgcataaatatgtgcagattttccagataaaactaaaaacacatcctttcgtctaaaatatactctggtttaaaatctggaatattggtgtgggagacgaaagacaatttcccatttgacttgtttgttttgttttgttttatgtggagggtagagggaggaaatgggaagagaaagttgaattatcccagtaattttctaggggtctcagccttaaccatttccaaaatataataaaaaaaatctcattaaaattactacgagcatacgtcttttgcaggaggtggttgaggtaatcagatctcaaaaatgcaattaaaatggggtctgaaaccccaaattagtaaccagaatctttagtcaatatacaaaaggccacacgaatgggttgagcttactgaagatttctgtttgtggcccaggaaatgcctctctcaccacccatccaggagttttatattctcctgtaaaataagcatgttgtgagaagttccctgaggaaatttgaagacaagtgtatgagagctctggagccccatccccctgccctgagcatagtcgccaaaaggactttccacttagtttacttcatgcttgcttttgagcctgcggcaaaaaattctaccttctgagtgactgtgggtggagggagggcctgagatgacatcaaatcacagtctttcctcctcccctcaggaagtaaagtccactagcaggagggcctaaatcgtctgagccctccttggctcttacaatgctcacttgttttcacaatgcagcaaaatgaaatgccttagaaaaagagtaacattccagaaaacggtgtaatttatttttcttccttaattgccccatctgtggaggatttctttgctgaacaccacatcaaaggtaagatgggaatgggactgtgtgctgggttggttttctaacaacgactggcatctctccccacccagcctgctcaccagatggccattccgcataccctgccagctgactttcctttccagttagaaacagtcagccttcgacccgacaggggaaataatgagtactgttcccccttcctcagaacatttacattttctttttgctatcattctttatatacacttgtttattttacggaaccgattgggagaaggtagcatagtgtcatgttactcctgaatactttagcatgtatctcctaagaatattctcttgtggaagaggttccaagaggttaaccttggtacagtattctgtattatacagtccatattcaaatttccccaactgtccccacaaactgtcttttacaacttttttttctgatctaggatatattcaataagcgggtatcgcatttcgttgtcatgtctgtttagctccaaaaatatttacatttagcaagtgttttctaaggagaattcctaaactcaaggctcgccttccctttctatttctcttaagagttcacccggaggaccagcagggtgacgcacagcttctccaagaaactggcttgcagacctggggggagggacactgagtacagttctaggagtggccaccccacagtcactgagatcaggctttccaggtaactaagtccttagttgcatcaggcagacttcatctgtaactgaggggttaaaaaaaaattacaagtggttttatatcatagggaaagaggttttttttctgttttgtattacatttcaacttttattttagattcagggggtacatgtgtaggtttgtta

SEQ ID NO: 3997 - DNA, 6000 bp, Homo sapiens
ccaggcatccagcttggctagaatagacaaaatagtcacaagtaacatttctagtactcttgtcatgtattgttaataaatagcattgtaaaaattttcatggatttatatcctatcttttcaacagcatgtaagcccaatgagggcatgatctatgtttaaacttcatatccccacagtatctagaacaatgctgtgcacatactaggtgctcttttttctattattattatactttaagttctaggatacatgtgcagaacatgcaggttacataggtatacatgtgccatggtggtttgctgcacccatcaacccatcatctacattacatatttctcctaatgctatcccttccctactcccccaccccctgacaggccccagtgtatgatgttcccctccttgtgtccatgtgttctcattgttcaattcctacttatgagtgagaacatgtggtgtttggttttctgtccctgtgttagtttgctgagaatgatggtttccagcatcatccatgtccctgcaaagggcatgaactcatccttttttatggctgcatagtgttccatggtgtatatgtgccacattttctttatccagtctatcattgatgggcatttgggttggttccaaatctttgctatcgtaaatagtgctgcaataaacatacatgtgcatgtgtctttgtagtagaatgatttataatccattgggtatataccctgtaatggtattgctgggtcaaatggtatttctggttctagatccttgaggaatcgccacactgtcgtccacaatggctgaactaatttgcattccatgctcatggataggaagaatcaatatcgtgaaaatggccatactgcccaaagtaatttatagattcaatgctatccccatcaagctacccctgactttcttcacagaattataaaaaactactttaaatttcatatggaaccaaaaaagagcccatatagccaagacaatactaagcaaaagaacaaagctggaggcatcacactacctgacctcaaactatactacaaggctacagtaaccaaaagagcatggtactggtaccaaaacagatatatagaccaatggaacagaacagaacagaggcctcagaaataacaccacacatctacaaccatctgatctttgacaaaccttacaaaaacaagcaataaggaaagactcccctatttaataaatgggaaaactggctagccatatgcagaaaactgaaactggaccccttccttatacagtatacaaaaattaactcaagatggattaaagacttaaacgtaaaacctaaaaccataaaaaccctagaagaaaacctaggcaataccatttaggacataggcatgggcaaagactgcatgagtaaaagcaatgcgaacaaaagccaaaattgacaaatggggcctaattaaactaaagagcttctgcacagcaaaagaaactatcatcagagtgaacagacaacctacagaatgggagaaaatttttgccatctatccatctgacaaagggttaatatccagaatctacaaggaacttaaacaaatttacaagaaaaaaacaatcccatcaaaaagcgggtgaaggatatgaacagacacttctcaaaagaagacatttatgcagccaacaaacatgaaaaaaagctcaccatcactggtcattagagaaatgcaaatcaaaaccacaatgagataccatctcatgccagttagaatggcgatcattaaaaagtcagaaaacaacagatgctggagaggatgtggagaaataggaacgcttttacactgttactaggtgctatttctccattcatttatctgtaattgtggatcaggacctctagccctgccttgtcccactctcaaacacttctgagctaatcctaaatgctgcttaccatctggcaaacaactggtgaactatttctgggattgatgtggtcagtaggaaacacaaactatgcctagagcaacacagaaaggccaaacaccaagatttatttacccttgctgtttgcaaacctgacggttttagtcaggctctagtattgcagactgaaatatgaggaaatcctgcacatgctcagagaagctgttggctttgccacagttctacgcctaaacgttataataatattattattatcccacaggggtgttatgaggattaatgagacattttcaaatcactttgagctactctgttgggggtactaaataaatgctatgttttcctcttgaaatgccatttttggcattgatttgttgtgatgggttcggctgtccaacagggctagaatgagcccaccaactcattttctatagacaacagacgagccgtcagaaggagtggttttcagttaagataaatatgaattgaagtgaactagtcggcaatcagaagcaaataggctgctgttagaaatctagtatattaagtactcacagtgatcaacacaagcgttgcacagtgtgatacagtaaagcaaacactggatttggaaatggtccaagattttaggcccagctctgctgctaactagctatgtgagcttaagcaaattgctaaacttctctgggccccaaatacaaagtaaggactttatatgtgtcctaagaagcacataatcaaagtcttccagacaaggcaaatacatgaaagggaatggaaatagtcacttatgaaggaaagacatttcacagctgggagaagcttgtgaccatttgtcacaggactatcctctgctctggtcttccttgccattgattaatattaatttcagtactaattcctgcaaaagaaggaataaatcattttctaagtcagacatagaagtacatgaaacatctggtctttaaaaatagggtctttgcctttccatgagctatcattgcagcaagcagtctgtctcattctaagatttaaatatatgaatgattgattatactgctactctaatcaccagctcaaaatatatacgcaaaataatgaggtggctgtcacattccagtgttctggagttttgtaagagaaagagttttacgtggttgcccagttttgccattccacaacataagtgactgcctgcattgtctggcactgaccaggaggtgaaacggaagatgaagggacaataaaaggacatgggtgcctgttgtgcccaggagagccggaggtggaaatcctatggaataaatgagcagtgttttctatggtgagctcagtttttcctcactcctcatcctaggaatcacagcagcatcttgggctcaaaaagaagaaatgttgaaactccagagcagatagcaacgcaaagagacactccttggggaattcaatctgacaagtatgtaccaagtctccaccatttacaaggcactttggtagttgctagaaatataagttggctaggacctactctgtgccctagagaaccccatggttgggagtggtggtgggaagtattgaccacaaatcacttacttaaaattgaattgtcagctaactttgggtgggtgaggagctgtctagacaatagttcctcttctgtaaatgatttgaatgatacaataaaaaacagactttttaaagcctagggttgagttatattagattgctaaaatttctggaaacaaattgtgttcaaagtaaccacaataatttggaaaaataagtttaaagaagatacatgtaagttatctctgggcccagatcaagcaagaggtacaagttgcagaatgaatgtccttccagtttaacaactagagcgctgcaaattccctaccacaagggcagtgccaaaatattaagtaaaaagtctaggtacaggtcctgctctcatcccttccacgacaggcttgagtcataaagctggactttctaaccacacaacttcgacttcgtgaatttcctttcccatttttcctcttatttccccgccaacaggaaacctgtgtagtggataaagaccaggctgtcactgctaatcccaatcagaaacttggtccttgattcttcccagtggccgacatctccgctgcgaaaacgggtgtgaactattcactaaagcagcagggcccgaacgcctttaacaatccatttccttcggactccgtttgcgaagcccatcagcacccattactccctttggcttcgcatcctagcagaagctaaattgtttaaacccccgctcctccccagggtttggcggtcctcgaccctcaagggaacctgggatgccggcgccaggcttgcctctggcccagggcgcccgcctggcctgcactccctccctggacactgggcccgcctgccctccccgggctgtacctaggggtgtggaggccagggggccggcgcccgcggggccgcggcgggagctctcccggcccacgggccgaaaaccctggcgactgggacgcggccaggcgggccgggggcgaggggcgctgaccagaagcgggcggagcctaggggcccgggccggcagcctgactccccgtgggccggctctgctgggtgggcattcccgcggggcgccgaggtacaacatgagggctctttcgctgacaccgaggggccttgagggctgcaagaaatgcaggcccggcggctgcccccgagagcgggacgcgcgcccgcgcggtgggcgggaatcctaaggggacgcggaggcgggcgcgcgccccgcaggggagggggcggagagcgcgagaaggagggaggaggcgtccccgtgcgggagcccggctgaccgcgccagacccagacagagcatcgcggctttggctgcaacaggcggtgggctcggctcgggggcggaggcggcgaaagggcggggagcgcgaggaggagcgacctggcctcaccgctgccgcctcttccccgccgcatggacgagcgcctcagccttctgcgctcgccgccgccgccctcagcccgccaccgcgcccaccctcctcagcgcccagcgagcagcggcggtgcccacacgctggtgaaccacggctacgcggagcccgccgcaggccgcgagctgccgcccgacatgaccgtggtgcccggggaccacctgctggagccggaggtggccgatggtggaggggccccgcctcaaggcggctgtggcggcggcggctgcgaccgctacgagccgctgccgccctcactgccggccgcgggcgagcaggactgctgcggggagcgcgtggtcatcaacatctccgggctgcgcttcgagacgcagctgaagaccctttgccagttccccgagacgctgctgggcgaccccaagcggcgcatgaggtacttcgacccgctccgcaacgagtacttcttcgaccgcaaccggcccagcttcgacgccatcctctactactatcagtccgggggccgcatccgccggccggtcaacgtgcccatcgacattttctccgaggagatccgcttctaccagctgggcgaggaggccatggagaagttccgcgaggacgagggcttcctgcgggaggaggagcggcccttgccccgccgcgacttccagcgccaggtgtggctgctcttcgagtaccccgagagctccgggccggcccggggcatcgccatcgtgtccgtgctggtcatcctcatctccattgtcatcttctgcctggagacgctgccggagttccgcgacgagaaggactaccccgcctcgacgtcgcaggactcattcgaagcagccggcaacagcacgtcggggtcccgcgcaggagcctccagcttctccgatcccttcttcgtggtggagacgctgtgcatcatctggttctccttcgaactgctggtgcggttcttcgcttgtcctagcaaagccaccttctcgcgaaacatcatgaacctgatcgacattgtggccatcattccttattttatcactctgggtaccgagctggccgaacgacagggcaatggacagcaggc

SEQ ID NO: 3998 - DNA, 6000 bp, Homo sapiens
actctgtcttaaaaaaaaaaaaaattaatatttcaaatcaaggagagaaatcaaagctaatttcttacattttgaggaattctttcacacaactgtatcacaaaggtactgattaaaactgttttaaagtaatgtttatataatattaaataactggtgacgagatcactttagatcaaatgagagaccaataaccacgaatacacttagcttcatagtagccaaattttctatagtcgagcaatgatatattttcgtatttggtaaatgatagctcttacggaattccacttgaaatgggaattaaaaattcagtcaattccatttgtattttactgttgcagtattctattctcttactgtaaagaaaaaaagatgagtgctagcctgcttttggcactaaatagctataagcaactgatcctaatggttttaagtctgagcatttggcaggactagttgataaactgatactttccctctcagtttttcccctctgcgacctagattgttttttaaccttctatttctcttttataaacatctacattttgacaaacctttccagatctagcccacggtacaaatttatacatgaaaagaggcaatgagtttttgaaggctttctttgccaacattgcagcaacaatgtctctgtgaagctattagcaacaacactgcaaatataaattcagatacatgtagtctctgacctacagatggctactttactttcaacacattcatatagatacagagtttgcagtcactaccacaggttcatctctactcttccttccatcatatctgagatccaggggctatgaccatgaaaaccattacagaaaagacaggaacttctgaattttagcaaatgaaaagcaagcatatctcaatggagccgcatagggtaggtggctacaacaggaagatcaggacaatgtggcgagaaaggaaaaatggatgtggggtgggaatacagaaaggaggtagaatattaaaaaattattctatgttgggaacagtggctcattgcctgtaatctcagcactttggaaggctgaggcaggtggatcacctgagctcaggagtttaagaccagcctaggaaacatagcaaaaccacatctatacaaaaaaattagcttagcatgctggcctgtcatgcattcccagctacttgggaggctgagttgggaggattgcttgagcccgggaggttgaggctgcagtgagccatgatcacgccactgtactccagcccaggcaacagagcaaaaccatgtctcaaaaaggaacaaacaaaaaaacccaaaagttattgtagccacctgaaatttttatatggaatcaggcctatgaccaaaaggatgagcagaaaatgtccttttcttaccacagtacaagtaacaaaaagaaaaaaaaaagtaagaaattaaaattattgctggcttagaaacctagccaccagtcttaacagttataagaaaatagattaccagtttccaatgcattcagccaacatataaatgcagtgaatgaggctgacatgatcccagctcctatgtccagtgggaaaagaaataaaaactagtaaacaagcaaataaaaaaattacacactgtgataggcacaatgaggaaaacaaagtgctaagctagaaaatagctggggttacacattttaaacagggtgaagtcttcaagtagcttctataccaagctcagaggaaaagaaggagccagacgttttaggggaggaggaagaataatccaagaaaatggaacacgccctgagatagtaaagagtttgtcttgctcaggtacgagagagatcaccatggatggataggagtaaaccagatggaagaatgggataaaatgaagtttggagaattaacgcagagttgtcattttacttggatgtaatggaaagcaactgatgtgcttataaagaaacctgtaactttagaacacagccaaaattatttgttaactgagaatacgttttcatgtaccataatagtaaaagtgaatattttaaactgtataaaattcccatcagctgtaatgctgtcagttcataataatactgtcaaagtcctataatactgtcacagtcctatagctattgtagccttttcacttgtaatcagtaactccgttcctctgttaaaatctggctctagtgctctgctccctttaaagcactcatcacactttgaactttttttgtttgtttgtgtttttttggtctttcccccagactgttgtgtatactctacaagtgcatgggccaagcctgtcttgttaacattcttttcccacaagctcataccatacttagcactaagtagataatcaatacttattttaatttaatttaatttagtgagacaggatctcgctctgtagcacaggctggaggcagtaccagatcttgcctcactacaaacccctcctcctgggttcaagcgattcctgtgtctcagccacagagaagctaggattacgagcatgtgccaccacaccctgctagtaggtaatcagtacttactgaacaattaacaaatattattcgtctagtatttaataaacacttagtggttccagactctgatgaaacagaaaggctgaaatataacattccatacctttaagaaactcaaaaaggggagggtggggtctcagaaacagctaagttatgaatgctatcaacaaactgttttgtaagtccagaggagaactaggaaaacacatacggtctgacaaagaattttctttgtgcaagcataaatatttatgtggaaaatccaacaaaggtagaaaaagtataatcagagatatttaattaatacctttactaaaaaagtctatcatgcaaaacggctgcatttatatcagctgaggataatggcatatgggctacattattcctgtgtggactttagcatggggaatgtctgacaagtatcacattaaaaaaaaaaatctctaactcctgagcagtgcataaggtaagcttacacaatacacaacctgttgtgtgaaattccagaatttccatccccgccatgtctaagggtgccaagttttgatctgcactgattcagcagtatgtttacagtcttttcacaggtaattggctacctaaagaaaaatactcatggctacactagcagaaaggaagggcaaattataaagaacaaggaaagaaaggaagaaaaaaaagaaaaagaaaactaataggatcacaggattaagttcagcattatttaacaagtgatacatagagcaagtttacaaaaacaaaagccttttcagcagacttggaagcaaaaacagggctgtgtaacacaacttagatttagcgttttgctgaagtgaaatattgcactccttaaaagaggaaatcactttcttcccccttaaaaaaacacacacacacaacataaaaatcagcaaaagcttggtattttataggttatttttctagccccttaaaaataaacacagcatgaccctcaaaaagaacatcagcacctttaaccagcttaaaaaacaaatctaaagcctagaaaacaaagaaattgtgcaataaaatgtaattggtgttaatataaggtagatttactaacttatttcttaaatgtgttggaaagacaagttgtgcagggggccttaactagtttttctcagcataaaacgaagaggaaactaaatgcttttagaacctcaatctcgaattttatgtgaatggcaatggctctaaattagtaatgctctaaatgcccttaccaaagtctaacttgtgttataagtcgttcaactcaacatctacggactggacatattcctaatagttcgagtaggaaataaatctttattctttgtccacatacaagacgagacactaacatttgttgaaagacaactatgaatttgcctactgtcatactatggatttactgattaaaagacttcaagcaaaattatatattcaatactaatgatgcaaaatggcaaaaatgacaccaaaatgccaagcactgaattggagaaaacaagttaaacatggctaaagatcccgttcatgcagtgtttctgggaatactggcaaacaccagcaactcttttggttatttctccttgcaagaatgctgctgaaataaacgccagctagcaatctcacagcttatcaatataggctgaaatttccagaaaagttgctgaccagaagcgcgtcccagccacaaacatcagcaccgcattcctaaggggagacaaacccggcagaggatgccacacggtgtgtggacttgccagcattcgggcaggagggtgtggacctgacaagcaaggtccgttcggcacgggtagcgctcccagccctcggcccgctcagcgctggccctccacggttcttcccacccctaccttgggctcccacacaacagccccccggctcccgcgccggcgctccgccaccccaatgtctccacagaggggcaagggggcagtctccacagaggggcaagggggcagtcgcccctcgcctccccacaaccccgcgcgcgaggccaccctgcgccaggaagaaggacggcgttcgcctcgcgcgagtccatacacagctatatcctaatgacccgccccagagcatccagtcctctctccactggcccctacaacgcccttcaaatccttcacgtccggtgaccgcgctccgcagccttaccctgaccccaacaagtacacccctagaaatatcgcctccgactccagccgactgggtgactgatcggcggcagcacgttcacgacactttcgcgattgccgtaaaggggaacaaggtttgaacgagcagcgccgcaggcgcgctcctcggtgccgtgagcgcgccccggggccggccggtctgctcgggagcgcgccccgtggcccagccctgtctccttttagcataggggcttcggcgccagcggccagcgctagtcggtctggtaaggtaagtcgaagtaggggagaagggacaggccccagcgcttgcagcccgctccctctagaagggtgcgtcagagggtgggatctggcagctcggggaagtgggcgcagcctggagcccccttacccgcgtcgcaggcgcgcgagactcctgctggccctcattgcctccgggggctaccttatgccaggcgccagaggggggctggttggggcgggagctgcgggggtttccgggggcggggatgagtgcagctgggctcagctccccgtgccctacctttctgttctcttccttggtttcccctactctcctcctgccccaagcagtgcctgatgccgagttccgtctctcgcgtcttttcctggtcccaggcaaagcggagcggagatcctcaaacggcctagtgcttcgcgcttccggagaaaatcagcggtctaattaattcctctggtttgttgaagcagttaccaagaatcttcaaccctttcccacaaaagctaattgagtacacgttcctgttgagtacacgttcctgttgtgagttctgggttcagatactttggtggctggagggagcgagggggaggggagagtttgaaattacgatccctggtgaccttgtgtttacacgaagctcagtcttctgcactcaattctatcgcagcgggtgggtcccacacagaaaggaaattgctggtcctgggtatcttcacaaccgtgctttcaagtaggatacatctgaaaaacacaaaacactgtagaaataatctttccagttctcccaaattttaatttataaatcagtaaccaaatgcaactctgtattttgcattgcattatcggattgtcctcatttctcttaatgtaacatttgatgcagcttataaaaaaacttaattttctagactctttaggatttaaccattaggagaatattatgtttgtcaggaggccaagttagagtttagaaaagtaagtatttttaaattatatt

SEQ ID NO: 3999 - DNA, 6000 bp, Homo sapiens
cagaagcggggaaaccaaggatcctgggatagcggcaaaagggagaggtcagagttccaatccagctatgcagcctcacatccttctggagtgtccctctccaccagctaccttcaggttctctatcaataaaatgatggtaatatctacagtgcaggattatggaaaatctagcaaggagcccaacatatggtggctcctcagcttacagctgatatgctaagccaagcatttgcaacgttgctttcatcccttggacagcctcctgtccttcagagctcctcttcctgctagcagcttcctgcgggcccatcgaggtgaaataaactctaatagcaactgaataaaagctcacatgcccagctgtgggaataagggatggaacgcaatggcagtatgaaagtgagagtaccccaaacccaaggggagccttggggagaatgaggtgccaccctcctgagtttctcgctggagctcactttcaaaaggccttgctttcagtggttaaataagggaggctgggaccacatggatagtgaggggcccgggacttactcttcagcataaaatcggctcccaagaaatgtcccatgggcttctgacatggtcaagccccttcctcatctctatccctagactcttcctctattccttcaacagaaatctcccttttctgggacttacagaattaactatctcagcaaggtgaacttgactgcctgtgggctgtggcctgccatttttattgttacatgcatgggtgggtgagtgactatatgtgtctctgtgtacaatccggcagttctatcttcctcctcagacagatttctttgcacctcctgcctgcaccactcctaccttgaacaacaacaaccaacaattatattgtacttcccatgttccaggcacgattctaagcactttatctgtgttacttcatttaattttcacaaccctataaagtagatagtattatttattgccatttgagagaggaagaaatcatggcacagagggattaagtaccttccacatgatcacacagctaattaacagcagacgcaggttcaaacccaggcagtctcacctcaaagtctgtactttttacttctaaggtacatagcaccctaaatgtagaaaggctgtaaccctcagaggtacagcccacccccaaaattcttgccccagcatggggcagattgctaaaatgggacagctataagcagtgagggtgggagtgacccttaaggacattctcaggcatatgaggcatagcttcaaagagagagcctgaacagagcagccctgggaaacagccacgcagacacactagcctggcacgtcagcaaagaagcagccgactttgagctgggctcccaattaccctcacagtccacacggtgacaagctttgcaaataccggccacagccatgagactaaagaagaatcctcatgtgtgcacagcttggaaaggacacacacacagagaaagaatagtcatccataggagcaccgtctttaaatagaaaagatagcctgaaatacaccctgagctcgcgggtgctcacacacacagacacacacggccagggccagaggagtgactgaacaaatgcctcagctgtgctggtggcaacgggaggaaatctagtgccctggcagctcctgactttcagttcctatttaaaatgtctgaattgggagcatcgacaagctcccaaattagctttttaaatagaagctgagagttaaaggaaaagcggccgtgtcatgggggaaaagcaagtgaaaatcccggccaggccgggaccagaggcagagggggaaggtgaggacaggcagtgctggaaagatgcaatagatgactggggactggtgggagggacagcatctcctgggcagcaggactactccagctgcccgaatcaaggggcctcctttctccccatcgcttgctctcattttgcagatcacctggttgtaggaaggactggtaaacaaaacccacactggcctagactagaaatcccagtctttcctattttccctagatggttaagacagaaaggagagaatagtctacagctaccacacttaagcaatgagttacgagcttatgaggaatgagggggcaggtgtctggaccagtgtctggtcttcaaacggagcttacgagtctcaggaggccacaactgtcccattagttgactttctgaggagaaatgatgtgcccaactgtctcctgaagcctccaaacactgaggggggcactcaacccctgagctgcccccaagatgctaaacaacagtgagaatgtacaggagttcaaacctgggcagaaataaaatatgggtttcactttcccgaattgaacatgggatggagtactgaaggaaagtgcccctgcctcctgagtagtgaccacccaggacctgaggcactttatcccaggggtcagagcaactgaggagtgcagttgccagaaaattagcccttccccagaggaaagggaggagggaggtgggagcagcgccagggccttccccgaattcttcccctgtctgccagggagtggcagtgttgttaatcattattactgtatgcaaatcccacacagctccgggactcctggcaaacgctaatggagcccacgcccacctcctgaagggccaattgtgtacctttcaaactgacagactgaagggggctccggaaaaagtaagagtgagtgaatgagggactccaaggtgccaggggccacaagggcccagaccacaattaccgacttccactccttcatctggaagagggctaggggttctcacaagccagaagccccgttccggattcagggaggtccttttccagccctgggtctacaattgtcctagggtctagaacaccctcgcagtctagaacaccccagaggtcacaacgcactttgcatttctctgcctcggcacccacctctccacacccagaaatgtgatctctcaagccaagcgttccccgtccctgctggggcacggagctgcctcgcttccggagcgccaggccgagatccaggattccgggcaccgaggctggagacaccgggaaagccggagccgcgggtccgcccagcggcggggactgcgccctttgcgcgccgccgccctgagggtgggaatctgggccggacacctggccctgtgggcacatgctgaccttcccactccccatcctgggtcgacgaggcacggagcagtggggacccatgggcttcagggagggactgaggggctgggcgggctccagttgtaaggggaccggctcgggtgagagttcacgctcccaagtccagactcccggtctaggtagtgggtagacgtggcgggagaggagggcgaatctcgaccttctgatggtgccttcgtcctccgagaggagagcggctcataggtggggttagaggcagtgtgtcccccgggtacctcttcagcctctgcactcggagctgagagccgggggccagccgcaaagattgcgcggtagggggccccaccttgccaggtcgccgggcttggtctcaagcaggtgctgctgccctgtggacagtcagcgagaaatagacacacagctaggtgcacacataccccacgcgcgcacacgccggccctccctgccacctctccgtgggtccccagccacacacgcccccgaacttacgctcacgccgtactccctgctcctcccccacccccaaacccagctcaccttgccacgctcacccccgtgcccaccctcgctggcacacgcgctcacacccgcgtcggtacactccgccacctccaggcacaccctaggattcctccactcgcccggggagacgcactaggctctgcctcgtctccccaccccccgctcacgcgcgcgcccctctccacacacacagacacacacacacgcactcacactcatacacaccctcgcgcgcggagtcactccccctcgcacgccctcgccctgggcaccctcccgcggcgagactccgggtcctcctcctctcttcctccactgcctggcggctcggcgctctccggcccggcctggggccgctgggcccgcggggatcggaggggagccgagggcgcagccttgccgcctcccccggactctcctctcctccccgccccgcctgcgccgcgcccccaccacctccccccctcgggaaagggacctcgggagaggcagcccgtggccggccgggctccgctcggcgcggcgccggcagcggcgggggaagggagagagcgagggagcccgcgagcccgcgagcggagcggcgaggcggggaggggacgcgctgccgagccggggctggagcggcggaggctgcggcagcggcggcggcggcagtggcggcggcagtggcggcggcagtggcggcgggggagggagggccccacggacggacggacgcacgaaccgaccgagcgagggaggcagcgagcgagactgcgctggcgaggaggagccgcgcgagcggcggctgctgggcgcttccccgcgctgctgggcgctcggcgcctccgcggccccggctcccggccgcagcttcctcgcgcgcgcggggcgccgggcgcggggcccgggctggcttcgcggaaggtaagagggacgcgaccgagccttctggagccaggaagtgcgaggagcgctgctcccacgcctgttgctccggctgcccacgcggcaccctcccactcccgcgcccgggtgggtgggcgctggggcgccggaaggattgggggtggggcccgtgccgtgggggagcagacagccggcccgggggcgtcggttccctcgggctgtggagccacctccgggcagccaggcgctggggttcgggggtggggtgtgaacctctgccctctttccattggcctgtcttccctcggcgggtgccagagacaggtggcgaaggcttgctccgtccccgctcttggtgaggggacaaggagagaaatggctgaaagtggaaacccggagcggtttggggcgcttcgcaaagttctccagctcggcgagccggcggtgtgtctaccagaggctgggggccagtccatctggtcctgcccgacgccacttccaccccgcgagctctgggaaaggtctctacgtgacgccaagggccgtcgcggccccggggagagggatcgaaagactcactctgcgaggtgtttacactggaggtgggggacgggaagggactgggcaaagttacctggactcaactaaattcctgcgcttgcttagtgttgacatttgaataggatccgagatgttctgcttttatcccgggcagccctgatatgtcagcaacaggctgaggttccagacctgaaatcgcactgcaagaaaaagggtccgtatttcttaagagagagcgtctgaactttctcggggtcctaggcacaatgcgatctgtttgtaagaccaggcatgcgttgctgtattttgcatgaatgtacgtgatggtcaaatgtatgccttgtttaccttacttcgagggagcctgtatgtttactgtctgtagaaagggctcctgggtgtccacgaattcaatacaaagcatgtgtacatttccccatgtggacctgttggcacacaggaagggaactgatgtgtttattttttcctcgtctctacttgaatgcaacaaaatgcaagtatacaagggaccccccagagaaagaggttagtagcttgttcccttttgctcttgaggaggctggagaaaaagagttcaggaaagtgccctggctagcctaggagtggcaccgttggagaagaggatctgtgcgtgtgtcccaagcctgtcccccaaggatccccagcttggttcaccttgtcagtttcatgctttgcctaccaaaatcctgtgaacacaggagaagccctccgggtcatgggcaccttcctctgcccccagaccagccccattctgagctagggga

SEQ ID NO: 4000 - DNA, 6000 bp, Homo sapiens
ttatctgagactagaaaggggagagaggaaaggaggatagggagaggttggtcaacaggtacaaagtgacaattagattggaagaataagttctggtgttttattgcacagtagggttgctgttaacaataaggtattgtatattacaaaatagcatgaggtgagagatatgctaagtaccctgatttgatcagtatacaacatttgtatgtatggaaacaccaaaactgtaacctagaatatgtacaattacaatgtgtcaattaaaagaagaatcctttcctgtattgtttattgttactaaaatgggcaaaatagcaccttcctatctactacatcacagaaatggtgaagtaactgaaagaatgtaagttaagtaggtgaattccagagaacacactgtaatttcatctttcttttttcagataacgcaatagagcaacttactcagcttaaagagtacctatatcataatttttgaagtttgcatttgcatttcttattgcatcactaacttccgaagttacaactcttaccttgaaatcttcccaagatttgctcacttaaccagcttgcaaacaacagtccggcattttcctgaggcagattaccatagcagcatccagtctatcaacctttaaaacagaaaggtgaatcctaagaattttgtgataaagctaaaagccagtagagagtaccaggccttctctggttctgatgtaatgattctgaaagacccccatgacaaaatattttatcttaaaggttgtacttgttctttatacttaaagaaactggagtttctgatcatgccaatcattagatgggaggcctcagacaagtcttttagcatccctgggccttaatttccatttctgtaaaaagtcaggagtgccttagatgatctccaatttcctctccactctgatttctcatcctatgctccctagttcatttcttcaatgtcgtgtgcctcaaatcaggaaaaaaacctggcagaagagcaaggattttacctgtattattttattattttcaccagctcacccacccaccgtgtttctatttttccaggtaagagcctggtagttgcttttaatttttcccttttatctactttagacaaattatgacattaattcatgaatacagaacactttccaagttttaccaattacttctgcagatactatctcatttgattaacacaacagttcaggctagtaggtattatttttaatttatctggcgaggaaactaaagcccagggaagttcagtgaattaattgcccagaataacacagatagcagttatgggaccagatctttttttttttttttttctttttgcgctctgtcacccaggctggagtgcagtgccaccatctcggcttactgcaacctctgcctcctgggttcaagcgattctccaacctcagcctcctgagtagctgggattacaggtgcatgccaccacgccaggctaatttttgtatttttagtagagacggggtttcaccatgttggtcaggctggtctcgaactcctgaccccgtgatccgcccgccacagcctcccaaagtgctgggattacaggcatgagccactgcccctggcctatttatttatttatttatttacttatttagatggagttttgctcttgttgaccaggctggagtgcaatggcgtgatttcagctcaccacaacctccacctcccaggattacaggcatgcgccaccacgcccggctaattttgtattttcagtagagacagggtttctccatgttgctcaggctggtctcaaactcctgacctcaggtgttccacctgccttagcctaccaaagttctgggattacaggcgtgagccaccgtgcccggcctaggcctatttttttttttttttttttttttgcattttttagtagagacagggtttggccatgttggccaggctgatcttgaactcctgacctcaggtgatccacccacctcagcctcccagagtgctgagattacaggcgtgaaccaccgtgcccggccggggccaggtcttctgattccaaagtcttcacaacactaaaatctattaaagcagatccaggttttgtagggcctgaggtgtctataattttgatgactgtctatcttcaaggataggagtacaaaactgcaatacaacagaaagtatgatcctgttgaacatactgttagggcccctctcagagcctccttagggtctattcaagggaagggcatctagggttaatctttagggttaggtctcatgtaatgttttctatatgctagacactgcaaaataaatactaatttttttttttttttgagacggagtctcactctgttgcctaggctggacaggctggagtgcagtggcaccatctcggctcactgcaacctccacctcccaggttcaagtgattcttctacctcagcctcccaagtagctgggactacaggcacatgctaccacacctggctactttttgtatttttagtagagacagggtttcaccacattagccaggctggtcttgaactcctgacctcgtgctccatccgcctcggcatcccaaagtgctgggattacaggcatgagccactgcacccggacctttttttttttttttttttgagatggaatctcactctattgcccaggctggagtgcaatgatgagatcttggctcactgcaatctctgcctcacgggttcaaacaattctcctgtctcaacttcctgagtagctggtactatgcattacgcatggctaatttttgtatttttagtatcggcagggtttcaccatgttggccaggctagtctcaaaatcctggcctcaagtgatccacccacctcggcctcccaaagtgctgggattacagggttgagccaccacgccggcctgaaataaatactagttttattatcataataaccctgaggtaggtattatccttgttttacagagttgggagtgaggcttggaaaggtaaaatgacttgcctgaggacacagagctggtaagtgcaagaatcaaatttggaactgaacagatctggctctcaggtctatagtgtgaatctaccaccctatggggctctataagccttcttttgaggtttcctgggattcatcttatttaaccacttctcactacattccatagaacaggcccttatatatttacttctgaaccagactgaggatcctgtctctctaacttaattctccttaccatctacctgaatgctgctgccaccctagcactgctcttataagtcctagctgccccaatgacccgaaatgccttccctttctccgtgtttatcaaatgtaaaaagcaattactgtattactcactagtagtacttggccgtggatgccacactgtcttctaatatactgaactgttattggaaagcacatgggacctctcaggatctgatcctccaatctctactcttcttcaatctcaggttcttcatttgcaaaacagaaaccataaggcctacctcccagggttgctgtgagaattgagggggagggtaagtgagggggagggtaagtgagggggtgagtcctggaagggaggaagacacgaggggaagggcagggtcctggcaagcagcaagtgctcaacagatgttggttaatttgtgcctaagtctcccccaaaaacttgcaagctctttgaaggcaggggccttgcctcatatttttcggtatttctcaaaagtcctggacatcaaagacactccatggttatttgatcacttcaacacacacgttggttatgcggtcacagcggctattatgttaaaaacaggctctggagtgtgacttcaaatgctggccgctgacgagctgggctgtctggaaagttacttcacctctctgagcctcgggtcccttatttacaaaatgttcagggcagtgcccacttcacagggctgaggattagagaggataatccgggtgaggagcatcagccccagcgccgcctgccacaattctatccggccccacatatgcatcgtccataagcgtccggcctctgcattctcgcttttccacgtggccgaggtgcacaccccaacccactgggccagtctccccaccctcttacctgctcttctttcccgactcgtctttaatacccaccaggcgccaaccgccgcgggcctggctctatggtggcaagttgcatgggttctcccatcaggacctcccgatgagcctacgaggtcggttctactactgtcgccacttcagagggaggaaacaggcccggagggttggggaacttcccgaggtcactgaactggtgtcaggcccggattggaatccaaacacatcccagcccatgcccggctctacagcgccggcccccagcgtcttcccgggtgccagcggcacccgcatccattcaaatgctgcccattccccgctcctcagtcgcttcccgctactccgcacgcgcatctcccccacccgtcagggtcaggcctctcggtgacttttcctttttctctggcagaaactgaggggtgagaccgatggttgtgtcccgaacgagggcagattgcctagagctcgtcagacagggacccaagggcgagtctggcagggcgtggtagctccgcgccgctcagcaggggcgcagcgcgcgggtcggactgggacgccggtcacgtggcggggagggggcgccggcgcgcgcgggcgagctagagggcgcgcgcggctgaaagcgtgtggaggcgcgggctgcagttcggatgtctgtgtggcggggagggggcggcggccgggagagacgactccgccccctgcgcgcatgctccggccccggcgggttataaggcagcctcgctggcccggccagacaaagtggtgagctgcgacgtgactggctagctgcgtgggtactggaacaagcaaacgaggcagcgagcgaaggacgggagccggaccctgggccccgtggaactccagcctgcgccaccacgtcacgcacacgctcggcgctgcgatccgcgcatataacggttagttgggtaacagccggcggcacgcggcgcggaccccacggtgccctcgctgccctggtggggtcggaggggacctccggggttgggagactttgtctccggcggagggaggcggcccagcagagggcatcgtggtcacaggcagccgcgtggcctcggactgcagtgctggtgaaggagaccttgaggcgctggggtcagcgcctctcttagccgagccgcgggccccgtgctaagatgccggtcccaggcctggccgaggagttgggtcgtggtgcccggtgacggtggggaagtcccttcccccctaagtcttcaataggctcctcgagagatgctttgatctggaaaagggataacatgaggctgctgcatgtggtacctccagactctcctggccgcttctgccccaagggaagggactcggggcagaagttatttatgattcgtgacattgtccgccccaaccttcttggcccgccgatccttgccccacctggtgacttgcgagagtggtgcggagagccgcattccccacagccaaggcgtgactgcagggttcgagtagactttgcggaggggacggggcagcccgcagactcctgggagtggtgctgacgggggctctttgtcattcaacctgtggctgccagcgtccgccgcagcgcccttctactcatggacttaaggcggccctgttgagagaaatctggaggatagcgttacacttggtccgatgcaagttttttgttccaagtacgtctttttttttttccagcatgcgttttaacattttattactttgtcatgacatatttgatggaacaagcagttgccaaaactagtttgtaattaatctaaaccaggagacaaacttgttactactttagtctttctttgggtttccagtggctgattag

SEQ ID NO: 4001 - DNA, 6000 bp, Homo sapiens
taggaaccagtcacttaatctcctcatctactagatggatgattaggatccacccattgtgcctctcagtatttttgtaagaattacatgagataaattccttctggacaatttgcagagacttgccccatggaagaatacaggttaacctctgaatagtgtacctgctaaattttcctctacattctgaaaaaaggaagaaaggggacaggaaccatcatttaacacttgccatggatcagtcacagtaccttcaccatttaacccaactcatgtaatccttgccttgtacactgtgaagcaggccctatatgtcccgttttacaaatgaggaagctgaagttcagagagctaaagtatagcacctaaagcaatccagttggtaaataacagacccaggatttgaacgcagatctgtccaactccaaagccgtgctgtttcttctgtacaaggtcagtgagaagaggactatttggctcccttcctagcccttccattctgacatcatcttcacttctcagtaatggagacagacctcgacccaccatggttaggcctagctctaaagttgtttgaaggatgatactgccttctgaccttcaacctgtctctgcttccccgaactccagcctgcttttgtccacaaagccaggctggatgcagaaaacattgtccagtcttcccaagtctgatgtggaatattgtgtgcttgagcagagagcacagaacagagatgagactgctgaaataggggaggaatgggagagaggcaaatataccctggttcaggatgtttgaactgccaagcatatttcttggaataaaagcaagaatggacgctttcaaaaagcacctaggcattgaccttgagctctgcaacgtcttctgcatcttctcaggtaaggaggaatccctgaaaactctgatgatggcttgggacagcatgatttgcagaagtcacccagctttggctagatttgctatcttggtatgggggctgggggagagagtgtcatctgcaggaaatactgataaagctgttctggctgaaaccccatagggaatccatagtacagtttattccaaataatgatatgaagttataccctcaaatacaggacctcaacttgattctgcagtagactaggttcaactgatgtttgtttttttgagtaaattaacacttctgcagaaggcggctacatgcctcagtaagcagaggatgggggaggtggggagaagagaccaggggccctcagggttgggtcagagcctccttagcttctatccacgtggcaaagctgtaggtgtgcttgtgtgtctattcctctgtgtctctccctgcacgtcagacaatccagctacaatcgtcagactgctccctttacatttctgctggggacttggagggaggagggaatggggaaagggctccctatttagaaattgcattgagatggaaagacaatatgacacatcggctcatgtcaaaggagctcattcttcccgcctacagcattagcaatttcctaccaaggttcaatttttttaaagaaattattatttggttttaatttattttatttgcaacataactcaacaagacattgctgctcagagcagagtgggagcctgcccaagggcagagacttaagttgggggcaggagatgagcacattggctatttccgaagagaggagggcataggagtgggaggcctcttgtttctgtctcaaacctcctctcattctgcctcccattccaccccagctcctcttcctgcatctgagaagtctggtctggaggtgcccagactcgggatgctccatgcatggctgtaggcgcaatgagaacgatgggggagggggagctgaaagtgagttggcctctgtaaaaccaccctcagcttcagagccaggaaaggctgcctccctcctccctttgccccagcctcctcttttctccctcatgtaaaatcctagagtgctgttgctggaaggagcctcaaagagctcctaatccaacttcacataggcacactgagccccagataggggatgtgacagcctcgtggctgctttggtgcaccagccctgaatcccagccctcccaggccctgtccaatgtacttatttgccaccactccatgcttaactgtctctgctcctgcttctctcctccccacccctaaacccaaactcagaatgggatttctctgagagatagaattgaagggcaacaattccacttctttccacctctttccctctctgggtttgagtgggaccctggatcctccctcccagctcttggtgggaccctgggactctgaattttatctcttcatatgggaagaagcaaaggtgtgtttgggggttgggtttgcagggcaaaggggtttgagagacaaaaaagtttccatcattacatgaagaatttttctgctttgtggctggttatgtgaccacagtggtatcagcaattgacctgggggctgggggaggtagcgggctaaagaggacaactagggtgaggctttaccttaatgtctccttctgaatgtgtgtttctttacctgtacatctgtctccctgtctgtttctctgttctctatttcctataactgtctctctgtatctctgtctcatcctctgtctctctcatttgtatctgtctcttgcctctatttctgtctctgtttctttctctctgtctctctcatctctgtctctcccacacacgctaactcctacaatccaacttcaatagctattgactgacccaggggccctaacctgtttctgcagccctatcagggcagcagctccttcacactgctagattgagaaatgccaggtccggagctgctgccggggcgccagagacgctgcagaagcgcctgccgagtgtggaggctgaatccaggaacaatgagaaattatctgttaattctcggctcctgccacctgctctgctccaaacaagctcctttgccttcagtttagatgcaaattcccccactcgatgtaagcaaaatattgatttccctgcatcacaggtctgggcccttggaatggtcctgtgttttttcattctctgcaaaggcaaaacaaggtgctttgttctgtgaatttcccccaggaactcgcgagggggagggagaaatagcaggggagtgacagagttgccataaacacgggcaaagagcagttctccatttgtattttacataaacacaaacctgccacttgggaaactgctaataagcgtttagccagaggctcttctgggtgctgagatctgcatcgggtgatggaaaagaaattaatggggcctctaggctcctcaggtgggttttcagaagcaccaggaaggcgcatagggatgccagagccccacttgttcttggaacagcaaccaaacacctccagcaggaaggcagcccggattgcacagtatcgcctgcgtcgtgtctgcttggtccctgcctgagttcctagccttctgctatcacaggcacaggggtcagggtggaagctgcgaaccttcaacaattgcctctccctcgtcccctaaacttatgcccacgcgatggtagcaccaactgggtcttcagcaccgtggacagagccagggggcgcctcacggtggaaaagccgcctggctgggccagggtcctcacaggccttgccttagcccttggtgccccaggcaccagctgctaggggatcgcaagtccaagggccggttggcacagatggcgcgcagtggagaccgccaggagctaaggctccgaatctcctccctccggaacgtgagtcactgcccgagtcacttccaataagcgtgttaattaagaggcaagacctttctccctcgccagccactcgggcatacaccaacccagcagcctccaggggctgcagctaaagcttccttcccagctccgggagagcaaatggacctgagtctggggcttcaggcgagccccacacagaaggggccccaccgccgacaggtgtagatcaagagactcccgagataggcccctgcagggcgctggtcccccggcctccctgaccatggctcacagacttccagcgctgagtgaggcagctcgaagcctctcagccgatctgttcctgggcctcactccacagtttctgaggggatctctactttaagtctagcctcaatcctcccgttgagctttctgtctttcttgttatgcttagcagaaagatacatgatctctggtgctgtttcaccgaagcaaggaggtgggtcggcggaactgagcgccctgcgccctcttgaaatgaccccccattcctgtttgccagaaacttttccctcccgttgccatggagagagacggccgctgcctcccgtcgccatagcaacatgcgggtaccgcggaccgcaggattgcggagctcggaaagtcttgcagttcgcatcgcccgcctgtcttggggtcttctacctccgaagctgggactcgggggccagtctaactgctcccgtcaggaacctcggccaaggtcctcccagaccctgcctgaccgtcgctctttctgttacggggttatctatttctctgtcattcgtgtggcatgtggcagtttacccagtgttttcacaaacacgatctttctatccccagggagtccgtgaagtacttaaaatcattacacctcctttacggagaggaaaattgaggctcagagacgcccaaggtcacaccaggcagtgaatgcggagtgggaacccggactctttcctggccttgcaccctccgagattcgggacagcccggcttcccgcctcgaaacccccaccccccggactcaggccagtccctgagtgtagagggggcggccgcgaggcgccagactcgccagctgccgcgggatgccacgtgaggggcggggaccctgcggggaagtgattaaaagcagagcggagccgcagggggccgctgcagggagggtcttcttggggccgtcgtgccccgccccagtgcggccggggcgcgggttcgagctgctgctcggcaagcctgggtgtctagggcatgagcggagtgtggggggccggcgggcctcggtgccaggaggcgctcgcggtcctcgcctcgctgtgccgggcccggccgccccctctcgggctggacgtggagacttgtcggagcttcgagctgcagcccccagagcggagtcccagcgcggcaggcgcaggtaacgggagacccagggccccctcccttcctggatatccgtcctgcgatctcccttccccaaagccccggtcccaggagccccagaacctagagagaactccccagctcgggattctggattgggagccagcctcgtccagccctctggcccatcgcttgcacagccaggagagacccgaaggggagcggaggttggggtagaagcccccggccctcctgtattactactgcggaatgcgggggaccccgcagacagccaggctcccaggacggggcacccttggggcttcagtttccctcgcatctccaagctcgctctgcgggcgatttgccaggagaggggtccatggagagagcgggagacgaggggcgcccggctgaggaatagggcttgcctcctagcgagtgtcgaggtccccgggtccgtgcgtcggtctgtccgtccgtttgtgtgttctcgcggtgaacgcgggcggacccccagtctctccgggagaaacttgggtctgcggctggcacgaggtctttgtgtccgggtgtctctccggctgcgagtggttttccgcgtctccgctggggggcgggggacagggggcggggtgggggagggtatgagggtgttgcggcgtccttcccccaccccctctcgcccctataactcgctccctccgtccctctcggactcggactcggggccggtgcgcgactgagctggcgcctctagccgactttgccaagagggcgcctcctgcccgat

SEQ ID NO: 4002 - DNA, 6000 bp, Homo sapiens
ttttacctttaagtttagtgactgtttatttaaaactatattttaaatttagtatacaattttaaccacttggataccaaaaataattttaacagtaacttaatctagaagaagtttgtccaacccgtggcggatggttttgaatgctgcccaacaaaaatgcataaactttcttaaaacattatgagtattttgtgattttttatctcatcagctatcattaatgctagtgtattttatgtgtgtcccaagacaattattcttctaatgtggcccaagtaagccaaaagattggacacctccgatctagaagaacttagttaacatttacagccttatggtctcaggggaaaagtttaatttcttttaataaacatagtaaattttgttcagacaagtataaaaggacattcaagaaaaatcattcaagcataaacatgcattaatttaggatgacattttgtaaaacggaaatacaagttcaaggagcaaaaggaaagattaaaattttcaccctattaaagaggagcttgctcatgtatttttaattatttatttatttatttatttttgagacatggtctcattctgccacctaggatggagtgcaatggtgcaatctcagctcacaacagcctagacctcccacgctcaagtgaccctcccacttcagcctctggagtagctgggactacagcgagcaccaccacaccctgctaatttttttcatttgttttgtagagatagagcctcactatgttgctcaggtggtctcaaactcctggactcaagtgatcctcctgccttggcctctcaaagtgctgagattacaggcgtgagccatcattcctggccttgtttatgtattttttaatcgatgataataggtagcagatcatactggcattcagtttctactggatgtattaaaatgagtaatgtggccatttgattttaaaagtcaatatttaagacacaccagaaatgacatctctgaaaatattcaaacttataataaataattttacctgcaacttaaaaatgtgtgagggtaatactatacaatgccatttatatgaaggtttaaaacaggcaagtgtaatctatagtgaaagaaaatcagaacagtgtttgcctttaggagggatgtgggcatagattgactgggaagggttatatgaaagcctgaaagcttcctggggtgacagtaatattctatatcttaataggattcggggttagaaaggcaaaagcattgtcaagaattattaaataatatacttaaaatgtgtacatttcattggggtaaattttagaaaaatagtaaatagatatttgaactctaggtaatgttatgcatgctcaagagtttaggagtgaaacatactgcctacaatttatttggaaataaataaaaaaaaatagattgagaaatggacagatgtatagataagtaatgcaaccaaagcaaaatgtttattgtagcatctagatggtgagtatatggtgctccttgcccaactatttcaaattttttgtacgtttgaaaatattcataataaaatattgggaaaaaatgcaagagaaaatatttttgtaactattttagggcatgtgtgggcaacagttttaagaccactggcttctatttatcaccatttgctgaagaatctttaccctaaacttaccatccaaacctttctccagaatccaatcatatttccacatcatctggatttcccaccatatctaaaactcagcagatccaaaaatgaatgtattgtcttccctctaccagtcaggaatatctttagctacatgtaacaacacaaagtcaaacaaaaagagggttatttttcctatataataagaaatgtggagttaggtagctgctggtattggttcagcagttccacaatgtcctagctggaaggtctgcaattgtcttgccctttcttcatagtcacaaaatgttctagcacttcaagcatcatgtctgagttcaagacaggaaaaagagaaaagggagcaatgccagtgacagtttaaaggctaacttccttattatgtcatttaatgtagccctgtactttcttatagtaatatacccttgaaaatgtatggaatgcctttcaggcacaatacatacatatatgttgatgatggcaattcctcatgttggaagtgggaccttgtgtgaggtattggatcggagtggatccttcatgaatggctggatgccatcctccctataatgagtgagttcttgctctgagttcacatgtgatatctggttgtttaaaagagtgtggaactccccacttcttttgctcccactctcgctgtgtacacactggctccctgtgaccttccaccacaactgaaagcttcctgaggcctcaccagaagcagatgtcagcactatgcttcctgtacagcctgcataactgtgagccaattaaatctcttttctttagagattacccagtctcaggtactactttgtagcaacacaagaatggactaacacacatgcgtccacacacatacacatacatgtacacaaaaacctaaacctcaattggcttcagaaatggctaactcagttatggcgtaatatcacctatgactctggttttttcaacttcctgctttgctgttttcaatgttggatctctcctcaggctggtatgaagatggatatagcaactctatgtataccatccagatccaacagcttcaagaggaagaagaccatctggcccctcagtagacaccactcccatcccattagtcaggatgcttgtcaatttgtttcctgaactaactacaagggaaatgggattaccttcgcctattcctctcaagggtcagcttcccttaagacatacaactttgtgaaagggcgactgggcaagtctatactaaagatctgaaactgttatgttggacaggcaaccaccatctgtctctaatacatgtgtgctaaaatcgtagcatgaaaaaaacaaacaatagatgtatatgttacaataggggttctcttccctctatataatctctagacatattttgtcttagagatgtaaaattcaacgatatatttaaagtataatatcattgttcattcagttgatttactgaacgccttctatgtaccagacactactctttaacttagttcttttcctttatactaaaacagaggtgacagatatagaactataagtgtttgattgaagctaatgattcacttctctctgcatacctaatgacttccatctttgtctttatttcattgttggagacatgtttattactagaatcagcactttcatttttctgtctttgactcgtttttataaatgagtcgatattcaaacaaatgtccaaagacacagaggtaggcaaagatggcaacatggtagaaactgaatggttgactgataagagtgtgatacaataatactaacccttatgcagtacttaatctgtgccaggcactgttctaggcacttcacaaatactaactcatttatcttcacaactctatgaggggagtactattacctccatgttgcacgtggggacactcggggccaatgacagtttggcacattggtcagccgactgaaagctgtgatttggctcctgccttcctgactcactctgcccccaccaggcttcactcgggctaactgcggttctcagaactcccttggaggccttgttctctccagctctgtgcttttgcgcatgctgtcttcctggactgatcttttccgcctgggctccgtcttctagaccagatcaggcccctctccttagcaatgccttttctggttaaggcagtcaggccaggcacacctgtctagcacccagcccttctctcctcaccctatttgcttacagatctgtctccaacaccagagactgtggttctgggcctggctgtctcctcattgttgagtccctggggcttgctactatgtctggcctataataggcactcaaagttttgctgaatttatgcataagctctccgaattttgctttcttgtctcccccatactgtctgacaccacatattgtagacacttagtcaatggaagtgggagtctgattttcctgccaacagcctaacttaataaaaacaaagcaaaacaaaaaccgcccccttcccctttctcccatctccacatcataattaagatcccgaaaatttgggatccttccaagccctccgatcagtggaacccggcaggacatgagaagtcagactccctccactggccggctgggttgagggcagcccacaggactcagggcgccgcctcccgcaccctctctcagttcttgcctattaaggtaagagtcccccgaggaggggggaggggccggagggagggtcccctagaagctgcttgtgtgcttgctccgcgccgcggagccgcagccctggacactcagtcaggtgccccgcgactggtcctgccagcttcggggcaacctccgaccccacttagctcttctacccgaggtcaccttcctagatttccatagccacgagaccaagtgcttatccctcaagcatcgcccgggcctcaaaccggtctccgcacagggcgctgattaaatgggtccccagtccccggtgggcgctcccgccctgcaggtgctccgatagccggcggcggtgcgcccactggagggaaggaaggtggtccctgggtccgggagaagagcgaacgtgctccctcgggctgctcgatctccacccgctggcgcccccacccgtcgccagccacgccgcttggggtccacgcgcccctccccgccgggccccgccccgccccccggaggccccgccccggtcctccccgctccgccccctccccgccggagcctgccgctccccgcgctcgtagcgcgggcctggggactggggatcccgccgccgggccgcagcatggggcgcttccgcgggggcctgcggtgcatcaagtacctgctgcttggcttcaacctgctcttctgggtgagaccaggagccgggagggccggtcagggcagggggccgggtggcgggcgcggggccggggtccccgagctgctgactgcggcgtccgagtcgcgctcgtggggagggctgggtgctcaaacgcggaggcgaggagaaggcaaacaaagagggaggggagggatggaagggagagaacgggaagacagaaggttgatcaatgagaaatggtgagaaggggagagacaccgtgtggctctttcctggaaggaacccccacctgccttggtttttatctcccagctagtgaccccaggtgcggggacccagcctctcctcacctccggaggacttgggtccctgttcccctccagtctcccgtgcacacacccccttttcactctgcctaccagctggaaccagggcctggccagggtgatgggagagaaacccctgccctggggctgcctggggtggtgctccattcgagtgtgtggacactgtacctggctgtgatggttttgtttaggaaattggagataggagtgaaaattgtggtgggggggcgtcgtcctttttctgggcatcagggtaagagtacccctgggtgagaggaggtggtgggttctcttctgagaaggggatggggaatggaagggcttctaaagggcagcagcagctctccacaacccccagccgcagcctctgctaaatactaattctcccagagatgatctcattcaactttgcagggtttgattgaactgacagcgttcccaggattcatggttcacagagagataggatcttgacccttgtctcctatattatcgagacagggatacagctagaccagacctacatccctggataccctgtcccagggcctgcaggactgtgagacaaggtctgaaaattgtcttttctgcacatttcctcttgggctttcttaagagaatgtcagccagtgtaactgctca

SEQ ID NO: 4003 - DNA, 6000 bp, Homo sapiens
cctagtctcagcagactgtgatcacaaggcattgtctgtgggatttttcctttccctttcttgatctctcttgtggttctaggttgtttggttgttcattgttatggtggctttttattttaacgccccttgagccccatgatggctggtgtcaccctgttcttttacactgttgggccaggtgctgcttgtccttcttagggcatcatcaattgcaaatatttccttttgctccctttatgaagatgttcttatacccttgctttcccatatttttctggccaagcatgccatctcctttactctgggaacttacatcctgaatcccaagagggggtcacagtttggaaaaagtcatcagggattctggaactaagtctgataaaagattccagtgaagccctgttctgagaacgagcagactgcaggggaggccatgggattccccaggccagtgtctgtgctgatccttcaagggtctgcaggtatgcaggtggcctgggctgctcggcagatactttgctgattcccagctgaggggagcatggtggcgattgctcagccattttctgacagacacacagacctgccttttctcccccaagtataccgtaccctcctgtgagacagtgtgtgcaggcaccaccaccttaatcctgctgttgcctgacatgctgattctcatttattatgctgcatcaacacattagaggtacaggagcggctcagtcatgaaaaaagaaggtcttttgccccatttctttatttcagagatgtgggctttcagtgggaatttgctgactcctactttataggctgagtcaatgagggaagatgactggcgtttcctctgtctaaatgggaggttgccagagcgctggctgggactaggatgtgtaactaagatttcagtttgaaatcttagatttcagttcacggcgataaagaagtaggtgctgcacacaaatatgtaaagcaattgtaggaaatttgaaaggaaaaaaagaaaccgaagccagtattttaataattgctttttctgtgtattttgtattgggctgggggatagcatcaaaggttgaactttttgagctttctatgaaaaaccccaggaccttctttctttggccatttctatggaaatgcgatgtcagatggatggtaatggtgccctccagtggctgtgagacctcattgcgcattgtctactggagctttagtcttctgagacggaggaaaactgctgaatactctggattcatctatgtctacaatgttgcatttatgaaaaactacactgtgctaggcgcattctaggacatgaatatgaccacaccctctttcaccgggtgtttctgtagcaagttttcatattcttttcaaacaatggtttctctgcgttaattattgaggaaaaaaaaagatggggtaagaaaactacccatgcatgatgtagagagctgttgatttgtttctgtttttttaaaggaaaactatttgtaagatgttgcactaaaacattttatatacacttcagagacctgtagtaaattatgttgaaaatacggctgtttacatttactgcagtcttctatccttctttccccttactaaccagcccccttcctctgtggaactgtgctgtgggagcctacagttctgcccttggcattggcctgctaggctcaaggtctgtgaattgcagtctttattattacaccccataaccttcaaatgataaaaacacctcttcctcaagacacttcactgccatctgctgcaacatatagtaaatagacacctccaccccgatgatcaaggctatgctacctctagagctgtgcaacacacaacacacctagcccctgaaagccaggttcagaatgtagatcttataacctgtagcgtttttgttggggggtggggtgggggtagaagccggatgagaaggagagcaggaacacaggatggccttctctagggcctctgcggcaagtccacaccatccttttccaactatgaagtgctgccctggccatgaaatgcagcggggatttcccagaatggtgataaaagcaggagttgtgcattctagttaagtgagactgcacagcgcactggtctctgtttcctcttccagtgttgggaggggtttacatctgcaaattgagaagaatgttagaatgattaaaaccatagcagtgatacgtgattagtcagaacccatctataattctttaaaattcatagaatatgcaaaaaggaactagatagtaagaagcagagggagacacttctttttttcttctttttctaaatccaagactttcaaaagctttcgtgtgtgctttcctctgctcccagaaccattggctgcatccttatcaactccttgcagctgctggcttggccaggagttgaaaatgtgactgcctctcccttgggtacccataatggttccatgttaagtcttatgtataatttttcctaatttttttctaatgttctttttctgccagggtatgttttaaaaagggaaatagagtattatggaataagattacccttctatgtccttcgtgcaaatccaaccagtatttatataaatgaatgtatgttccctcatgaggcatgcaatgaaaatgacaatttgcatttatgcaggattgagcagtgttttgctcactacattctgggattcctaagctttgtgggagtagttccaaaggtttggcagaaacgagagtcaagacaccagagagtggcatgctaggaagaacagccccggcctcttcagctgccctcttttcttactttctcatccatgattatctacagtgacaagaagataaaactggaccttgcaatactagtcacagcatgaaaaatacatccacccctccttttgatagcaggttctcagtatgtaaagggaatctttttggctgcctgcttaacgcattgcaggtccagcattcctgagctgcttttgattcataaaattaaccaggcatttgagggcttctaaaagtgcttgatggacagcatttctctcaatgaaagagcaggcactgctccttggtcaaaggagagtccaaccaaggaagcctaatgagttattcctcacccaatacctggagaccatgacctgggggtgaggggcttccccagccccatgtgactgggctgttctttcctcagccctgctcttaaggggcttaacagctcttgctggcagtccaaatggctgcatagctgtcagtccaaaagtcccattatcatatcccgttcctgtatgaagggataagagtagaggcattggacatggcctcagctggactccaagttctgccctttactgtgtgccctgagtaatttaccttccccaggcatcagtttcctcatttgcaaaaacaacagcagcagtaagactaagttaatccaagcaatgcacttcacacagggcctgctcaatagatgtttgctgtcatatcacttcccagctcaaaaactttctgtggctccccagtgtctgaaggtctaaccccatcctgcctttctaagttggcctgagttcctaccagcccagggcagagaacacttgatttcctcatattttatgttacacactgcccctgccttgtgttcccagtatctacagatggtagggaatatctcgagatagcaggtttgtggtagagggcattggtcccagaagtttcactgatagagataccttttaagattttatggctaacttaagaaataattcatgtctctttgcaatatggttcaagtgtcttgagtgacttcgagtccccacctggggataatggaggtgaagcagcaagaaagcacattcccactcagtttcacaacctgcaccatgtatgtgttggtggttatttgggcagcagggagtcctgttcatggaaatggattcctgctcacataataactaagagttctgtgaactccctcagctgggcaggggcaactctggtgcttctgtctgcaagaaaggggacagacagggaggctgatgtgaggagctggttctgggaatagggtcatttgttctgggatatagggatgtgaggggagggccagctcaatccagactgatgaagagcggggagagtgatgagtgcctgcctcagcttgggctggatggatgtggggaggctgggcagtgagggagatgtggatctgacatctcagcctgagggaaagtcccggttgagatgggggaagacagaaaaagaggaatctgagaagggagaaaccaaaggctggaaatcccagctccggggataagggagtatggggacgggggaggcctgcctcaggtaaccctacgcctaacagttgtctaaaatgctccctttccttgtcatgtttgaggaaaagtggttcaaagaggccgtctgatgcgggatcacacagcgctgaagggatgaggggccccgggtgctcccgcccgtcctgctgcctcctccggtggctctctgggagccacagccccgtctagccacggaggggcctacagcacgccccaaacgctaaggggaagcgcgggaggtgcggtaggaaggcagagaaacctggtttttaaaaccaagccattttcaaggaaagaatttcttactttaaaaccttggtttttaaaaccaagccattttcaaggaaagaatttcttacttaaaaatagcgtatggaatggcggcggaatgacgggagggaccgagctgggggactggacggcgccccggggacacaggaaggaggcgcgcagagccgaggccagaggcgcgcccggggagtggaagcgcgaagacaaacgcggcgccgcggagggtgggggaggaagggccggggcgggccgccggctgccagcccagggcggggcggagccctacttctggccgaccgcgtaggcggtgcttgaacttagggctgcttgtggctgggcactcgcgcagaggccggcccgacgagccatggttgctgggagcgacgcggggcgggccctgggggtcctcagcgtggtctgcctgctgcactgctttggtgagtgaagcctgccccaggggccccgcgccggccggcgggtactgggcagcacccaggctgggtggacgcgccgggctcgaggcggttgccgatcagagacgggtggggacgggtcgctgtgggccgggaacaactcagccgtgggagccttttcaggaagagaaagttgttatttcatcgccagtgtccctcatggagtcagcaaggaactgtgtggccttagggaaggacgggctccggcccgctagcctctcctgcggggcctgcgcccccccgccggccccctcccgagctccagtgaccaagttccttcctgggcttccccagtaacgtcgctgagcgcttcagcggactgcaaaatttttcccagccgtgaacgcgcccgggacggggagcgggcgcggatgccacctgctcgagggcgacgcctgctgccctccccgcgcggtgccgtccccgcccgcgcggcgtccgccgtatcagcagagaggacttttcagaatcgccccacagcgaggagcgggtaggcaactaggaagcccagtcggcagcggcctcacgttgggattcctaagtggtgcgactcctgctcctttttcctcccctcaaatcctaaaaactagtatcagaactggttccatcctctccgtgtgttgtcagccaagtcgtcacaacaacctcaggaaataggtccccttcttcccattttgcctccccatcctccttcaccctccacacattggccccagtcaggccatagcaaaaccccgggagtacagcagtaacctcccagcgagttcaactgtacttgaggggttctcatggctggctcctgcaccccactgccagccctccagcccgtccgtccgtttgctcagcgtccgctgcctgcccgggaggtgcgcgtgtgcatctatggaagacagc

SEQ ID NO: 4004 - DNA, 6000 bp, Homo sapiens
accttagatgggagacagaattatattccatataaaagaaaaatcagagacataccaaaataaatttgttaaagcacatattagaaagacatttttacaatcatagaatgaagaaagacagaagaatgacatgaaactcagcaaccaggagtgtttaaaatgttctgcatggtgaaaaacattataaaagttagtgacaaataactgactggaagaagagatttgcaaaatataaatagctccaacaaatcactaaaagcagaacaaaccatgtaatataagaacgaacagacaaatttaagaataaaaaaagtagactggttttcagctactaaatatgctcaacttcactaataaccagagaatgcaaattgaaataatgagttgccttctttttataatgcaggtataggttaaagagttggatattatatactactggaaatgttttaagaatatgggcctactatacctgtaccgtataacaacggcagctactggtcacaagtggctatttaaatttaaattaggccaggcgcggtggctcacgccagtaatcccagcactttgggaggccgaggtgggcggatcatgaggtcaagagatcaagaccatcctgggcaacatggtgaaatcccgtctctactaaaaatacaaaaattagctgggtacggtggtgcgtgcctgtaatcccaactactcaggaggctggaggctgaggcaggagaatcgttgaacctgggaagtggaggttgcagtgagccgagatcacgccactgcactccagcctggcgacagagtgagtctctgtctcaataaataaatacattaattaaaaaatgaaataaatttaaattaaataaattttaaagtataaagttcaattgctcagtcacactagccacatttcaagtgctcaatagccagaggtggctagtggctacagtattgggctatgttaaccttttcatcatcacaaaaagttctattgggaagcactattttatagatagtttgcaaagaagtagaagatttttagtgggaggttgtattctcctggatctaacacttttaattctaggactctatcacaatgtaaatgcttttcaggggcaaagaaaatgtatgtgtatttattatgtgtgtgtgtataaattgttgtaaatatacacatatatatttactgtcaaaatatagaaaaccttataaacaagataaatgtaatattttaaacaacataattacatcatccttacatgaggaaaattgttaaataaatatttgcttccatactatagaacagtatacatctattggaagcaataatctaaatcagaaaactacttacaatatgttgttcactttttaaaaaaaaatagagacaggctctcactatgttacccaggcttgtcttgatcatctgagctcaagtgatacaccgtctcacttcccaaagtgctgggattacaggcgtgaggcaccactcctggccccaatatgttgttcactaaaaaaggcaagggtaaaataatatgaatagtatgtacttatttatttatttgaaccattttattaaggtatgattcacatgtagaaagttgtacatatttaatgtatttacatctcagtgaatttggggaggaatacatacctgtgaaaccatcaccattatcaaggccataacatagccatcacctccaaagtttccttgcaccctctttatcattattggcatgtgtgtgtgtgtgtgtgtgtgtgtgtgtagaatacaagagatcaaccctcttagtaaattttaagtatacagtacagtactgttggctataggcactgtactgtattatggatctctagaagttgtttatcttgcacagctgaaactttgtaccctttgaccatcacctcatttcatcctccccccaggacctggaaactaccattctactctctgcttctatgactttgattattttattccacatataagtgagatgatacagtattcatctttttgggtatggtttatttcacttggcataatgccgttaaatattacatagtttctatacttgtaaagacatatcagaaaatggagaaagaattatacttatcagtcacatctgcggaggggagtgtattagacaagcatgcagggttggaggataatggaggctttcatttgttactctattatcattcagggttatttgtatcctttgtgatacacatgtataatttccataaataaagagaaatatttcaaagcaggctgtttacacaaggctcagggtccaacactcagatgctacacatctgcgtttagcacacaaattatattgtagcaatgggagttgatgaattagtgtttttcttcaagaaattctataacagcccaaagaaaaatggtacagagatgaaaatgatgatttgattaaatagaatagatccagaagatatattcaaattgccctccccaatttaggctgctgggtgttgcttgagaaaatcaaattaatttacagataggaaactgcaatttctggtttccaacctgaattaggccctcaacacacttggtgatacttttatttttcccttgtcctctgtctcctgagctctcttcttcatctctttcagctctatcacccctacactcccagcagctgacgtcacagagaaagctgaagccttctgactagctctcccttattttctcactgcactcatagcttcactgcctgctaccctgctgtctgctccacccctgcctcctgctctgatgcccccaaggaggatcacgctgcatcatcacccaacctctcctggaggctgagcaaggctccagcagggactctttcctctaacaagtcctctttctaccacatggttcccaagctactttcttaccttttctctctccttcacccaatttcttgaaagtgcagtctaggtttgtgatctcctctttctaacctccaatttacgttccaacctcctggtatgtggctttgctcatcagcagtgccccgaaacagtttgcactaaagtttctataacctcctttgtgctcattgcagtgtttctggaactctgctcagcatttcaccttttggtcataacatcgttcatgaagtgcttctgcaatcacctgttaccctgcctttctttttatatcaatatccactacttcacaggtcattgcaagcttctttccttcagcctgaccttaaatcctactattcctgagcgatccaacctggtctttctctgctcattcctcaccatcccatgaggcatcatcatcagcttttatggcttcaatcagcaccactgtgcagaggactccagttcagctccaactcaggcatctcagcccagaggatgctgcctactcgtctgcagttgagaaatcccttcttcaatgctcctttactggcacctggaaatctacattttgcaagcagagcttttcatatttatttcctttatctaaatctatttgttctgatgtttttcttctttgagtggttagaaccatgacacacacatacacctaagccagaaacatcaacattctttttcatttttgcctctttcattctgggagaatccatgcaagcattaagtccagcagagtctaagtggttttaaatctcttggagctgtcaacttttgtccttccctaaagagacaacagagttgactagtaaagaacacaggctccgggtagagttgcctaaatgttcacagggattgcttcagctgacgccaccttctgaaccatggtacggttttcatgtcctcatgtgcaaagtatgggtgataatagtagtacctataacctagggtcatggtgaagatttaatgggctgatttatgcagagcatagcggggtgtgtagcatgaaacgagccagtcttccataagtactgcttattatcagccctaaggccatgctttctgccaacagacaacattgcttggtacaagagcttttaactagtctccctgactcaagcctgttcctttttaacctttccttgtaattcagccagatggaatctcccaggaacaaaactgaaaatattcctctcttatcagaatccctcagaatcacctcatgaccttccgatttgcccttttacggacgataaacccttccattttctgagccagaggcttcttcctttgtggagtcagcctcatcgctcgactaggaacataaccagctatctacctttctcagaaagcacttgggtttgctcttataacaggcactttttctaggttcttcccaccattgcacatggacacacaaaaattacactgacccctggcaccccaaagacaaacagcagaaagcactcccaggcaaaatgagctcaggacctttctgttgcctgggcccacaactaaggttcagggccttctctaaaaagaagccgcagccgaagacagaggaactgcccagagtggggctgggggtgtggagtctacgctgatactttcaggctgtttccactcttgctggttctgatgctcctttcttttgccacaagcaaccctagtggaaaactgggaaatgtccaacaatgaagttaggacagtggcccataaaacatcggattccaacctgtgtcctaaggtgtaaagacacagagtaaaggcaaagatacagtgagcctttaacacgttctcctttgttcttcctatttctctattccttctccatttccgatggtgttctctaccctctctccaacccacgtgccaacagcccctcttttctcttttattctcgcccacgtttccctcctttcttccacctgcgcccaacggtacggcccggaaaacgaactggatgcgttggacaggtcacgcgcgcattgcggacgccagctagaccgagccctgggaggctacgggctcccccggaaaccctgccaggggagccgggttttgagctcaggcgcctctagcggcggcccccagaaatctgactcgcgaggccagagttgcagggactgaatagcaaactgaggctgagtagggaacagaccatgaggtcagtgcagatcttcctctcccaatgccgtttgctccttctactagttccgacaatgctccttaagtctcttggcgaagatgtaatttttcaccctgaaggggagtttgactcgtatgaagtcaccattcctgagaagctgagcttccggggagaggtgcagggtgtggtcagtcccgtgtcctacctactgcagttaaaaggcaagaagcacgtcctccatttgtggcccaagagacttctgttgccccgacatctgcgcgttttctccttcacagaacatggggaactgctggaggatcatccttacataccaaaggactgcaactacatgggctccgtgaaagagtctctggactctaaagctactataagcacatgcatggggggtctccgaggtgtatttaacattgatgccaaacattaccaaattgagcccctcaaggcctctcccagttttgaacatgtcgtctatctcctgaagaaagagcagtttgggaatcaggtttgtggcttaagtgatgatgaaatagaatggcagatggccccttatgagaataaggcgaggctaagggactttcctggatcctataaacacccaaagtacttggaattgatcctactctttgatcaaagtaggtataggtttgtgaacaacaatctttctcaagtcatacatgatgccattcttttgactgggattatggacacctactttcaagatgttcgtatgaggatacacttaaaggctcttgaagtatggacagattttaacaaaatacgcgttggatatccagagttagctgaagttttaggcagatttgtaatatataaaaaaagtgtattaaatgctcgcctgtcatcagattgggcacatttatatcttcaaagaaaatataatgatgctcttgcatggtcgtttggaaaagtgtgtt

SEQ ID NO: 4005 - DNA, 6000 bp, Homo sapiens; identical to SEQ ID NO: 1544

SEQ ID NO: 4006 - DNA, 1801 bp, Homo sapiens
gaattcatcctagtttccatttagctctctttctctcttaccacaatacctaaaaatctttttatggggttacaactctgtctcaggagccacctcagtttggtggcacagagctccccacttgtactctgaaactcttttcttgaagatattgctatccatgtgcatgagttatttttcttctccatagcatccacattaaacaattaattaccttggatttagccaaaataaacactccaaattcatgatgtctttcaggaagagagtttgttttcttttttaaccaaaatgggagattgatcctgtctgtgtcccctagaggagcagaggctggtttgtattagggcagctcttgtagatgagtaacttttcccatggcctcatagaggctgatatagaaacttctggattcaaatgattgtttggaggcattagccaggcattgaaccaattataaagagtgaggttttgccatattctaaccctaagaaacagaaacggtagagggtaaaaatagaatagaatgtcaatacaactttagccttttccctggattctgagagttcataacctgaaaatcagagattcaaactgggagagatgggctaacaggtatgagcatgggaaaagcatgtttcaagaatttgagatgtatttcccagaaaaggaacatgatgaaaatggtcagaaaaggcaatttccttcctcttttctaatttggctctggagccaccagcagaacctcttcaatatcttgcatgttacagatttcactactcccaccagcttggagacaacatgtggttcttgacaactctgctcctttggggtaagttggactcagaggggacagttagaagggtacaggctgtggctgttgtgagtcaagagttttgtcttcctgtggtaactctgggtagaactcatgagtatgaagcaacttgtatctgtgcttccactgtttattagagcttattttatgaaaaggatgggaagggcaaccctgaggtagcattaagcctggacacaccacagtgaagtttccttgataaccacctgtagcttgttcagttctgttagtactggattttgagaaagagaaatagaaactcaagagatctgagttgatccctcagagtctacattaattctgtctccccaattctctcttcctcattattttccttggaccaactgatatctttattctctgatctcttgcagttccagttgatgggcaagtgggtgagtgatctctaactcagcttctccttctatgccactttcctacttccaaaggatgggtcctattaacctgcagaagagcatatagagaaagcagagaaagaagaaagatttataaattatgtaaaatctcccatattcagagcatgattttcataaaaactatgatttgtaggctttctttctaaagttttctgaatgagctctttcctctgagcgaaatgcctgaatgtatatataacagcaggaaagggccagaattgcacaaacactaaagtagtctgctgacactgaagtagtctgctgggtttcccaacatcccctaaaccagtcccctttacaagaaagcagagtgggttttttctcctcagaaagagccaggcaaatactgaaggcttcaaagagaggagtttgaacctccgtttccaatgtacaagctgctgaagccctgcaatgtactctcagagacagtatagctcagaggataaggaaaacagctccgcttggcttgcccaagtctaaaaccctgcttcattgctcccaacagaaaaac

SEQ ID NO: 4007 - DNA, 6000 bp, Homo sapiens
aaaaacccagccctgactccctctccatattttatcattattctattaccaacgaccctgggctaaaggccagcagtgacagtggctgggacaggggctgagatgcctgcacagctttgctgtatgtgcctctggctctgaggcttggtttccttccagaaaactgttggctgtgctaggtgtcagttcacccttctccaggggagaagctgggcctcgcaccagcccctggagcctcaaatgtgctccctcacagccactggggctgctcaccaaccatcacagtaggccctgaactgggccaaggtcagagttactctccctcacccacactccccaaactcacacatgctaagcaacaaggggaaatgtgacaggagaatgagctctactctttacatgcgggtgtagcctctggcaccttcgtggcctggaagtctaacacagtccagtgaaatgtagaaatagctacaaagctaaagtgacctttggctgcagtgaacacacgagacttggactaagccgaggcaggtagcaggtctgagccatgtatctaacaagggagactgacaaactggactctgttcagagaagaggagaaaggacaaacaaaatattggaaccgtgaaagcactaaaataattgtaagaaataattgcaggagctggggatatttagcccagaaaggagaaactttagaatgattaactttcttcagagagttgatagactcctgagtagaaaggaaaactaggtaatgctggccaggcgcggtggctcacgcctgtaatcccagcactttgggaggccgaggcaggtggatcgcctaaagtcaggagtttgagaccagcctgaccaacatggtgaaaccccttctctactaaaaaatacaaaaaattagctgggcgtgggagcggtggctgcaatcccagctgctcaggaggctgaggcacaagaatcacttgaacccaggagacagaggttgcagtgagccaagattgtgccactgcactccagcctgagcaacagagtgggactctgtctcaaaaaaaaaaaaaaaagaaaaaagaaaaagaaaaagaacactaggtaatgatactagcccacacctgagtacttttatatgccaagcaccatgccaattgttttacacactttctcatttactctaaacagcagttctgtgatataactgcaattattatccccattccacagttgaggaaaacacagaaaggttgaatgacttatccaaggtcacgtagtaagtggagtcaggacgtaaatccaggcagtctgcctcatgtgcctgagacttgcctgccatccatagacatttcccatgtggggccctcagcagacttcattgaaagttaaaggcaggcaggactgacagcagcacaaggaagaattttactggaagtattccacaagggatattgtgtggatactttgggtggtagtgagctgcagaacagtagacagattcaagcagaggatgcaagaggtattaccctgaacagttcgcaaggagcattacagcaacaatagcaccagggaacttgttaggaatacaacttcttggaccacccccacccctgccctgagtccctgaattagaaactctgcagctgggcccagccatccgaattgttcaaagatgccctgctggtgatgttaatacacgctcaagtttgggaaacactggcatgcaagtgtctgcacacttccagggactggaagactgctgcagtctcttctgcttccaaaaccccataattctacagaagtaagatggaaatacaattcaatgtccactcagtttttctttgtcttaatgtcgagcacttactattagtatcttgaaaacaatctatcagttgctaaattgtgtaactggactcatacaccttagacattgaaaggcccacaggatacatatttgggaggctgtggatgaccaggaggcagcctatatttcagccacctcattgcttcactgacttccaaaccagccccatatgtccctgctccttgctggttcatactgttcctctacccctgccttttgaaatcctgccttctttcaaagctcaatttaaatgtcacattgtccacacagagtgcctaacactgtctgcgcccacagggcagtctccttttcttcctcccaacctcccctgcttcctgggttctctctcacttctggggtacttagagctcttggtgcattctgcttctgcttcatctcacgggaatgcaggcctctctcagcagtgtgctcgccttgacagcaggccccattcagtcatcgtcaaccccgcagggcctggcacacaataaccttgtgagaagcgaccaaaagcaacatttgcagaaaactgtgcatgcaaccgtttgcaggatggacagacactacatggctggtgaaaaggaagcgcgctgcgattcacttttgagccctgaggtctttgcagaactttgaggttttttgcaataaccagtatgaatacatgtgtgtcagctagtacttaagtggccccaacctcactcacccacaactctggttgcctttaacttctcttcatgttgctaataatcactgttttacagctcctggatgataaggaatgctgagtgctctcagagccaacctttgaaaggttctcatagacccaaggagggagaagtctccattttagagagcagagaggtcatctgtttgaacactatcatagagacagcaaataaggatactgggagagcagagaccaggcccagtttagcagtttatgccagtgggacccagtatcctgtgggctgtggtggactggtcctgtgaccaggatgatggtgagacactcctcttcccaacatgggttcccaacccccaggctcccagaatggactcattctgcagtgaaagctaacactttgatggagtgaagaagtatttcttttcttttttcttttttttttttttttagagacacagtctcactctggcatccaggctggagtgcagtggcgcaatcacggttcactgcaagctccgcctcccggggggtcacaccattctcctgcctcagcctccccagtagctgggactacaggcacccaccaccaggcccgactaatttttgtatttttagtagagacaggtttcactgtgttagccaggatggtctcaatctcctgacctcgtgatccacctgcctcggcctcccaaagtgctgggattacaggtgtgagccactgcgcctggcttggagtgaagaaatatttctaatatctgtctcatttgacgatggcttcagtggagccatctgggagttctcaaaccccagagcaccctactgtttttaggaccacagagtactacaataacaggaataagaaggaaaagagagtctctagactagttatgaaaaattttcccccaccctccctccacccttgaattcctgggtagcctggcactgggtggcaatcatgacaggtgttcctccagaaccgtggggcttcctggtgtgctgtgccctttggcacagggcctggcccagccttgcaggacttagagcccaatgcttctaattctcagactaatgttcctgccatctaagggcacaaccctagaatttaggaacaattgtaatctcccaagccatcactgaccaaggaagaacagaacagaatagaaatggatgggaagctgggagtggtggttcaggcctgtaatcccagcactttgggaggccaaggccagaggattgtttgagcccaggagttccagagcaggcggggcagcatagggagacctcatccatacaaatcattttttaaattatcaaccgagcgtggtggctcacgcctgtaatcccagcactttgggaggccaaggcaggcagatcacttgaggtcaggagtttgagaccagcctggccaacatgatgaaactgtctctactaaaaatacaagaattagtccagcatggtggcaggctctcgtaatcccagctactcagaaggttgaggcaggagcatcacttgagcccaggaggcagaggttacagtgagctgagatcacgccactgtactccagcctgtgtgacacagcgaaactccatctctaaataaataaataaataaataaataataaataaaaagttatccaggtgtggtggcgtacacctgtggtcctagctgcttgaggggctgaggtgggaagatcactcgaccccaggaggtcaaggttgcagtgagccatgattgccccactgcactccagccttggtgacagagcaagaccctgtctcaaaaaaaaaaaaaaaaaaaaggaaagaaagaaaaaagaaaaagaaaaaaaatgggtgggtgggaagataaggtcagtcattcatcctccccccaccacatcaggaccattttggtgcccccactcgttgcctcccctgctcaccaccaccctcacccaagccttcttgacagctccctgaccttcttccctttcagcctggagcagctgtgttctctgtcctacttctaaccaaaacctactctcaggagaagacttggtacctttctttatacttgagaggacattctgtccttttatcttctagttattctatcatcagtcctttccttattatgaattagcaaatacaaaatctttgttccccagggtaaagaaaagaattttaagaagtggtttttcttagccccctcagcaccctagtctatttctaacaccaaaaagacaaaacaagggagaggaaaggagaaggagatggaggaccagttgcaggagagaaaggagaaaaaaatccacagtgggggtggcggaagatctatgacttctaacaacccattctgtggttttcaaagagcgaatataataacagctatgaaagtgtgagcaatgacgaaactggagagatagggttttaacaagatgcaaggacaatctgaggactgagagccatttcaacgtgagcccccagtctgagaacaagaaagaagaacttctgtctcgaggtaaaaaggcctgctggggacctggggtccaggtgaagggatgggatggttgacagaactgctcaggtgaggacaggcttctcatgaggtccctgagaaacttgccttttggagggaaatgtcctctgccctctggagcctggggagaaggttatttctgcccgccagaccagcatgctcgcttttcttccatgggcattcaggaatcctggccccattctgacattcctcaaatggaggaattcctcaaattaccagaggaaagttaccaaagtttagatctgctggagctcttcaaggattggcctgagacaagccgggaggtgccacggggcttggagctggccctgtgaggcacctccgggggaagttcatgtcctaggtggttcacgtcatggacctcttggaggtccgtgaatagatttattcatgggatttgtgaattggggggaaaaatacatctttattttcactaatctttaattgaaagtcagcacttgcttcagttatgaatgtagacaatgaaccacaatagaatttgccatcaatagaaaacacaaatattttcaaatctcattacagtttttatagatttctccaaatgtccttaacgctcagcactactacagaattacaacagttattaggctgatgtcaaatctaaagaagcatgtgtactgctctaccacacattcttctaatgttttgacaactgtcttgtcataatttgttccctttattatcccatgtatcttattaatttttaaatgttgttctgagaagggactccatatgccttcccagaccaccaaagaggtccatggcgcctttatgtcaggcacctgctttggtgtgttgagcaggaagcctgagatctcagacaagagcttcaagggccccccagcccaaacctctgtctactaacaagtctggttctactttaaggcagttggggttgtggag

SEQ ID NO: 4008 - DNA, 6000 bp, Homo sapiens
ttgacaaaattcaacaatccttcatgctaaaaactctcaataaattaggtattgatgggacatatctcaaaacaataagagctatctatgacaaaccaacagccaatatcgtactgaatgggcaaaaactggaagcattccctttgaaaattggcacaagacagggatgccctctctcaccactcctattcaacagagtgttggaagttctggccagggcaattaggcaggagaaggaaataaagggtattcaattaggaaaagaggaagtcaaattgtccctgttggcagaagacatgattgtatatctagaaaaccccattgtctcagcccaaaatctccttaaactgatgagcaacttcagcaaagtctcaggatacaaaatcaatgcacaaaaatcacaagcattcttatacaccaataacagacaaacagagagccaaatcatgagtgaactcccattcacaattgcttcaaagagaataaaatacctaggaatccaacttacaagggatgtgaagtacctcctcaaggagaactacaaaccactgctcaatgaaataaaagaggatacaaagaaatggaagaacattccatgctcatgggtagaaagaatcaatatcatgaaaatggccatactgcccaaggtaatttatagattaaatgccatccccatcaagcaaccaatgactttcttcacagaactggaaaaaactactttaaagttcatatggaaccaaaaaagagcccgcatcgccaagtcaatcctaagccaaaagaacaaagccggaggcatcacgccacctgacttcaaactatactacaaggctacagtaaccaaaacagcatggtactggtaccaaaacagagatatagatcaatggaacagaacagagccctcagaaataatgccgcatatctacaaccatctgatctttgacaaacctcacaaaaacaagaaatagggaaaggattccctatttaataaatggtgctgggaaaacgggctagctgtatgtagaaagctgaaactggatcccttccttacaccttataaaaaattaattcaagatggattaaagacttacatgttagacctaaaaccataaaaaccctagaagaaaacctaggcaataccattcaggacatagtcatgggcaaggacttcatgtctaaaacaccaaaagcaatggcaacaaaagccaaaattggcaaatgggatctaattacactaaggagcttctgcacagcaaaagaaactaccatcagagtgaacaggcaacctaccgaatgggagaaaatttttgcaatctactcatctgacaaagggctaatatccagaatctacaatgaactcaaacaaatttacaagaaaaaaacaaacaaccccatcaaaaagtgggcaaaggaaatgaagagacacttctcaaaagaagatgtttatgcagccaaaaacacatgaaaaaatgctcatcatcactggccaccagagaaatacaaatcaaaaccacaatgagataccatctcacaccagttagaatggggatcattaaaaagtcaggaaacaacaggtgctggagaggatgtggagaaataggaacacttttacactgttggtgggactgtaaactagttcaaccattgtggaagtcagtgtggcgattcctcagggatctagaactagaaataccatttgacccaaccatcccattactgggtatatacccaaaggattataaatcatgctgctatgaagacatatacacatgtaagtttattgtggtagtattcacagtagcaaagacttgaaaccaagccaaatgtccaacaacgatagactggattaagaaaatgtggcacatatacaccatggaatactatgcagccataaaaaatgatgagttcatgtcctttgtagggacatggataaagctggaaaccatcattctcagcaaactattgcaaggacaaaaaaccaaacaccgcatgttctcagtcataggtgggaattgaacaatgagaacacatggagacaggaaggggaacatgacacactggggcctgttgtggggtggggggctggggaagggatagcattaggagatatacctaatattaaatgatgagttaatgggtgctgcacaccaacatggcacatgtatgcatatgtaactaacctgcacgttgtgcacatgtaccctaaaacttaaagtatgataaaaaaaaaaaaaagtggcctccatggagcttgcagtgagccaagatcgcaccacttgcactccagcctgggcgacagagtgaggctccatctcaaaacaaagggggcctccaaaagagactgtttgctgaatgaatatgggcaaaatgcaaacgtaatagaaagaattagaaaacagggtagcatctgagtagaggtgagactgtattgtttgaaagctctttctgggttggacctttgcagaaactctgcaaacccagttccacatgcatgtgcatccatacacatacactccttcaaaagcctcatatgttatcttggaattagttgttcttatttctcactcataatattgctgtctagtaatagcatgagtaactgagttgagtctgtatattaatttggatgtatcaagttatttttcaatgaagaaattgacttacttgcaaattgtcagctaggcaagagagagaacatttgagtcaaggtttaaaacattgtataagtaattttaatacaacacaaaacatatttgctatattcaaaagcaattaattataagacacaattgaagtagggggacattaaaataaaattacattgttaactacattttaaaagtaattcttgcattatttgtaaaactgattcagtaggaggaaattaatactcagtttataaaagtattcatgttttcctttaggcatttcttctagcgcattcaaaattatccaatttacaagtaattcattttaagttaacttctagcatataaaatggttgtgttgaaacactgtcttcagaattttatttttaaaagatactattttagtataaattcacatttatagttgaatgcttttgtgaaagatattagtctttaaaatattttacaggctggccttgttggctcatgcctgtaatcccagcactttgggaggccaaggcaggtggatcacttgagcccaggagttcaagaccagcttgagcaacatagtgaaacctcatttctacaaaaaatacaaaaattaccaggtgtggtggcacacagctgtagtccctactcagaaggctgaggtgggagggtagattgagcccaggagatagaggctgcagtgagccatgattgcaccactgcactccagcccaagtgccagagtgagaccctgtttcaaaaaaaaaaaaaagttcgacagttccaaaacacattaatgttaattagagtctgctaagttgctataaatacaacaaaaaattcaatggcacaaacaaaatatcagttgcctctcatgaaaaagtccaagattagcaggtgcagattggaagagcaaaattgactcagggagtggtagaaggagagcaaggatccaaggcatgagccacaatccatgcctcttacaacccctcacatctgtcaaatagaacccttgtctggatgggcccttgttctaacccagtgcctgaaatcttgtatctgttatattggtggttctacatgactttatatttgaaaagttacattttagaagtggatattttgtatttttggttactaatataactgtgtgaaagcactattaaaaatacttttatttcgttaaaattacctgtttatgttttggtctcctccactaatctgtaagcccctctgagtaggaaacaatacattcctcactatactccagcactcagctcagtgcatggggatttaaaagtaaatttcttccagaagtgtagattcttagatccagattgtgaggaggggaggagagaggtataggtgagccgggggcggaagtgggggcaggatcatcttaaggaaggagaccactactactactgctgccctcctcccaccaccttgcctcgttcacaagacaggaggagagaaaaagcaaaaagttggaaaaaaaaaaaaaaaaagtaagataaatagccagacaaccttggcaccaccacccggccctaggagttaaaaaaagtaataataataacatcaacccctgacctaaactacttgtgttatctgtgaattcctgacactgtatgaaaaaagcattgtagcccccagtcacgtttcccactcttgtttgatgtatcacgaccctttcacgtggaccccttaaagttgtaagcctttaaaaaggccaagaatttctttttcggggagctcggctcttaagacgcgagtctgccgacgctcccggccgaataaaaacctcttccttttttaattcggtgtctgaggagttttgtctgtggctcatcctgctacaatctgtttgaacagatcacctgaaaggtaggtgttcatttaagcatttggagtagaactggctttggggttgttgacagttttcccttcactaggaagtgtttgtcactttaaggcaaaaaccaggaagttaaaagtggatgcagaagcgagcacagacggggctaggggtttcagagaaagtaattgagagtgctggcaacagcagctgaaatatagagaagttgtaggattaactttttcgcccaaagcagcttcagcccacgttttattcccatcgagggagggagaatgggtgccgctgagtgggcgggggagtggtccctgaaaggaggtggagtgctacagcccctccccgttggctctcgctgtttgtccgttgttggtttatactaatttgacaacagccgcctgttgagtctcctccagatcgcagctgaaggatctgttgagcgcttcaggaaaggcggtgagatccggtaccgcagcagagcactctcagctctgggtcttgcaggcgcagggctcccccatgccagcagaaagatttcctctggtgaagaggaccgtcgaatctgtcctcctcaagacacctcttgtacagaatttattcgaatgccacggccaaggtcttccttgaaaaatgttaaccgatgtgtgctttttgtcttttgtcatcctttctttaggacaggcgacactaacaggtgaagatctcgggagaccatgactaagaaaagaattgctgtgattgggggaggagtgagcgggctctcttccatcaagtgctgcgtagaagaaggcttggaacctgtctgctttgaaaggactgatgacatcggagggctctggaggttccaggtacatacatctcctagtcccttaatacttgaaaccctccctgcaactaggtgcatacgacagtttatcttaacagtgtcaggtggccgggcgcggttggcacacgcctgtaatcctagcactttgggaggccgaggcgggcggatcacgaggtcaggcgatcgagaccatcctggctaacacggtgaaacctcgtctctactaaaaatgcaaaaaaattagccgggcgtggtggcgggtgcatgtagtcccagctactcgggaggctaaggcaggaggatggggtgaacttgggaggcagagcttgcagtgagccgagatcgccccactgcactccagcctgggtgacagagcaagactccgtctcaaggaaaaaaattaaaaaaagatagttaaacttattatattccaaagaataccagccacctttattgatctccaaactgacatgcattggatttgctgggtttgcttttatttttacattttttgaaggagaatttttattctttttatttacagaaaattcagcagtgtacatttaacccagtttagtggcaacttctttcacctttcccttttccactttggtgattcaaacccacagatttaggacccaggacattgcctccccattggcagcgaa

SEQ ID NO: 4009 - DNA, 6000 bp, Homo sapiens
gggaggcagaggtcgcagtgagccaaaatcgtgccattgcactcctgcctgggcaagaaagcaagactctgtctcaaaaaaaaaaagaaagaaagaaagattaaaatccccagtcctgggactctcagagctcaagtgaagctgcactcagctgttgccttcatgccctgacttcagtgggagagaattaggcatggttggtagtggattccctctccttttctcctgtccatggaggctattgttccaagcccaccacaagagttcttaagcctgggatcccagaagattccatttgccttaagcctaagaagtatggacatgatcttgatcttgtctttgggattaaaacttgagatatgataagagtaggctcatagatctaaacaccaggagcaaggaagtctgtgtttcttttgctttctgcttcttggaacagagtgttcttgccctttttagccagtaaaagtcttaaaggggacggcttatgcctgtggtgtctgcatcttaaccagcagaaaagtgtgacctcagcccactaaccatggctccaattacccatttatggcctccaatgaggcacggaggactcaccgttcttgcaattagatgctgacaaataatttgcacatgttgtcatgtaggctgtaagggaggtagccctggaccacagtgtcttgggaaggaaacttgtagagtcagagattcacttggtagagaagacattggaaggtctcctcatttccccccttgccactagagagaagaaaaaaaagaagcaattttcagtatgccagttttaaaagacttgtgaagaaggtgatggtgcttcttcctggaaatcagtgacagtgctgaaccaccttcataatcagggctgaatacaatctcttctcctagggttggagtccattcttcttgtgctatctgcaggtctgtttgctcctacctggagggccctgtgcccgcctgtcttaccaggccaataggtttcatgagaatttcttctacagccatggggagaaagtgcctaatctttcgcaccaggtgaaccttttctgtacttattgagtgatcttgggaaagttacttcacttctctgagcctgaattttcttttccatgaaatggaaataataacatactatctatctcacagtgttgtgaggtgaaaatacctggtacactgaaggccttcaataaatgttcctcacagccattaaaaagaacaaaatcatggctattgcagcaacatggatgcagctggaggccatcgtcctaagcaaattaatacgggaacagaaaacaaaataccccgtgttctgacttctaagtgggagttaaacattgggtactcatggacataaagatggcaacaatagacactagggagtagtagtgtctattgtatagaaggaggagggaaggagagaggcaaaagttgaaaaaccatcaggtactacccgcccactacctgggtgacaggatcaattgtattccaaaccttagcatcctgcaatatgcccaggtaacaaacctgcacaggtaccccctgaatcaaaaataaaagctgaaattaaaataaataaatttaatttaaatataaaaaatgttgctttttcttccccttcattatagcacaacaaagagatcactctgtacgaagctgtttcccaaatgattttttctcacataatttagcacttcattataccatcactgacacacatacatataggatactaccctttatactaattgttttgtctcaatagctcttttctacaactagaatgtcagctccttgtggacagggagagcccttgtttctcacatagaataggctgggcccataggagtagccaatgattcctgttgagataagacactgattatagtgagaaaggctttataacgtcatttttctgtctttttatctcaaagtaaaagaatgtgaaatgtgcctagtacaatgcctggcatgtaataaatgttgaataaagtttattttgcaatcccacctctacagcttttccttacaggtatgatttactaattctttgactggatttgggcttcctctctaaatcccgagtcctccatattttgtaatgcgtggaacacagactttgatacttctttctaagaccgtttcttgtgtgaaatatgaggaagaaggggagggcatgggagaacctcagttcccacccttggccctcgtcctgtccttttctctggtgcattgaatatctgcttacggggtccttcttagctatgtggtgattgccaggttaagcccctttagagaatcacctcacatccacagcccaaatgacttttttttttttttttcaacttttgttagtcattgcctgagccaggtgcggaataaaccacatttgtgaagcccttgctgaagcaacgtagctgtcctggatgccatgatgaatggtccccgggtggagagttgtttgacctcattgacttgggatgatcacagtcagagacctcagccttctcccagccctgaggcgaacttcctggacttttctagcaagccatccagtttcttcactgctttagttctctgtcagccaagcacgaagggaaaatttaccttgtataccctgctctccctccagggtcatgagtgtgtctgtatctgggcagctcttcccttctgcacattcagaggaaaacggcattttcctgtaatctccaggcctgcccgagatcatctctcctctggcagcccagtgatctaggagtgtacattccactaaacctttcccactttcagactatctcccagctgagactttatgggttctttaactggctacctcctggatggagataataaggtgttcctaggtgtcccctgctcttgtagagaggctgggatgtaggggcaaagtcacagtgtgaaactcatctctgttttggagaagcagggcttgctattggtttcacatgctaaattccatcacaggactttggtacagccatggcaagtacaggcagggaggaggttgtgtattgtattgtattgcattgcattgcattgcattgcattgcattgcattgcattgcattgcattgcattgcattgcattgtattgtattgtattgcattgtattgtattgtattgtattattattttgcagccacatctacagtacctccatgttcccaaccattctatgtgcttttcacatactcgttagtcctcatgacagccctgtgaagtagataatattcccaatttagagttgaggaaactgagatgcatagaggttaacttgcccaatgtcacacagctagtaagtggcggagccgggattcaaacccagtcaggctggccccagaatctgctctgatgctgcataaaagtggggtaaactctggccaaggaatcaagaatcctacatttcctttcaccagggctgttgcctcccttgaaactggaaattcagccccttgctcttttccctcttgctgatcctaagctcattcacccatgaaaaatatagcccattaaggaaacatctttgcagaatcttggaatgcttgtgaccggtgctttgcgggaaaggcatgtttcaggtgatgatgtggagcaaagggaccattctggcttcctgccctgcctctgccacatactactgtatatgacattgacaagtggccttttctctgggcctcagtttccctggctgttccagatgatcactgaaattttctttagttctcataatctgtgggctcttagtcattgttttgtctgatttcagtccactcatagtaacctctgttgttgacacttacctcattccaactgggtccacggctaagtgtttaagttgaggagtctgggggagaagttggagaatgggagggtttgagggaagagatacccccacagtttctgaatttggtcacctgtggcatgtgatctaacaagagccaaccttactttcatcagttcaattccagttgggagacctgtttgctttcacggaaggagcaataagataaatgttggcattggtgaaaacttctaatcctgattctaccacttactttacaaactgggtcgccataatcatgttacttaatttctgtgaacctcagtttcctcaaatgtaaaatgcagaaaaggtctaccttatagaattggaaaatagaatgattaagataaaaataggcaatatatatatatatatatatatatgaagtctctagcccagtgcctgatgcgtagaaggtgctcgcctctctttagaggagaaggggagagagtatgattctgggagtgaggaatgccctacacttttggagctgggaggttagcatttctttcctttcaggttagtcctggtgcctattctgggtgctggatggttgtgacttgtgagaccgtgttttcctgtgctggcttatgcttagttcattggtgtgggcatagtggaaatcccaaaaaaggcttgttatgtgagtgaacaccctcttttttctgatgatgggaaaaggatgggaagagggatctcttgggcagtgccaattttcctgctgatgctccaggaaagccatggcctgggaagtctgaggcgacgcagcagaggggtgggcaggaagagacttagggaggtggtgcaccagcggcccgggggagaggcaatgtggaggactgctgtgaggacaaggacaacaggcagacagacagggggagggctgcagggaggagggggctctgcctccttgggggccagggaaggggagcacagtgagctgaggctacgaggaggtggagggaagaagacttttagagcaaagactctaagagcacaaaagagagagaggggagggagggattcagaggggaaaaggggtggagagagaaagagtaggaagaagtgggaggagggaaggcgacagatacgattaaaaagacggtggaagaggaacaactgacaggctcaagagcaaaaagcgtgggcagttggagaagaagcagccagagtgtgaagaagcccacggaaggaaagtccagggaggaggaaaagaagcaggtaagagtagacttgaatttgaacagctaaaactacaagtggatatgaagtagccagaggaagggagcttggattctaggctggataaaaacaaagctctttctttctacctgtgagtttattccttacccctcccgctatttcctgtgatagtgaggtatggatatattaaaaaggaaggtttagcgaagcagcagataaattacttccttgatttagagggagatgaagaattgcgagtggagggcccttggggttccagcctacttttgtggagttcagtcctctgggggcatcttagaagtgggtcaccagtccattcccaagaacttttcttagagggaattggccctttaaaaataaaaccaacactgttttacgatgcttctgctaggcatggaatctttttcaaaatgcctttagcagcatctaggggagtgttttgcttttttttttttttttctccctaaggcatgttggatggtttaaaaatattccctgcttagtttcctgcagagtatcatgtccccgctgtgcagtggccacatgtgagagatccaggctgccacttgcagccggaggaaagaggcatgtgaaaccagcgaggaagcccaggaaagcacccactgaaggtctcctttccacttgtggtgtgaagtaggaggccatggggtagaaagattctgttagtttcttcctggacctttcttctgagcatgcagtgaaagagcccaaactcaggggctgggaggccttgtagcagacacatccccatgctgggcctcggtttcctcatctataaaatggggaatttgaagtagaaggttccctctggttccattcagcagtaacggtgtgtgaggctgtgattccataggctcaaaggcaactcagaaccactgaaaaagggaggcgcaacacaagaatt

SEQ ID NO: 4010 - DNA, 6000 bp, Homo sapiens
tgtgtgtagtgtgctaccttctctaagggtagcatatatatatatatatgtattaacgtttttaaaaatgggtaaaccagctactcaggaggctgaggcaggagaatcacttgaacctgggaggcggaggctgcagtgagccgagatcacgccattgcactccagcctgggcgacagagcgagactctgtctcaaaaaaaaaaaaaaaaaaaaaggataaaccaaatactaatggaaattgataacactggggagggagtggatattgagggaagctggattctctgagtatactgtgttaatgtgtttttcatttggaacaatatagatgtcttacataattacaaaacaaaatgagtaaatggagacagtaaatgttccatacgtgttccattttgttctgttcctacagatgtctgtaaacagtcatctcagataaggagtttgtatttcaattttttttctcatttctcagtccttccaaacttgattttcatcacgtgtaaatctcagtttaaagacttttcagtagaccaaatccaatggcctttttctcccccatgttctttgccacattaatcctgttaagtcaccccttccttgaagtgccctctggcttatgtaactgtgaactttactaaattctaggcaagaagtgagcatggcccccttgttctcgtccatcattctcattaacatttttatggtacctgcaaaggatgtctgttggtggcagctgaggattcaaagataagcaaggcagttctgctgtcaaaactgacacataagagattgttaatgaaacaaaatattttgagagcaggaagaaagttacctattctggcatgaaagtccaggaaaacggccaggcacagtggctcacgcctgtaagcccagcactttgggaggctgaggcgggcagaccacctgaggtcaggagttcgagaccagcctgggcaacatggtgaaactccgtctctactagaaataccaaaaattagccaggtgcagtggtgggcgcctgtaatcccagctactcaggaggctgagacaggagaatcgcttaaatctggtaggtggaggttgcagtgagccgagatcaagccattgcactccagcctgggcaacaagagcgaaactgtcccccacctcccaccttaaaaaaagaaaagtccaggaaaacttcctgggaaaaaggtgatacctgcatttaatcttcaaggaaggatagacctttcccaggcaaggagaaattcaatccaggtggatgggatgtttctgaggagaaacagattgataaatagcatggtgtataatgcactagagctgtttgggattggaggcaggctgaggtcagagccagttagggagctcccaaaaaccatttttcagccctttttcacatcatggcagggaaccatttgaaacaaaattgaggtaaggggaggcagctgcttcagcctggaggctgttggctcggaaattctagctgccccagtttgatatgcttattagatgttcgtgtggtgatattgaatagacagagattttgagtctgggcttgatgggaaggtctggactgcagatataaatgggaatcatcagcatataggcagtattaaagtcgggactgcctgtggtgagcaagaagagagtagaaggcttcccgcccctgggactgagcccataggaactctaaaattaaatggccccagcaaaggggactacaaaggagtggttggtgggacagggcactggcacctgggggaaaatgatgaggtcttccctcagaacttgaaaatatatacagtcatttgtgtattctcaagggattggttccaggaccctccacagataatcaaaattcacaaatgctcaaatctcttatataaaatggcacatttgcatataacctaggcacatcctccagtgtgttttaaatcatctctagattacttgtgacacctaatgcagtgtaaatactatgcaagtagttgttatactgtattgtttaggaaataaatgtcaagaggagaatgtctatacatgttcagtacaaatgcaaccatcataggcctaactacattttccatccacagttggttgaatccatggatgccaaacccatggatatggaggactgatggtataagttttcactctaaaagtatgcaagatttctattttagcaaataaggtatcagtggagagtaggcaaagtcaccttaaagggaagaaatggctccctgctggccaaatgctctcctgctggacttggctataacctaattgaaaatgttaacatatttggctgggtgcggtggctcacgcctgtaatcccagcactttgggaggccaaggcgggcggatcatgagatcaggagattgagaccatcctggctaacacggtgaaaccccgtctctactaaaaatacaaaaaaattagccaggcgtggtggcaggcgcctgtagtcccagctacttgggagactgaggcaggagaatggtgtgaacccaggaggcagagcttgcagtgagccgagatcacgccactgcactccagcctgggcgacagagcgagactccgtctcaaaaaaaaaaaaaaaaaaagaaaatgttaacatatttaaataaagaatattgtcaacctggctgtgtgtggtggctcatgcctgtaatcccagcactttgggaggcagaggtgagtggatcacttgaggtccggagttcgagagcagcctggccaacacggtgaaaccctgtctccattaacaatacaaaagttagccaggcgcagtggctcacgcctgtaatcccagcactttgggaggctgaggcgggcggatcacaaggtcaggagatcgagaccatcctggctaacacagtgaaaccccgtctctcctaaaaatacaaaaaattagccgggtgtggtggcgggcacctgtagtcccagctactcgggaggctgaggcaggagaatggcatgaacccgggaggcggagcttgcagtgagccgagattgtgccactgcactccagcctgggcgacggagcaagactctgtctcaaaaaaaaaaaaaaaagttaactgggtgtggtggctcgtgcctgtagtcccagctactgggaaggctgaggcaggagaatcacttgaacaccggaggtggaggttacagtgagctgagattgcgccactgcactccagcctgggcgacagagtgagactctgtctcaaaaaaaaaaaaaaaaagaaaaagaatgtgtgttaacctgaagacgggtcagcaatgaaagtctagtaaagggagagtccctgaggccagtccaagcaccatcctggaaagccgtcacattcagagtagtccaggagtgctggcaaggctgccaatagcaaagaggtgggggtagaagattgttgccaagaagagttttctggacccattggcatggctgcttattgcagatggccagatgccattaaagatacaaatcctccagtaatgtcattgtgcatttatacattgacattatgattctgatttggcttcagggagagaatgtactagacatgtagatatgagttttcagtctgagtgacagttaaatatttatgataaattaatatttatgtattatggctttatatttcagaagattgtgaactttgttggcatgaatgattatttccaagatccagctttggagtctgcaaagcccaggcccgtgtccctgtcagaggtaaattcaacctggcaaatgttacctgtgtggtctcttcggacatagcctgtcagccttctccatgtatatatatcagcattctgaagcctccacatttagtaaggcagaatcacacgctattagatctgagagggacctgatgcagtatctagtccaagccccccttttccagatgagaaacctgaagttcacagatgtggagaacttgaccaagagttgacagcttgttagcagtgagaacccaggtccaagcccaggtcagtgctgtctggaaggtcctgaccttatctggcatagacacattcaggatgtatttccccaaatcaccatattccctctcactccttcggcagggatggtcatcaagtgtcaccaagtggcatgtcttggatctctgagtccaggttattgatgcaagagcaaaggaaagatgaagggaaaagctgaaacaatttacttcttcctgcccgggaagtacaagtgtgtggaggggaggggagggaggtagaggagagtaagagaaaatggagaagggtattgagaggatcctttttgagtcattggagcaaattaatggaaggggaactgtccggttggtcaggtctgtaaaaatccctcaacttccccagtacttctgctaccaccaactgaatggacaggatgaggaggtgtccactgtaaataagtaacctggactgttttgtgaggaaagagatggaaggaatccaggggtctctgactctggcagttcaggatagaaaccacaccttgttatctctgctttctctaaaatgtccaggtaaacttggaataggagcactctggatttgggagactgttgtgaaaaaggagtttgagagcagtggagaaggcaagggaggtgttttgaaggcagcaaaagcccctgaaattattgggtcctgccatactgagactggggtgctaaggaaggggctgccacattccccatctccctgtcttcccacttgtcttcctaacatcactgtttttttctttagttccttctatcttttactaggaagggcctgggaagggctgggtgccatttccagctgttcttgtgacaacctccggccctttcatcatttctccccgtgccctgactccctccccatcctcttttctcctctccccaccaatggtctctcccgatgctcagtggcgcggggtaggggggggcggaggcggggctggagtggtggaaggggggtggcaggtctgcattgccgcttccctggtgccgggagcagtcgccgctgccgcctccgcccgcggccgggacccccgtcctcgcccgggactccttacccggggaacctagaccaggtgagacccctttctcagtcgctcacctcctccccgcccctggcagaagcatctttgccttgccttgcagccattttatcctccgatgctttgcttatggggagggtgacgatcccctctctaggggtgaggggggttggtgggttggtggtggtttggggatggacatttatttcagttgtgctcttcaggacacacacacacacacgcatatgtataatattggtgaatggggaggaggggtgtttttctctaccttaaccaagtccccactatccccttcggagattaacgtggtggtggggttgtgaggtgggatgaggttccctcaaactcctatcccctcctcaccttgacgtccccccacccccaggatgaatgataaatgaccttggctggggctggagaatggatgctgcctcagtgtgcacgcctggacttgggtgggtggggggcaggggaagaagggcaggtgaaggatggagggaaggggagtgaagaatggaaatactggggagacagagatgtagagccgccaggtgttgggggcatggatggcgggggctggcggcagttgctccggggtggggggaagggatgttgagtgaaggtggacacttgtctagcagcaggaccaagggtggaggaggtgctcagagcagggatttagtcagttctgggggcttttcccttattccggagctgaggcaagatggggtgtgggggggtcgctgcaaatgctgataggggcggtctctatgtctgtgcatgcggaggtctctccctgcgtccccctctctgcctctccgtattcctcagtgtgcattctcagctgacaccctcatttttatccctcagaactgtgggtgctcctatcttcctaaccttggtaggatgtggggaggggaggcgc

SEQ ID NO: 4011 - DNA, 6000 bp, Homo sapiens
tatctgtaatgaggcctgttactccgtgccctttcaatccaggaactcctaaaacagaaaacagtccccttcacatactataaacccaaagggagaaccagacctaaaaaaggtaggaaaagtagagaccaggaattaaaaacgccaagtcttctatttagtatgctccagatcttactgtatttgtgagacatcttttcttatcagtatctcttacaaataactaacatacacccttaggctttggatttgagctttagttccaccttcactgctaacagaataaccctgaacaatccacttaacatccgctttcttaaaatgagtcagctggactaaaatgacccatctctgttagtttttcttccctttcagaactaaaaatatgtggctttgatatgactggatcaagaactccaggcctcctgctaaacacttccctgagctccttgaatgctttcccttcaactccaagctaatgacacaagaatctagaggaaaaggaaacaatgagacacacctggtagactggggaacaaaggagggaaggagccaagctactcttgggaccctgtccctgaagacagccagttttccactaccctaaaggtcaccccacttctgtgtctttactaatagcaggtttttttctccaattctctgggaaaggagataccctaactactagtttcagactgtgacaccttccaataatccctccttcacccttactttagcccctgtcatcttgttcaacttccgtggtgatggagaactgagctcagtgttgctagggcctccttgtgtctggagctccatcctccttgtttgacaggactctgcttttttccccctttcctggctctgccttccagatctccattctgccctcaacaccggaccccagcacgatgagaaaactctatcgctccccactgaaatgtacctctcacccactcctcattttttttctcccaccccatttatggtagaagacctggcacaaaagctcagagagaggagtggacttacccaggataagtggcacagcaaagatggctacaaagaggacatccattctggattctgcactattgctgtgaaagtaaaaaaggaaattacagagtttcccaccaaacttaccccgcctcccctcctcctccaaagcagggaaggagctgcagcaactcttctcctcccagggggcagaactccccgcctactggctgactgactagatctccggttactgccggtccccagccagagctgcccagattgagaggcaaaagggggttttgatgcaaacatgtttcttaagctccccctgccctagattagatccattcaagactcccactgtcactaccaaaataaaaataaaaaataagcctaccaagaagtttcccctctcccggctttccttccttcctccaaggcctcataaaaagttcaccctccctctcactgtctctgacttaccatcaccacccagagttgcctttctctctgaggcttcatcagtctcttttcgtcacagtggaaatgttctgaggaaggggtgagcatttttctagactgaaaagaatccctttcttctgtctgtctggagctatagagaataggaacaatatttacccatcattgtctgacttaaagcacctgctgcatggcttcagctaaaagtctctcagccatggtcagttatttcctttctggtaacactgacctcacctcacctctttgttttttttttgagacagaatcttgctttgtcacccaggttggagtgcagtggcgcgatctcggctcactgcaacctctgcctcccgggttccagtgattctcctgcctcagcctccctggtagctgggactacaggcgcgtgccaccatgcccagctaagttttgtatttttagtagagacggggtttcaccatgttggcccaggctggtctcgaactcctgacctcagatgatccacctgtcttggcctcccaaagtactgggattacaggcatgagccaccgtgcccggcctcacctcatctctttctcaacttccaggatgcaggttggaagaagggagaaagcagatagtctctttccctgctacaggtgccacaccttccctcccacattcagtcacttggtatgttcccttcattccgtcctacaggtgtagagtttttatcctttcctctgcttttatgtttcccatgttcattcaattcagaaacccttagcaacatacgtgctaggcacagtgtgctaggcctagtgtgataggcaattgagagcttataggcaagggaataagaaaagacagttttgctttgttcttaagggaagttaataagtatctgctcaacatctactatgagtcaggcactatgcaagtgtctgtggaaacacccatgaacaagataggtttacagcctcctgtcaatggtcagaagatgctgtggtaacagctcaatggagagatgaagctggccacagtggctcacgcctgtaatcccagtactttgggaggcttaggcggacagatcacctgaggtcaggagatcagcctggccaacatggtgaaaccttgtctctactaaaaatacaaaaattagctgggcttggtggcaggcgccagtaatcccagctactagggaggctgaagcaggagaatcacttgaacctgggaggcagaggttgcagtgagccgagatagcaccactgtactccagtctaggcaacagagtgagactccatctcaaaaaaaaaagacatgagaattgtctcattcctatccaccttactctgcctgctgggctcagaagcaggacatactggagtcttgaacacaggtcatgataacgctaccctcttaatttttttttttttttttttttgagacggagtctcactctgttgcccaggctggagtgcagtggcacgatctcggctcactgcaagctccgcctcctgggttcacgccattctcctgcctcagcctcctgagtagctgggactacaggcgcccgccaccacgcctggctaattttttgtatttttagtagaaacggggtttcatcgtgttagccaggatggtctcgatctcctgacctcgtgatctgcctgcctcgacctcccaaagtgctgggattacaggcgtgagccactgcgcccagctaccctcttagtctcattagggaataatttgcctggtgactttccatgtaaatattttctttcttttttttcagagacagagtcttgctctgtcgcccaggttggagtgcagtggtgggatctcagctcactgtaacctccacctctcagattcaagctattctcgtggctcagcctcctgagtagctgggactacaggtgcgcaccaccatgcctggctaattttttgtatttttagtagagatggggttttaccacactggccaggctagtctcaaactcctgacctcaagtgatccagccgccttggcctccgaaagtgctgggattacaggcatgagccactgtgaccagcctccgtgtaaatctatacaatctattcctcagctcctttccagaatatcctggaagacatgtaaaacatgtatgtgagtgtgcacatatggattaaataataaatcacttccaggaaggaaaggaagtttggttatctttaaacaatttctgtggggtttttttttggtactttgattatgctttcaaaaacaatattccagatttctttcctcttttccatcctcagattcctttgcctaacatcttccctaaggactaacctctccccatccaaatgagattacaataccctcctctcctacttaactttctttttcttttttgagacagaacctcactccgttgcccaggctgtagtgcagtagcgcaatctcagctcactgccacctctgcctcttgggttcaagctatatttgcccctcagcctcccaggtagctgggattacaggcgtgcgccaccacatctggctaatttttgtatttttagtagagatggggtttcgccatgttggccaggctggtctcaaactcctggcctcccaaagtgctgggattacaggggtgagccaccgcgctcagcctactttaactttcattcactctaatatacaacccctctcagcctcaggaaaacgcaccactgaggttcatttttcagaaaataaatagaggaagtatgacataaaaggaatttatggcgggggtggggtgggggtgtcgttttccttcaaccccatcgctctaattgcttttaaactcccggactctttcaaaatgccttcctaacatttctctccaggctccttttgcttctctccgattctcttgtcattacagatgaaggcttcattagcgatatactgtattccatgtttattatactagtctgtccgaagagctcctactttttaatgtaatcttcatctcttaggcagcagctctagcccatttcctctcattcaagtaagaacaatacccgtccctatctccctgcgccccatcctgtgctctctttgtatttgtcccttagattcaaacaggatctaccccctctgcagcccttcaagaagaggtatgattgctaccacttttccccacaaagtgacgaaaggaaacagcgacggaagcgcaaccgaaccctggaattggtgtctcgactggtccattcccggcccacccccattaaccggctcgagccactcccaggacgaagtcaaggcctcggaaggcgactacaactcccagcaggtcgagcagctccgcccgcgctgattctccattggccttccgggggtggggattagatgggaggtggccgtggggctgcggccgggatttgtcccctcttcggcttccgtagaggaagtggcgcggaccttcatttggggtttcggttcccccccttccccttccccggggtctgggggtgacattgcaccgcgcccctcgtggggtcgcgttgccaccccacgcggactccccagctggcgcgcccctcccatttgcctgtcctggtcaggcccccaccccccttcccacctgaccagccatgggggctgcggtgtttttcggctgcactttcgtcgcgttcggcccggccttcgcgcttttcttgatcactgtggctggggacccgcttcgcgttatcatcctggtcgcagggtgagtagagggcccgggagacgcgggagagcgtcgaagagagaggtgcggaaggggctggaggaactggggcaagcctgggagcctgaattggggacgataagtcggaggtgaagtttgggcggaggtgaggggttgggtctgggagatttgtcctttcccgcagttggtttccaccttccaaggatctcacagattcctcctatattcctcccagcgacgtcagagaaggcccaaggccgagactcgtgagggggctgtgctgacctaggcaggccgagtcaggtgccttaggggaggatccaggaacggatacctcgcccttccgtgctcgcacactctggctgtcatcgctctgaagactctttaattagatttctcccctttccagtgcgttcacttttctacagatgagtctcttggtggagacagttaccctacctggtccatgtctccctaaccatccggaaggctaacttccacttttcaagcagctttggctggtttccctccttgatttctctggctcccactactattgcttgtctcactgcccctgtcttttctcagggcatttttctggctggtctccctgctcctggcctctgtggtctggttcatcttggtccatgtgaccgaccggtcagatgcccggctccagtacggcctcctgatttttggtgctgctgtctctgtccttctacaggaggtgttccgctttgcctactacaagctgcttaagtaagaagatggagtggtctggaggggagaggggcaaaggactgcactatgggaagtg

SEQ ID NO: 4012 - DNA, 6000 bp, Homo sapiens; identical to SEQ ID NO: 491

SEQ ID NO: 4013 - DNA, 6000 bp, Homo sapiens
cctcctgaggacgccaggttcctgggtggaattggtatgcaggtagcatcaggggaagagcctcaggtagatacctactcaggggagcccccgaggctgacctcagacacatgcaggagactgggtgaccgcagttaggctgggtaaacacggtactgcagctccgcagccggggtccccctggccctcggctttctgtacccttcagagtttcttctggctacctgcccagcagatttagggagaaccgaaggaagcgtgaggcctcctgtttcctcacgccgaatctctccaaggggctcctggccggcatgccaggctgaactctgaatttggagaagtccaacagagtctcagtcacatggcagaagcgaagtccttgcctgtgaggagtgtgtgtgtgatgcgttcacaatcgctgcattgaaacctgctacaaactcattcctctccctaggttttgttttgttcaacttcagggccggattgcagttgtttacagttgtactgatcaccttccttccccatgttgtacattttagaattgcagagttggaggaaatcttagagaggatctaatctaccaccttttcttttcttttttttgagacagagtctcactctgttgcccaggttagagtgcaatggcgcgatctcggctcattgcaacctccgactccctggttcaagcaattctcctgcctcaacctcctgagtagctgggattacaggcatgcaccaccatgcccagctaatttttgtatttttagtagagacagtgtttcaccatgttggccaggctggtcttgaactcctgaccttgtgatccgcccacctcggcctcccaaagtgttgggattacaggcatgagccactgcgcccagcctctaatctactaccttttcattactgactcaaggagtctgagtgacttcccgaggccatggagttggaactagcatccatgtttctcagctgcctctcagtgttttcttcatccctcaatgcaggcgaggcagatttgggctccctctcagtggaatacaggggaaaggcagccacatacaccgcctccactgttcatgcatgtccacctcttcagcctccaagtcccacattgcttttatttatttatttattgagaccgagtcttactctgtcacccaggctggagtgcagtggtgtgatctcagctcactgtaacctctgcctcccaggttcaagtgattctccttcctcagcctcccgagtagctgggattacagggcccaccaccacacccagctaatttttgtatttttagtagagacagggtttcaccatgttggccaggctggtcccaaactcttgacctcaggttatccgcccacctcggcctcccaaagtgctggaattataggcatgaatcactgcacccagccttttatttatttttgagatggagtctcactctgttgccaggctggagggcagtggcatgatctcggctcactgcaacctcaccctcctaggttcaagcaattctcctgcctcagcctccaaagtagctggaactacaggcatgtgccaccatgcctagctaacttttgtatttttagtagagatgaggtttcaccatgttgggcaggctggtcttgaactcctgaccgcaggtgatccacccacctcggcctcccaaagtgttgggattacaggcataagccaccacgcctggtccctacattgcttttctgcaaatactttccattgcctgatttcagaatacatagaaactcctcttggctattttacctctctgttaggaaatgtttcctccccgatactcctggcccctgaatctccattaggtactagctaggctctgcttcttacccaaataggcttcagtgttaacagttccacctgacctgaaaaaacctaccttccacatttgggctccctgtatgcttgcccatccacaaagcctgcccagatatctaaactcggggctgaaggcctggagatggcctgtcctctccttgggacagttcagcagcccatacagaggaagtgagtcactgcaaggcaggcagcacttggggcactgtgggcgtggccatgccagcctgcgtgttgggggatgggttggaagggtggtgatcacagtctccggtccagccaaggcaagcggtgtgtatgctccccaagcgtgctgacaaagctggtcgcatcatcccggtgctggctgaggcccagtttccccttctccatccaccttctcttttgtctcctgggggaggaatataccctcttatctttatttctcaggccctggttatccaacttctgccccagaacttcccctccccactgctatcttaaaaaaaagaaaaaaaagttaaccagtcttcagttctcctgaggaagcatttgaaaagtctggtagggactacaggaaagcctggcacttaggaaaaccacaagaaagggattcagaactaaaagaaggaagatgaataggacggaggtgtggagagtgttagagacccgaaggtgagctgcggcccaaagagccctggaactatgctggaaaaaaggtgtgtaggtgtgtagcagataaggactctggggagagcactgaagaaaggaagagggaactttggaattagaaggctgaaggaggagagttccaagggggtagaaagagacaattgggatgcaaggtggctcatgcttgtaatcccagcactttgaaaggccaaggcgggtggatggtttgagctcaggagttcacgaccagcgtgagcgacatggtgaaatctcaaaaatacaaaaattagccgggcatggtggcgtcgcctgtggtccctgctacttgggaggctgaggtggaggatagcttgagcctggaaggtcgaggctgcagtgacagagtgagacctcctctccaaaggaaaaaaaaaaaaaagaaaggaaagaaagatacaatggaagatatgctaataagggagggaggagaaaaacacagctggaggggttgctggaaactgggagatcaggcaggcctggggcttagaaaagcctagagaaaccctgggagctggttaggggccaccactctcatctttcccatggtgtgtcagggctgcgggtccccctgaaaagagaggcagaacaaacagttgggtcggacagcctctacctccttaccctccagaaagggcctgagatgagggatgggccctccaactggattagtgggggttgcactccttcctacgagtacttgaccagataaacggggaaacaagctactgtcagaggctctgattgcaacagcataaaaaaggcaatacttcatctaggtgagaaatttgacaaaagtacctctccatggagtaagctgcagctctccctgtataggagccctcaaatacatcttagtcaccactcgttcacgttaggagttaagaccagctttctaggaaaaccatgttgcatcttccaacagtaattacttctgaaacagtaattttaccacacgactcaaggggaaaactttttttttttaaatttataaaggagttgggggtctcgctatgttgaccaggctggtcttgaactctgacctcaagtgatctgcccacctcggccacccaaagtgctgagattacaggcataagccacggcgccaggccaaggggagaacactttttttttttttttcctgagacggagtctcactctgtcgcccaggctggagtgcagtggcgagatctcggctcactgcaaactccacctccagggttcaagcgattctcgtggctcagcctcccgagtagctgggattacaagcgcgagccaccgtgcccggctaatttttgtatttttagtagagacagggtttaaccatgttggccagggtggtctcgaacgcctgacctcaggtgatctgcccgcctcggcctcccaaagtgctgggattacaggcgtgagccaccgcgcccggccggaaaacactttttaacacgaaatcgaatacggataaacgtggtgtcatttgaaaactcatacattttacaaaacaaaagttggggtggctctttcagacagggccgccgggtgtgcgcaagttcgggtttgctcttccttgccacgggggtaggtcccgtagcacctaggtggaaaggccgcggcttttacggcggggtaggcgagggtcgcccgagtgatcgcaggctccgactgggtctcgagggtcggctgcttcggtctgccctggagaggttttcagcttcggcgcgaggcacttgggcaggatccccgggctgcaccctcctccgcccgcgccccgtggggctggaagtgggaatgtgcccaccctggcggggaccgggggccgcacagcagttgggggtgggtgggggtgggtaggagtaaggggacagggacaccgccgctcggagcccgggaccccgcggcatccagtgcgtctgtgtcggtcccagtgggagacctcccaccccgaaaagagaccgaagtggcggaaggagcccgcacccgcctccccaggtcggcggtttctctagcgcaaggtgacgggcgtggacgcggctgtggggccgggagcggagggttggggtctggcctcccgcgccggggcgaaggggcagccgcagcgcagaggcccgccccgccctcccctcccgtcacgcccagcctcccggcccttgggctgctcgcggcctttttttcccggctgggctcgggctcagctcgactgggctcggcgggcggcggcggcggcgccggcggctggcggaggagggagggcgagggcgggcgcgggccggcgggcgggcggaagagggaggagaggcgcggggagccaggcctcggggcctcggagcaaccacccgagcagacggagtacacggagcagcggccccggccccgccaacgctgccgccgggtgagtcggggcccccgcccggcgcccgagccccgcgcgggggtgggaaggggctgcggaaaagttgggagccccgggtgccgctttgtcgcggggccgcggaggggtcgggctgggaaggccgcggggccggggcgaggagggaggcggcgctggcggggggcgctgcgggcgctcatggcggcggccgccgggtaaggcgggcgcagcgcctcaagggagcggccggggccggcgggcctggcgccgcggtgtccgcggcagcgccgccctgagccggagaagctttcccgggcaacaggtagggcggaaggtggggacgcgggggctgcgggcgacggggccgagccgtgggcttccctttgttggggagtggaggagcttggtgaccattggcgcgagagcctccaccctggcagcggcccgcggggttgccctggcctggacgcgtcctgtggcttgggtgggaggagaggggagggccctgccccgttttcttcctaccggcccaccgtgcccacctcgcaggcgaggtcagagcttccatgtgcttaacgggaaacaggaaggagcggcccggagcgcctgccccggcccggtagggctaaggcataccgttatgaggtgtggatggctggcaagggagctcctggtggaactggctttctgggccgtagcttgttaatcactagaggcccgtggcaagtgggttgactgcaggtgtagagcactcatctttagcctgcagttggagtctctccctccctaagcctagctcctggcatcaaaacctggtttcagtcacctgagttgccaggcccaggttcagggggttctgaggatcgtggcgaatgcagtgagcccctgttcctggagaagtgagtccgagcaggcctccagcaggcagtcacccccatatctgtgctggggcaggggtgggtggcggttgctgccgcataccggagtcgggatgaccgcaccggggtgtgagtggctgcacatgtaaaggggctcctaagggtaaggacttgcctgcagtcctgtccctg

SEQ ID NO: 4014 - DNA, 6000 bp, Homo sapiens
ttttatggtaagcaacatataaacagtttattgtggccgggcgcagtggctcacacctgtaatcccagcactttgggaggcccaggcgggcggatcatgaggtcagaagatcgagaccatcctggctaacacggtgaaaccctgtgtctactgaaaatacaaaaaaaaaaaaaaaattagctgggcatggtggcaggtgcctgtagtcccagctactctggaggctgaggcaggagaatggtgtgaacccgggaggcggaacttgcagtgagccgagtgagccactgcactctagcctaggtgacagagggagactcatctcaaaacaaaacaaaacaaaacagtttattgtaactgttggttttgtaactgttctcattgtcggattatcttgaccaatgagaatgggtagagaagaaagaggtggctaaggacatgaccatagggaacaccagcatttagagaggtcagagaaggctaagaaaggtcatattaggctgggtgtggtggctcacacctgtaatcccaacactttggaggctgaggtgggcagatcgcttgaggtcaggagttcgagaccagcctggccaacatggcgaaaccctgtctctactaaaaatataaaaattagctgggcgtggtggtgggcgcctgtaatcccagctactcgggaggctgagatggagaagcgcttgaacccaggaggtggaggttgcagtgagtgagccaagattatgctactgcactccagcctggggcgacagagtgagtctctgtctcaaaaaaaaaaaaaaaagaaaagaaaagaaaagaaaagccatattaatagaagtgaaactatccattcattaaaaatacatatttattaagcccctagtctttgttaagagaaagagggacctcaggagccaaaagaagaaagcatttcaaggaggggggagtcaacaggtcaaatggcacagagagggcaaaaggataaagactgaagagttgttcattgaatgtgaccaggaggtcgttggtggccttaatgagagcaatctcagtggactgatggggacaaaaactaaaatgattgagaatgagaatcatgaaaatggatatagcaagtataggtaactctagaagcttagttatgaagggaagagaaatcgagtgatgactgggtgcagacaaggatcaagagaaagtttggaatgttttccttttaatcatgggaattacttgagcatgtgtatatgctaaggggaaaatatcagtagaaaaggacaggttaagactgggaatggtggctgacgccggtaatcccagcagttcgagaggccgaggcaggagaatcacttgagcctaggagttcaagaccagcctgggcaacacaatgagactctgcctctattttttttttaagttaatactttctgtgtgcaggcactatgctacaaggaaaggatacagtgttgagcaagatagacaaccagggactgcatacaacttacagtaaagtcataggtgaaccttcgacaggtgatacggatggcattcactaggatgagagagacatgatgcaggtaagtatatctgtagggagcaaaaagttggtggaattctcactttattatctctgttttctctgaagacggatgagggttttcctgagatgaacaaggaaatggtaaggaaaggaacttgcaaaaaaaggaggaagtttgaaatatctccctggggattggaagagagtgcttttccaatccaatctgtgggactgtgtgatttcctttttttgagatggagtctcgctctgttgcccaggctggagtgcagtggtgcgatctcggctcactgcaagctccgcctcctgggttcaagcaattctcctgcctcagcctccccagtagttgggactacaggcgcacaccgccacgcccggctaattctttttattttagtagagacggggtttcactgttgttgcccaggctggtctcgaactcctgagctcaggcaatccacccgcctcagcctcccaaagtgctaggattacaggcctgagtcactgcgcccggccaggactgtgtgattttcttcaaaacactaagggagtaggaagagaggttttttatttttatttttatttttttaagagtctccctctgtgtcacccaggctggagtgcagtggcacgatcttggctcactgcaatctcctgtcacctgagttcaagcaattcccctgcctcagcctcctgagtagctgggattgcaggtgcccatcaccacacccggctaatttttttttgtatttttagcagagctggagtttctccatgttggccaggctggtctcagaactcctgacctcaggtgatctgcccacttcggcctcccaaagtgctgggattacaggggtgagccacctcgcccagccaagagagtcattttgatttgtccttcaaaatagctctcagattcatgtatttctttctaaatctgttcccatcacccttgtctgattgtccctctcccctcacctttaaaccttgtttacttgctagtaggtctctgtcttcttgcttaaaaaaataaaaaaatacaagttgcaccctttttcaagaatttaaaatgacgtcctactcctgtcagatgattttaaccagctcacctagtcattccaggccttctgtaatttgtcttccccttttccctccccttgctcctaactagtgcctttcccacacaccagcctcacaggaccttttttttatccatgctgcaggctccttgctaaccaagtaaaagcttttgctgaagctgtgtccctcgggaacattttcttcttttgcaccaagccaactcccaccaaagttttcctgtccttcatgataaaatgtatccagcatctttctgtgcagtcttcggagaatatttattgtcttctttgcacatttggaaatttatgttcaatgtagcttttcttttgagacttggtgttgtctttttaatagtttagtactattaaatatttaatatttagtactgtctttttaatagtttagactttttaatagtttagtatgtgcaaatcttattttaattcaaatatattatcattttcttaaagtctggaaccacaacccacagtggattgtgtagtagattgtgtctcaagtaagtgtttaatacttactggattgaactgagatttgagctgggtcctaaaactttaaatgaattacaccttaatccccactcactaatctattccataagcatgtatctgagtacctaaaccctgtgctaggagctgaggagatttcttttaacctctcagtgcctctgtattttgaggtgtctttctctgaaaatttctttccagcctttaaaacaaccccaactgtctgacagtttgttgaattgccttggacccaagatccctcggccgttaattctgtgtagatattgtccctgtttatcttcttctattttttttagatctgactttactgagttactgttcatcttactggttcacctggccttaaatctgtctctctgtctctctctttctctgtatgtgcgtgtgcacatgtgtgtgtatgtttaggtctcttgtgtactcgctgtggggcttagcctagttgttgatactcccctccctgatcacagtccagttaaggctggcctaaagtggcaaaccccttccccctcctttcctctagtccagagtccaagatgtgggtagaagtgttcagtcagataaaactatctgagaatgccagtgtctcccaggccacccactttcctggagaattttgagaatgtcttttgtcccagccccacatagagaagaatcctaccaggcaataccaaggtaccaagcaatcctgtctgtagtagtttattcttcctcctcactgacattcccaggggctttatgaagggtggggagggagaaggggcagttttgctgtttggagggatgtcacggtcctctgaggaaaggtgggacgtatgtctgtggggcaggaaggctgtgtgggttactttatcaagtcttagcgttgctactctttgtgcctttctctgagtcagttagtcttgatttccacatctgttttggcttcagcctctctcacctgccctcttccattacccaacagcctgactgctagctagttcttgccatagtggcccaaactcatgctgctttgtagaggtgggaggggaggagatcatggaaacaagggaaacctcctgctgacaccttcctttcctttcccaggcctccagcccccacgcgcatgctaggcctccttatccgggtcaggacgaaccagaggaggcctacggggagaaataaggagacagagggacaacgcatagagaggagcaacagagagttgggggcagagtcagggagatgcgggatgcgccctcgggagcaaggtcgcccaagccgtataggaggggaagggaggacggatcgcgcaggctctgacagcccagcccagccccgcgaggctcccaggtttcctgtctgtttctcctcccagctcctcttcctctcttgggaaatttctccccagagcctctcctgtgccagcctgtctctgcttctgtatgtatttcttcctctgcccggtgtcggcgactgtccgtgggtctctccatctcgcgtctgtctctggtctccagttcagcctcccggcctggccctctgggtggacggtgctcctggcgcccctccccgggcagcactattggcggagaggtgacgagaaggcggtgtctagccgccctccgagggcgggattagtcgcggcgacccaaaggcgggcaggaggtgggcccggctgggaggcgggcggggccactggggccgagcccagagccccgggcggtcgcattgttttcctccgcggatccgcggctggacttggacccagggctctcccgacagcgccctggaacccaaattcaagcaccatccaattcggacgctcatcgcatctcgcctgagcacaaccacggattgcgaactcagcgcagcgcgtggccgctggccgcccgcggcgatctcgatcccgctgacccgaatcctggagcaagtaccccgggcagggaaggggctgcggggaggcggggagggagcaggagggcgcggccggcggggggcaagcttctgaagcgctaggggaccagggaggtgtcggcgcccggtgtgcctggctgacggagagggtcaacgaaattggggtgcagggaggaaggagggacagtggccgagccccgtaactgtactggtgagagcagagtctgggcacctcgttcaattgggctttcgtcgagtcgcatcccgctggactgggaagcgcgaaaagggattatttgaggcgcgctccgtagagagcgtggaaaacctggccccttgctttcccagcaaggaaactagggctccgagacccacggagaactagaccctcctgacgcccctgaagggatgggaagagggacgcatcgttccggactttgtgtcacgggtgctcctctgtccttgtgcaagccggaatctgagcaccctctgaagggttggctcgtgcaaagaggcggcgaatggggccctcgagcaacatcggtcccagcgcctatctccttccttcagcccgctcggcccggggctttgttagactgaggtctcccaaggaggacatccgagctggcaactgcctcctgagcccacggtccccactgagcgccggcctcaggcccgccctcgtcggttctcagcctctggccctgtttccctggcctgggagacccgcctccgctccccaacccccgctcctatcccctcttcgtctgcgcctgcaggcccctccagcccctcctctcgctaacgtggctctgggacccggtcccggcccagactctgctaccggcccctcctcggagccccggatccggtgagggggagacaggtcgagcccctggccctaggcccacc

SEQ ID NO: 4015 - DNA, 6000 bp, Homo sapiens
caccttcagccctatccctcaggtttagacaaagaggccccccccaagcattacctgttctgaagagcccagccctgtcaagccagcatagcccgttgacctccccaaacactacaccttttctttcttccaggatctcgtatcctggacctgccagccaaaccccgcccccagccttacactacaaaagtggatgccaccttgccaggagccacggtagggccgctgtatctgggagtaggggactaagagtctgagggtccacaaacggaatttaagaagtaggtagccgcgccctttctgctgcagttttctcttagctatagtaaatcttcctgagggtttggtgtctcctagctgaagaacagaaaaggctgtgactggagcacaggactcctgaatgcctgttctgtagccctcgcttttgcaagagggagatcatggcagggttgtaaacaaaggcggaaagagtcaagagacctgcgaatttactagggcatcccctcgcccaccgcgtggcgctcttcccaaagctgagtcctgattggaagctgaagacttaggtttcggaggggcaggacatcgagccaatggcacactaccctctcaaggccgcctcttccgtaactggtcggagacagtttggctgttcaggagagtcaggccaatggggccgcagttctttcttttttttttctttattcttatttttggagacagggtctcgctctgttgcccaggctggagtgcggtggtgcgatcacggttccatgcagcccccgacctcccgggctcaggtgattctcccgcctcagcaccgcgagcagctaggaccacaggcgcgagccactgcgtccggccggcgggacttatttgtcaggcggggattgggttccgccagcctaaagggaggggtaagcgccagaatatgaatcgccgggaagctgggagaaagctccgggaaaccctgagcagccaggtttgtcttcgcgcgccacgtgactcggaagctccggtttcacccaggcggggagtcaacagcccgctgaccccagtggagcggtgatcctcgctcggcaggcggcaggagcgcgatggcgggtttccccgtccgcaagccgagcagtgtggcgttaatggagaacagcagctgtgcgcacacgctcgctgcacgctgctcattcacggagggacacggggcaggaaaactgcaacaagttaaaaagccttttgcgtttgttgtcttattgtttgcatacagttaccgggaacattatgtcccacacttgtataatttacaaaacgttttcataaaaattgttctcttccttaatccataacagttctgaggcacacacggcgggtaatattttgcaaattttacctatgaggaggcagatccatgactagaaagtagtaataccaaaactcagggttgattgattatttttatttttttgccttggtctaatgtctgatggtccaggaattcacttcaagtaaaacaatggaggtaaactgatacaggtatggttttcagtagtatttcagaaaagggtagctgggtgagtaaaacagtagtttggagtgtgaatcccagaactcaaactgctactaattatccttatgaagatttgaacgggctaagggtaaaaacgggaacagggtctagtcaggcatttccatgttactcatataattcttacagcagatggagctgacaagtttgtttgtttgtttttcttttgctctgtggcccaggctggagtgcagaggctcgatctcggctcactgcaagctccgcctcccgggttcacgccattctcctgcctcagcctccctagtagctgggactacaggcgcccagctaatttttttgtatttttagtagagacagggtttcaccgtgttagccagggtggtctcgatctgacctcgtgatccgtccacctcggcctcccaatgtgctgggattacaggcgtgagccaccacgcccgtccgagctgacaagtttaagtaactttctcaaggttaccctgtaagtagctgaaccaagatttggatgcttcagcccatgttcttcacactatcaacccaccttgtggggctttctcagatttcttatctgtctttcccgctcatatctctccatcctgctcaagtagtgaagagacaaagcagccttcctagattgatgcagagctccaaggaaagcaaagctgttcttgttgagatcattctgagagcgagaaaggtggttaaatacatttcaaagggcttcctgcgggctgtatgtgcagagatgatttgagtggggaatgtagttagcttccgttgatgttagaactggaaggaccctctgcagtcatctgcttgtttaacttcctccttgcccctgatttatcaaactctggtgaggaaaactgacttgcctaaaatcatacatcaaggtaaggtaaaattgaggagatctattgggccgggtgtggtggctcacacctgcagtcccagcactttgggaggctgaagcgggtggatcacctgaggtcaggagttcaagaccagcctggtcaacatggtgaaatcccgtctctactaaaaatacaaaaattagccgggcgtggtggcgggcgcctgtaatcccagctactcgggaggccgaggcgggagaattgcttgaaacctgggaggcagaagttgtagtgagccaagagcatgccactgcattccagcctgggcaacacagcaagactctgtcaagaaagaaaggaggaaagaagaaaggaaggaaggaaggaaaaagaaaagaaataaagttgccaagagattttaaatgttctcatcacaaataaatatgtgaagtaatgcatatgttaattagcttgatttacccattctgcaatgtacatatatttcttttcttttttctttttttttgagacggagtctcgctgtgtcgtccaggctggagtgcagaggtgtgatcttggctcactgcaacctccgcctccccggttcaagcgattctcctgcctcagcctcctgagtagctgggatcataggcatgcgccaccacgcctggctaatttttgtatttttagtagagacagggtttcaccatgttgagcaggctggtctccaactcctgacctcgtcatctgcccgcctcggcttcccaaagtgctgggattacaggcgtgagccaccgcgcccggcccaatgtacatatatttcaaaacatcatgttgtacaccataaatatatacaattattaatcatatatgacatatgtatgtgtataaataaacaaatatatatatttgacaactataaaggtagaacttggaccagaatccaggtttcctgacccccccagtcataattccttgttaatgttaccaattacgaataatttttttttttgagacgaagtttcgctgttgttgcccaggctggagcgcaatggcgcgatctcggctcactgcaatttccggctcccgggttcaagcgattctcctgcctcggcctcccgagtagctgggattacaggcccccgccaccacgcccggctaatttttgtatatttagtagagacggggtttcaccatgttgaccaggctggtcttgaacttctgtcctcaggtgattcatcctcggccttccaaagtgcttggattacaggcgtgaaccaccgcgcccggccccttaagaagtcttcacattcctcttttacttaaggaattactgggcttcgtttctggagccttgtgagaagcattacactgtccccccttttttttttcttttttaaaattaattttcctgtaggaagcaagatcccatctgtcccttctttaggcaatgaagcttttttcacctttgcataaaagaacagctgagccccctttttaaattttcttttgtcttaccgtcccttgaggctagaagaggattctcaaggcacagagttgtgggccacaagaatccaggttgaggaaacggtgaaagtcctgagctgaaacaactaccttggggcattcaaggaacagcaaacagcaaaccgaccggcgagggtggcgggagctgggctggaaatcaggtgggagaaccggccagacgcccgcaggcgcggtacgcagatatcctggaatgcgctgggggctcttccctgggcgcggcttcagcaccccgcattccggtcccaccacgtccccacccacctggagaaggcggaggctgcactgagtgccataagtagtcgagaagggatgattttcaagacataccctctctttgctttcccccctttccaattctgccttgtctttttccttgttgtgggtgctggtgagggaaagcagtcaaggaagttggtcccaagaggggaatgctttcccttgggcgccaagaggcactgacgaggtgtcagagccttctgagggacagatgagactttggcccaaggccaggaagatgttttcagatgtgggccggaagacttgacaatgcggggtctccctcttttaaaaatatccatataatcaaagcctttgttgactggcccgctccggcccctcagtcctccacagatgcgccccagggccccagccccgaggtccttttcctaatatccgctcttgctctcgctcactctcctcaggtcgcctgctccgcccgctcccgctcccgatctctgattgctcctaactgacgtcactcccggtctgtccccgcccactcggtgctgccattggcagtcggtcgtgggtacgcggctcctgtgggggaggggggagctatgggagggggcgggaattcccgactctaggccggaagcgcgcggagaccatgtagtgagaccctcgcgaggtgagtgcgggctgtctggcagcggggtccatgtcggctgcccaggcctccccgggcccgggaacaggagtcccagctcacgcattcttcatctgcttcccgcgacgcttggcggcctcgcaccccgcctcctggagcccggactttcaggcaccgccctcagtgtcgcctcagtccgtcccgggaccgcagactcttagggcccctctctttggccatctgcctctaggtcccatcctggggcctgaagcgcttgttctctgcgctgggaaaaggggaacgatggagcgatccagcacccaaacttaccctgtccaggtggcccacgaagctacccaagacatctctgcacagccctagcctttttggcttcacccactccgttcgggagttggggacccggcctctacattccttaggggaactccagctccaggtcctatttggaggcggctcctagtttcctagttttctgggggcaccaggtgaaagggtgatgagatatccatacagcctttctcatgcctcggtttcccccgtgcagtctccctgaataagtcacttgggaaagaaagtgtgagaagagaggaatgttcctggtacaggagtagatgagtcaccctgggtaggggaaggtcacaaagtggctggggccagggagctgcactctgctgaccaagcttccccattccttgccccatcttcctttgcatgatttttcccaaccactctggtctgtcttcctaggtctgagagtcactggagctaccagaagcatcatggggccctggggagagccagagctcctggtgtggcgccccgaggcggtagcttcagagcctccagtgcctgtggggctggaggtgaagttgggggccctggtgctgctgctggtgctcaccctcctctgcagcctggtgcccatctgtgtgctgcgccggccaggagctaaccatgaaggctcaggtaagcctctccttttccccacactgctatgaatgcttggcttagggagggctctggggctggcggggagtgaccaaaggaggagggaaaggcaagggtagccattgtttgggttggggtggtcggccctggagggggtttgtttgcttattcccctctgtgct

SEQ ID NO: 4016 - DNA, 6000 bp, Homo sapiens
tcgagagcatggaatccgatttttcgaaactagtgctaaatccagtatgaatgtggatgaggtgagatccacacccccatccccgaccaagagaggaagtattagaaggtagattctcctccctccaaactgactctgttccccactttaggcttttagttccctggcccgggacatcttgctcaagtcaggaggccggagatcagtaagttggttttgctggactaggtacaactctggggtgtgtgtgtgtgtatgtatgtgtgtgtgtgtgtgtgtgtgtgtgtgtgtgttggtgttgataaaaacggggagcaatgctaagatttctcatgagggtggatttactttaaacagtttataccctcctaccctaaccatccattcacaccatgacacctgtgcccttctccctctagggaaacggcaacaagcctcccagtactgacctgaaaacttgtgacaagaagaacaccaacaagtgctccctgggctgaggaccctttcttgcctccccaccccggaagctgaacctgagggagacaacggcagagggagtgagcaggggagaaatagcagaggggcttggagggtcacataggtagatggtaaagagaatgaggagaaaaaggagaaaagggaaaagcagaaaggaaaaaaaggaagagagaggaagggagaagggagaggaatgaattgaggaagtgaaagaaggcaaggaggtaggaagagagggaggaggaaaggaaggagagatgcctcaggcttcagaccttacctgggttttcagggcaaacataaatgtaaatacactgatttattctgttactagatcaggttttagggtcctgcaaaaggctagctcggcactacactagggaatttgctcctgttctgtcacttgtcatggtctttcttggtattaaaggccaccatttgcacaaatgttcctgttttgggtaacttggattattgtcagaattgttctccactcaaatccaattattgtgtcttcaaagtgattgatttacccaaatcaggctcggtttctgtggaaccaggactaatcctactgctgtctcttccctagctgttctgttggtaaggaaaatagcaaagagcaggaggtagagtgatctgaaggtctggatatcctctttccgccatggggtccggatgcccttgtgggcagagccttgtcctgagcacaggaaattcccagcgagaagaactctaacagtcctagcctcagggaaataactgcacctagtgatttatccagtgatttgtgcaagcttctttgattctgccagcaatccatttagttatttgataggcattaatatctgcttttattagtgaggaaaatgagaagttcatttattcatatatgtatattgagcatctactaagtgccaggcacaatggtcagttattttatttatttattcatttatttttagggacagagtcttgctctgtctccgaggctggagtgcaatagtgcgatctcagctcactgcaacctctgcctcctgcctcagcctctcaagtagctgggattacaggcgtgagccaccatgcctggccaatagtcagttaatatagccctttggtggtacttacaagcagagggacaaggactttttttcttttttaagaccgagtgtggctctgtcgcccagactggagtgcagtggcacgatcccagctcactgcaacctctgcctcccgggttcaagcgattctcctgcctcagcctcccgagtagctgggattacaggcacgtgccaccacacctggctaacttttgtgtttttagtggagacagggttttgtcatgttggccaggctggtcttgaacgcctgggctcgagtgatcagtctgcctcagtctcccaaagtgctggggttacaggcgtgagccactgcgcccagcctgggacaagcaaactttaacaaaaacagctctttggctgggcgtggtggatcacaacaggagttcaagaccagcctggccagcatagtgaaaccccgtctctactaaaaatacaaaaaaaaaaaaaaattagacaggagtggtggagggcgcctgtagtcccagctacttgggaggctgaggcaggagactcacttgaacctgggaggcagaggttgcagtgagttgagatcacaccactgcactccagcctgggtgacacagccagactctgtctcaaaaaaacaaaaacgaaaacaaaaacatctctttgctgaataacaaagatggcaaaactactggaaatgcaaaagaaaattcaggcttgggccgagcacgttgtttcatgcctgtagtcccagcactttgggaggccgaggtgggtggatcacttcaggttgggagtttgagaccagcctggccaacatggcgaaaccccatctctactaaaaatacaaaaaaaattagctgggcatggtggtgggtgcctgtaataccagctacttgggaggctgagggaggagaatcgcttgaacctaggaggcagaggttactgtgagcagagttcgcaccattacactccagcctggagacagagcgaaactccatctcaaaaaaaaaaaaaaaattcaggcttgatgcacagcatccttaagtatatatatattatattatattatatattacaatgtataattatatatattatatattaaatatataggaaatatataatatatataacatgtatatgtttataaacatataacatattatatataatatataattatatattatacatatatattaaatatatattataattatatatttaatatataatatattatgtttaatatataattatatataattatattatgtttaatatataatatataatacatattttaatacataatatatatatatccccctttcaccatacataatattttttacacagcaaaatgtaataacttgataaatgtaagtatccaagcattgatgaggtaatgataaaccttatttgtggcttatgcttaagttcttttttttttcttttgagatgaattcttgctcttgttgcccaggctggagtacaatggtgtgatctcggctcaccgcaacctctacctcccgggttcaagtgattctcctgcctcagcctcacgagtacctgggattacaggcatatggcaccatgcccagctaattctgtatttttagtggagacggggtttctccatgttggtcaggctggtcttgaactcccgacctcaggtgatccgcccacctcggcctcccaaattgctgggattacaggcgtgagccactgcgcccagctgtgtttgagttctgtagtaaactgtccggtaggtttaatttgctcaagcgatgaggaaaagacttgcactttgtgcctcctgggaaagagactaacgtcttcaacataccttatggcagatatttaatttcagagtagagaccccactctgatgcctggtaaggttattggaagtgaaatatcacaagatcttacagtttgttgtgagataaggtaggatttggtgaggagtaacaaatactagcagatttcggcccaaacttcaattatagctaaacattactggaaaaaaccccacaacctactttatgtaacatataactactcacacacatacacaaaaataatacacacacaatttcagcaaacacaaataataatttaaagaaacaaattcaaaattagagccaggtatggtggcacatgcctgaaatcccagctacttgggaggatccctgaagacgagaagttccaggctgtaatgcgctatgatggctcctgtgacttgccactgcactccagtctggcaacatagccagagtccatctcgttcaaaaacaaaaacaaacaaacaaaaaacggcgaaatgaaggctcagccctcatcaggtttaggtgacagagctagaccctgtctaagaaaaaaaataaaattaaatgaaaattcgttatcagacagtaaagcatgaacccacagtgctggtcaagtcactgcagatctgagtgtgtatcaaggtttaactccataagatgaaaagcaggcaatgaatctttggcctgggtgttgacagtctaggctcaagcctcagctttcccactcattagcttgctgaccttggacaagtcacttatattctctgaacttactcatgaaacggagatacatttcatctgcctctcgcaagaaaaagtcctggtaaatacacattagcatttccgttttacacagaacactgacagatactttcctaagatcatggagttaataaccaccagaacctagactcaatacttatggaacttcaaatctcatgcttttctcattgcacttatgattactccattatgtaggagcaagggagagttgagagcatttgaagaggttatgcaaaggaccagctctgaggagtaggcttagcaaagtaacatgagggaaggtaacaccgttcatctgtgtagcggagtgggagccaagagacaaggagaaagtttcatgttcgtcatgtgtctcggatattccggtttctgcagggacgagaacgcgcagtttcgcctccatcccttgacctccaacacagcttctccactggatcatcggtggcgatgaaggggcggctggggaaggatgtcagagaaaccagaagcttgacggtgaatcctcgggttttaaggagagagcaaagtcctgagagggcgacgtattgtccctgctcacctagcccagaatgaacaaacacgcgccagccagggagcagcgagccgagaattcggacgagcctctgcaaccgccatttgccgttctcgcaaagactaccaagaccacaatgcaacggggcgccgagctaattcccagtgagcagcaggcgaggcgccaccgacgcggaagactataagccccagcgggcgacgaccgaacgcccccgggaacaccgggccccgagctcggtcccgcgcccgaggatcctccacggggctagatggctgcgtcgggggcgggagcggaggtgagcgggcgctagggccgcgagcccccgccggcccttcctccagcgccctgcggaccccgcagaaggcgctcgcctccctagcccgcaaaaacatatcgatttttctcgctgtggcaacggggacgtcctgatagatcctctgctccaataggcaactccggccttccctgccctgacctggaacctctgggagggctgcagagtaagtgccgcctctgcgctccgacggaggcacgaggcctgtggagtaggtccctctgttccgacaggtgcgacacttggcgctccatgcttgcgggtgccgggaggcctggcctcccccagggccgccacctctgctggttgctctgtgctttcaccttaaagctctggtaaggaggaggtaaggggagggaaaaggaggtcactggaggacaggatcgttcccggcctcggggctgggggagatcttatccatggacagcgcaggagggggtgccctattttctgggttttgacttttgtcccttcccccaactccgctacagccaagcagaggctcccgtgcaggaagagaagctgtcaggtgggtgattgtctgggaacccgacacgtcccgtcgtttgtttttggttttagtatcttccccatataccaagagcacaggtggaaaaggccggcaccacatggaatgagggcaagcgctgtgccgggaagttggatgggcagagcctgggagaaatgttttctgaatggcctggggctggcatttatctttcctttcagcaagcacctcaaatttgccatgctggctggtggaagagtttgtggtagcagaagagtgctctccatgctctaatttccgggctgtgagtatctatttctctaccctttttttttttaaacatctaagcaaacacttaagcaacatcttaacatccaagtcttattaagctgcctttgcat

SEQ ID NO: 4017 - DNA, 6000 bp, Homo sapiens
acctaggcaaagggagctcctatcttaaaacaaaacaaaaaaaaaaaagataaaaagcacaggacccataataaagtgctaagcctcataatacagtattaaacaacaaaaaagtaagcatcttgccttacagcatgtcatgaacagttatcaggacctaagtaaaaaaagagccaaggactagaaaacaaaaataaggaacctaaaccaacagttcaaagcacagaatgatgctgtactgcatggaaaccagtatcagcaggcaacgctatccatgaatccgtatgccttggattatttacctgtggccgctgcttgtgctgtgtctggttttggttttgaggttgttcccagtttccccgggctcggttagtgcccaccgatgtcatcatttacagtatatacaaataacagtatttacaaggtagaatactgaaagatttaaaagaaaattaggtattaaatgtgggcaaaatatgtttttaactctctcatcagcaccttcaccaccaaacactttcacttcttcaaaggaacaaatcaataagattcatttattcttacaacataattagcttgataaattccttaaggagctatggctgttaatccatttttatgtaacaagaaatgtataaagcatgtgtaagtgatggatttttttaagaagttacagcagtttggttactagtcccccataagcagactttacatttaactaataatcaaaagccttttacatagatgcaagtatctgaagtacctttgacagaaggaaagataatcagtaaagtctggaaacaaaaaccttccaggaaggagattagtctacactccagagaaataattttaaatactgtattcaatcacctaagaaaacagccttacctgccttacaaccttttttatgtaagctgcatgtgacctccattgcttgggaaaggacaagttcaagtctagactcttctttgtccctcaagtttcatctctctcagtatgctatgggtttgttttgtgtttgtgggggttttttgtttttttaaaccacagccttcaacagggtacgtattagccccaatgactttgtccagaatctctgttctctggaaaataattccaacacactgcttttacaggtgcttctcttggtctcctagtccacattttcaagaaaccaaaatggcaattaccctccaccactcaccttaatatacagggaatctcaaatttgtctcaaaccaaaagcatctagcacaaagttttatttggaagaaagtgcttctaagaaatcattttaaacttgagaccttaatgctggcaagatgacttagttgagtctttaaagagacacagaacacacagggccttccccaaaccagaatatagtttttgttacaagacttctaacaaggaaggattctactgaattcaagttcctttagttcatactttgttttataatacaatctcagctgctgcatttagtaaaaaagaaaacattaatcatatgatagagtgttcaaaataataggttactctgcatttattcccttccaaagagggtaagtttatacttttctgctctatatttaatttttcttgttaatgaaaccttatacaacgtaattctagactgcccagagatattactggatttgagtgggaggaaggacttctaaagaaatatgcaaggattaactattagggaagtgaatttcatctgactttcttggatgtcacagagaaagctgactttttctgtgcataaattcttcaccaagttgcgtcaataggttgcataggtctttgtatcaagaaagatttttttaaggtagcttctcaggtaatttttaacccattacctcttccccctacacatattggcacacaaaagcccataagtatttcaagctagaaaggattatttgctacacagtagcccattttcccaggttagcattatagtcgtttcaactttacaaaaaaaaaaaatgtttaaccaagtaccccgaatccaaatcaacaagactacatatacacatatatacgtatatatataaagacgagaggaaaactattttgttttaaaattggctctaagatgaagtttctaatatggcatagtcatttccaacccactactgtaacttacaaatattgactgttttctactccacatgtgatatctatttgtgaggataagttatattgcaggtataaactgcatgactagctatacactattgcatatactgtaccagtcagatgtaaacatattaaaaagtcatcttgaaagatataattaaccaagaaagaaaaaaattctcctaatcactcttgctagtaacatttccctcttacaagtgcttcgaaatgtgactaagaaaatttttaccacctagtagtgacaacactgagcaacaggtcaaaagtaagtgatctggaatggatcacttgagggcacagaattagtagcaagcagacccattcccagctatcacactggagatgaagaatcttgttacttacttgctctttcttagaaaataaaaagatttaaaggaagtagggtgagaagtattggagaccaaggaaatcgtgcgagagtaaacagaggtttcaacacaggagtgcccttgactcttttttgaaaactagctacttaaaaaaatagccagagaaatttcactgaaaaaactaaataacaaatatttattgagaatctactatgtgtccaatacttcaggaaaatacaaaagcagtatgacttagtagctgccctcagggagcttacaatctaatttaagaaacaattcagaaactgaagctagactgagttgggtaaaatttgctacctctaacagaacaactaatttctgtagatgctttgttgaaatggcccctgcatccccttccccaccaccttgatatctagttagtaagagtacttcccagttaggacatagcaaggaggagctttaaagatgaaaaacaaaacaggacatttttaggcctttcatcactagtttatgtgccagcaatatttcccattcacaaaggaaacaatcattgagatagtctaatctttaaggacaatggtgtcagatctcaaagcagttttatcaactgatacacagccaaaatgttttaattctctgtaatcattgggatagtctaatctttaagtacaatggagacagatctcaaagcagttttatcaactgatacacagccaaaatgttttaattctctagaaacgctggttactagtaatgtccatcacctcccagcaagtcacatcaggtatccccaaaacaggatatgcggcggaggaaggtaggatgggagagaagacaaaaaaaaaggatttctccatttaataatcagggagagtcaaaggcaaaaacgttaacaataataacaaaaacgcctgttactgtggtgtttttctttccacaacatcctacaccagaggtggctacatttcaagaatggtggaaaaggagcagtctccagtttgtgacatcagtttgcaaagcaatttaagggctgtccacaaggttaagggtttgaagaaactgggcattcctgtaccattatgagaagagtgaacaaataccccagtgctctagtgacgtcccttaagcgtaaatacaccctatgggggcctccatgtccagcttcccaaataacacaattgtttggggtacccaaactacagtataaacaggaagctaaagacagcagcaaaaacatattccaagaactgggttggtgagaaagaagggagggtaataagaggagctgacaaagagcctggaaacggagaggggacgcaagcccacgggtggaggatgggaggctcacccccctcagcgccacatcgagagcccacggggccaatctcctccctacctcccagccggaacaaattaatccttcgcacaccaaactgagggccacatgggggagtttgggggagctccaccccatcgccctccctcccccacgccacccccaaaccaggccggatccggatcagaggaggcccgcagtgggtggaaagggaggaggccctctcctccgcaggcaccggccggggtgaagagagagccctacctcaggcaaggcccaggcctcgctcgctcgcgctctttctcgctctcccctctcaggctctagccgcatggcccccccttcctacggctgctccaagccccgccccggccacgctcccaaatcgaggccccggctctggcgcggcccactaggccgcgaacccaaccataaacaaaacctccgggggccgactcgaggtggggggcgccagggctcgcatgactcgggggggggtgtacagtgggggaacacacggtgtgggggggcctaccgagggaggggatacggcgggggcaggggagaaaagagggagggtaaaagggggatcgcggatttaaaggggccgcggacaatacccggccccgccgcgctgccgctgccgccgccgccgccgccaacgccgctgcgctcccaactttacctcagtctcctccacactgacaccccgggccgcgccgcccctgtcacgtgatataagattccctcttccccaccccctccctccttttccctctcgcgctcgctctcgcgccttcccccgcccacttgccttcctgcgtccctcagcgcgtgacgctaaaaggggcgcgcacgcaagcgtgcgcgtgccgcctcgccacgagacacctctttccggctccgcgagtccaccccgcctccttcacggcggccctgcctccaccacgtgacgcacggatggccgccgcttcctcttactgtcgtagttccgcgtctgagcgctcgacgctcctgggtgccattgcctgcctgagtcacgtgtcagggggaagctggaaggcgtcgttctcctttcccagctctcctgcctgtccgccatgttttcaggccgggtctggcttggtcttcccccgtaaggaaatggccggggagctccaggggacccaggcgccgtcgcttcggcggagcctgggctgaccagccaggacagcggggtaaacccgaacaattctgcgcgaggtagggaggccatggcgtccggcagtaactggctctccggggtgaatgtcgtgctggtgatggcctacgggagcctggtgaggagattaccccaccccattcctgctgtcgcatcttacccagtagagaccctccttttgagctgtaccccgtctgcattctccacccactcacctgcgcctatccgggctttgactccttattccaggagtaggtgggagtttaagtcacttagtcgggccgacccgccctcgttagtctagaaccctccctttaacgctagagcacagaccccacgcctccctgctgctggcttcttagatccacccccatcataacggccttgctttgccccaagttttaccctgaaacattcctgagagccggaatctggggatttggaatgaaggcatgcttttttaaaaaaaaaacaaaacaaaactgactttttattaaaggatttttacatctttttggacaggtgtttgtactgctatttatttttgtgaagaggcaaatcatgcgctttgcaatgaaatctcgaaggggacctcatgtccctgtgggacacaatgcccccaaggtaggtccttagggcacaagttaaacatacttctccagatcttttagggtcaagaatgagatttcctctgcctttagtgatgactttaattctcatgtttctttgcgtgcacttgtccttgtacttactaagttgagcaggcactgtgcgctttggaacttggcttacctgctcagtgctgtggcaagcatgtggctcatcctggaacttctgtttttgtatctgcagaatgaagggcttgggtcgaagttcccaactgtttgtagtaaaatatttcccagctcatcttaaactacccagtgttttttgtttgattagga

SEQ ID NO: 4018 - DNA, 6000 bp, Homo sapiens
agttagcaaaagtaggggactgactttctagccccacctcaacccccgctcacagctaggaagccgcagccttcgggtcgccagttccctctccttagcaagtcttgtgtgctcccatcacaccctgtaatggctccttgcatagcgtgtgtcacctttctggtgtctgtcggtaccacccacagatttttaaatttgtgaacagcagagaccatgtgttatccttgcactttagcagaacacctgaaacctgttaagtattccgtaactgttccctttgatatttaaagggcatctattagacccatattaagtattttctcaatgctcctagccagttttattccattgcagtcccaagcgatccccttccttacacaagccagacaaccacgccccttgtctttttcacgagttaataagcaatattcaactctctcagcgctactctcctgttagggacgccaggaaacttccagctccgcttttgctacgttctcccactggattcgacaagattactgtgaaacagtctctacaaggcaagttaagtttgcccgataaagttcagagaatgatccagaaagcctcatgggtgagggtggtcagtaccctaaccacgcccacccctctctcctctctactgagaggcgactccaaattcgcaaccactttgttttacgagcgcctcccacctccgcgcatgcgccttacgccttccacaatatcacaccattgcccgttcgcacctcgtacgcatgcgccaattctatcgcctcagttcctgttactaattccttgtgccctcagcggccaaagctcacgaccctcgctattgctcccgcgccagcactaaccgatactcaaactcctcgtcgtcgtatttgtccgaatagtaaatttgtttgtgcgacatgatcgctcggtttgctagccttcagccccgcgccgccaacctccaagcaactcccaacagcacgcgctcccacccactttggcctcgctttcaaacacgccgcccgcacttcctattggtccgtttggctcgaggcgggacacctctactttcaagcctccgattggcttagatttacttctcttcggatccttattggagggcagttctcacgcttctcaagaacgagcgtgggtcaaaagtaggcgtcttattggccaccactgcctttgtgcgcgatctcgcgctgccattggctaactcgggaaagtgggaagcgtgaaggagggaccctgaggtagagggtcaggggttagtgaggccggaagtgagtgtaataaagtttctccagggaggcagggcccggggagaaagttggagcggtaacctaagctggcagtggcgtgatccggcaccaaatcggcccgcggtgcggtgcggagactccatgaggccctggtgagtcttgacttttttctccttaggtgactcactctttcaccccggaacccctctcccgggaccccacttccggtcttcatttataagtcccgcccctgagacccctctccccggaagtcccacctcccaacttcagggggctcccccgaaccccgacttgatttttattttttgtctccgaccccaccctgtcgcccagtttttctggaagtccccaccccccgacacgttccaagccctactacgagaaacccttcgttactccttccattctccgaaactccgcctcctagcaacgatcctcggctaactcctgtcaaaaggcctatctcccaaaagggcaaaaccctgctcttcaaagaacgattcgaatttgttgaagctccgcccctccgaagccacgccccctccgtaatccacgtctgactgtccagaaagcctccccgcccagaagtctgaagttcgcgtccttaggggaccacgcccccttaggagctttatctttgtgggacctgggtcatcagctgaaaagccttgtcgtcaatccctgaaactccacctgcttatattttcctgtcctttctctttttgggccttgggatcagttttccgagcactctcgtgctcccccaggtgggaagtcaaagttcccatctctggctgtaaggagtgagattaaaggcagccgttttccgttttcctttctatcttttttttttttttttttttttttaagacggagtttcgctcttatcgtccaggctggagtgcaatggtgcgatctcggctcactgcaacctccgcctcctgagttcaagtgattctcctgcctcagcctcctgagtagctgggattacaggcgcccaccaccacgcccggctaatttttgtatttttagtagagacggggtttccccatgttggctaggctagcctcgaactcctgacctcaggtgctccacccttatcagcctccttaagtgttaggattacaggcgttagccactgcgcccgtccccgttttcctctttcttaacctcctccaagggtagaactatttgaaagggctgaacgtggggtttggcacgagagggagagagagacttgccctcagactcccagcctcacttcctggctttcccttcccaggaccaacctcatcccagaagtagctctaggccttcctagacataagtggataagaccatggatttgttggtgtgtggcatgtgggtgtgacatgagcaaaagttttctactaccagaagaacggtagtttggagtgggggtagataatagtgctctttttgttgtttgatttttttttttttaagggacagttcagtcgctacttctctgtctcttcccctccccctaaccagagttcttgtctgggcattcctcctggccccgtttgcccagccttccctgctggaaacattcctgaggctttcgccatttcctgccacttcccgcccctgtcccctcctcccagttgggctgcgaagccacacacagcttttcccctacacccaatcacctggacttccagtaggcaatctcctttctccctatgtaaatttcaagagtcatacgtctttcttttcttccgaacgcccacacccgttggtccttccctggctctggatactgtaggctcccacagaacatcatctctacagatgagggacatcctagtgtgtgtttgtgtgttttgggggtgtgaggctatggtggaatcctttcctcattctctctatgcccgagagctggctggaaatgaagtgataaaattccttctcaggattggctggcagagtgacaaagctcttctggaatgagcactaaggggagatgtaagagttaagcacagcatctaacacacttcaagtgttaatgttgttaatcaggataattatctatctatattttaattctctgaagtaaatctaagggtaattccaaggtgagctggggggaatacgtatttttttttttttgagacggagttttgctcttgtcacctaggctggagtgcaatggctcgatctcggctcactgcaacctccgcctcctgggttcgagcgattctcctgcctcagcctcctgagctgggattacaggtgcccgccaccacgcccagctaatttttgtatttttagtagagacagggtttcaccatgttgaccaggctggtctcgaactcctgacttcaggtgatccacccgcctcagcctcccaaagtgctggtatcacaggtgtgagccaccgcgcccggtaggaatacgtatctttgtttttttttttttggtcactttccagctttgcctgtggcattctccggaagagcagtggcaggaagccgtgggtggcaggaatgggtttgggactgttccctgtgtccagcttcaacccatcttctcctgacacccctttctcctgtacttatttttctcctgtccttattgacgcagatgtgtcttctgatctctctgtcccttcctggcctgtagtttctacttctcttggagaactgtttcttccacctcctccagccaggctccttccctggtgtgaaggatgctgtgctctttggtggggcttagggccctgtaagaggagggatgtgaattggggtggtttggagtgggagtggggacctgattgcctcattctcacccttgacagtgtgctgtgttaacaagccctgtggaaaggggagacaggacagtgcttggctatgagccatcggtcttggtgtggtagatggcatacgtagagaacaagccgtgaccagcatgtcctcttgttcccttcttgcctggtagcttcctgatgtatcatccaggttgaactttattccccttttttcaccagctttgctcttcctcttggccctgctctgcatccattgggaccacttacttcccatccccacttcgctagctccagtccacagctgctgtagcagaggatgctaatggcccaggcttactgtatggggtagcggttgggggtggcctgggctggggccagccagctttcgggcatagagagggtgggggaattcgagtgtccaaccaggacaggaagggaaatgctgagctctgagatctcctcccttttccacccccagctgcctctgtttcctccctcattcccctgtactcctgcctggcttcctgccccctttggcctgcgtgtgtccggttttgagtgacccagacctcctatctccttcctttccgtcccactcttccatccttccctcccacccccactttacttctccccagattactagttgtttgtatagggcaggggagaggggcttggatagccctaccccctgctccagttcgaggttggggcggggtgggggctcagcccctctgagcctgtgagtcagcactgtcctcacgattggtctctccccttagctccccgcccctggggaggagccagaagcgctgggtccagcctgttctcttctcagccagagaagaggctccacgttgggcggggatggggcctgaaactgtctgggtctgagctggggagcggaagccacttgtccctctccctccccaggacttctgtgactcctgggccacagaggtccaaccaggctaagggcctggggataccccctgcctggcccccttgcccaaactggcaggggggccaggctgggcagcagcccctctttcacctcaactatggatctcctgccccccaagcccaagtacaatccactccggaatgagtctctgtcatcgctggaggaaggggcttctgggtccacccccccggaggagctgccttccccatcagcttcatccctggggcccatcctgcctcctctgcctggggacgatagtcccactaccctgtgctccttcttcccccggatgagcaacctgaggctggccaacccggctggggggcgcccagggtctaagggggagccaggaagggcagctgatgatggggaggggatcgtaggggcagccatgccagactcaggccccctacccctcctccaggacatgaacaagctgagtggaggcggcgggcgcaggactcgggtggaagggggccagcttgggggcgaggagtggacccgccacgggagctttgtcaataagcccacgcggggctggctgcatcccaacgacaaagtcatgggacccggggtttcctacttggttcgggtgagtgaacatcctcctctccattcccccgcagaccccctccagttctaatgctcactccagcttggccggaatctcttttttcctgctgttccccaacaaccccgtttcagtgtcctatttcctaaacctttctcatcccttccccgattctgtagccccttcccttccagctttgcctgggcccccttccttcttttcactcccccacccccaccctggcatgcttagcacaatgcccagcatggcagaagctcttaataagtgttggaatgaatgacttcttgatctttcctccattctcctcccgctttctggagttgtcactccatcccagccaatgcctgtcggtcccctccaaactctctcc

SEQ ID NO: 4019 - DNA, 6000 bp, Homo sapiens
tgttggccaggctggtctccaactcctgacctcaagtgatccacacacctcggcctcccaaagtgctggcattacaggcgtgagccaccgcgcccggccagtagtacttatttcgcatggttgctgtgaagattgactgagataatgcacataaagcactcatcacagtgcctgacacataggaatcatagtgacatagagctgacacatagtgaatgtcagctgttgtgatgaaccctaactgcccattcctgtagcagcaacacagtagaatgaaagtgctaagaatatagttttgggtccaatgaaacagctttgctgtttactatctgcacaaccttgagctagttacttaccttttgccctctctgtgtcatggtttcctcattcatacatgggaatagaaaagtacctacttcattcggctgggtgcggtggctcacgcctgtaatcccagcactttgggaggccgaggcgggcgaattgcctgaggtcaggagtttgagaccagcctggccagagtggtgaaaccccatctctattaaaaatacaaaaattagctgagcatggtggcaggtgcctataatcccagctactcgggaaactgaggcaggagaatcgcttgaacccgggaggcagaggttgcagcgagctgagattgtaccactgcactccagcctgggcgacagagcaaggctctgtctcaaaaaaaaaaacaaaacccaaaaaacagaaatactttataatttattatctatccttatatgtggtggtgtaagcccctaaaatgttctggggagtttcagggccaagtctactgtgtatgaataaaatggactttctggatctgcatctgcaatgctcgtgtccagcccctgtaagtataccaatatttgaaagtcattgtgaccagtgagtccttgattgagaaaccagaaagatttggtgtggaaatggaaatgtggctagggctttgaaggtcgtatagcaggtttaaaaacatttttttttttttgagacagagtctcgctctgtcacccaggctggagtgcagtggcacagtctcggctcactgcaacctccgcctcccgggttcatgccattctcctgcctcagcctcccaagtagctgggactacaggcacccgccaccacgcccggctaattttttttttttttttgtatttttagtggagacggggtttcaccgtgttagccaggatgatctcgatctcctgacctcgtgatccacccgtctccacctcccaaagtgctgggattacaggcgtgagccaccgcacccagcctaaaaaatgtttttcgctaggagcggtggctcacgcctgtaatcccagcactttgggaggccgagggggcgaatcacctgaggtctggagtttgagaccagcccggccaacaaggtgaaaccccaactctactaaaaatacaaaaattagccaggcatggtggcaggtgcctgtaatcccagctactcgggaggctgaggcaggagaattgcttgaacccgggaggcggaggttgcagtgagccaagaccgtgtcatttcaccccaacctcggcgacaagagcaaaactccggctcaaaaaaaaaaaaaaaaaaagtttgggctgagcgcggtggctcacgcctgtaatcccagcactttgggagtccgaggtgggaggatcacaagctcaggagttcgagaccagcctgaccaacatggtgaaaccctgtctttaataaaaatacaaagatttgctgggtgtggtggtgcgtgcctgtagtcccagctacttgggatgttgaggcaggctaatcgcttgaacatgggaggcagaggttgcagtgagctgagatcatgccactgtactctagcctgggccacagaacgagactctgtctcaaaaaaaaaaagaaaagtttttatttgttttaatttttactttaacaaaggaatttgtatagttttaaaagccaactagttcaacaaatatttttcggggtggcggggcattttcaagtgaaaaccgggaaacctgctcaacaaattctgaaagctgtaacttcggtgggcgccgtggcttacgactgcaatagcagcactttgtgggggctgagatgaattgcttgagcccaggattttgagaccagcctgggcaacatagggagaccccgtctacacacacacacacacacacacacacacacacacacacacacacactagatgggcgtggtggtggtggcccacttctgtagtccctgctactccagagtctgaggtgggaggatagcttgagtccaggaggtcgaggctgcagtaagccatgtttgcaccgctgctctccaccctgggcaacagagcaagaccttgtctgaaaaaaagaaaaagaatagaaaaaaaaagagctgtaactctacaaggcttttaatgaaaaataaccatcccctgctcctcttctttaacccttacatatacaacctacatatacaactacgctccagtttctaggctgcttcttctggtacttatctgtacatttcttcaagcaacactcccacctaggcctcccaaagttctgggatcacagctccactgtccccagctccaatttttagttaaatcaatacttagtgtttacatcgttacggctgtgaaaattttcttcacagctgagccatttgtgtttgtgctaagactgtgaatctgtaaaaactgcttttgttaattaacatccaggacatacggctgagaaacttcattttctaaaatcatagtcacaaactttgctatttgaaatcagtcagtgcgaatggaacatcctactcttgccagaagttctgagccacgtggattactttggcctcccaaagtgttgggattacaggcacgagccactgtgcccagcctagatagtgggtttttggacactatattctatatttatcttgactttgtaatttccaagtggtccctcagcttggacttcttgatcccttcacttaaagttatgcttacctcgaaccgatcaaaacactgtttcatttaaattttagctagcctatagtatcagccacttgggaggctgaggcaggaggatcacttgagcccagaagtttgagcttcgcctgggcaacataccgagacttcaactctaaataaataagtaaataaattttaaaatataaattttaaagtcaagcctttcccatatcctgttgtattagttcattttcacattactgataaagacatacccgaaactgcaaacaaaaagaggtttaattggacttacagttccacattgctggggaggcctcagaatcatggcgggagacaaaggcacttcttacatggcggtggcaagagaaaaatgaggaagaagcaaaagcagaaacccctgatgaactcatcagatcttgtgagacttattcactatcatgaaaatagcacgggaaagtctggcccccgtgattcaattacctccccttaggtccctcgcacgtgggaattctgggagatacacatcaacttgaaatttgggtggggacacagccaaaccatatcatctgaatgaccatatttcttcctttttaatgagttgccccacagttcttctagtgtgtgatctctctgttgtggcaagttaataaacctaactgtcaaactacagatgtggtctttataagacaggcttatcaattgtctttcctttcttatataactctttgtttcctctgaagttgataattgcctaaccttttctcttactttgttctctctctctctttctctctatacataataaattcatccccaaaactgttctaaagaattatactctttctttcaatgccttcaccacttcaggtaattcttctggtctttcttttcttttctttttttttgaaacccagactcctggagcccttcttcctctggctccaagttatattggttgttgtccttgtaaaaatatgactacctctgttctaacaataatctcaagccttcatggttagttgtcaatgcaactgcttcactgactcctgctttccccctccacctgaaaggggtcgagtctcttgacatctctgtatctccaaagtctatcatggtaatcaagaaatgttctggccgggcgctgtggctcatgcctgtaatcctagcactttggaaggctgaggtgggccagtcacttgaggtcaggagtttgagaccagcctggccaacatagtgaaatccccgttctctgctaaaaataaaaaaattagcccggcgtggtggcgcgcgcctgtaatcccagctgctcgggagacagaggttgcagtgagctgagatcgagccactgtactccagcatgggcaacagagcgagactttgtctcaaaaaaaaaaaaaaaaaaaaaaaaaaaaaaaaggagttctgtcccgcctaggcactatagagagaccctgtcaagaatggaaagaaagaaatcttcgaatgaatgaactagtgaatgaaggaatggatttcagcgctggagaattgagtttaaggggaatggtattatattcccatcttgttgcaacatttaaggatgtcctcaagccccacgccagcctggagcgtagcccaaggtgggaaagcagcgccgaggcctctccagacccggcctgctccccgtttgcggagcacagcccactgtacccccgcctagattgaggcgctggccaggagtacaccaggcgccgccatgtgaactacaactcccagaaggccgcgcggaagcggaacgtgaaccagggaggacttccggacgccaacatccgggccgcgcggggaaggggagacgtggggtagaggtaagtgtaggttgaaggctgaatggggagggcgagagatggggagtgggtctcaaatatagagggggtagcaaggtggaaggggcccttccaccttttgtgggcactcaagttcggacctctgggatcggcgattcccctctggccagggctggttttaatgctctccgtgggcgggcttcggttgagtttggtccgcttttcctttctgctcctcaggggagcattgcttccttctctcgcagtgaccatgacgaaattagcgcagtggctttggggactagcgatcctgggctccacctgggtggccctgaccacgggagccttgggcctggagctgcccttgtcctgccaggaagtcctgtggccactgcccgcctacttgctggtgtccgccggctgctatgccctgggcactgtgggctatcgtgtggccacttttcatgactgcgaggacgccgcacgcgagctgcagagccagatacaggaggcccgagccgacttagcccgcagggggctgcgcttctgacagcctaaccccattcctgtgcggacagcccttcctcccatttcccattaaagagccagtttattttctaacttcgtttagtttgagtatggaaaacgggtattggggattctatgtactaacggtcgagaagtgaatgtgaaagaaccaccttcttgaggccatctcagcctttatctttgcatcttgctggtgttcccatttttgctcccaaggaggcaaagaccccttctcaatatttctcaggatggaaatgacatttcactttcctggtcctttcaaccctgtaggaagtacttctttttttttttttttgagacggagccttgctctgtcgtccaggctggagtgcagtggcgtgatctcggctcactgcaagctccgcctcccgggttcacgccattctcctgcctcagcctcctgagtagctgggactacaggcgcctgccaccacgcctggctaattttttgtatttttagtagagtcggggtttcaccgtgttggccaggatggtctgatctcctgacctcgtaatccgcccgcctcggcctcccaaagtgctgggattacaggtgtgagtcaccgcgcccggcgtactacttctttttttttttttttt

SEQ ID NO: 4020 - DNA, 6000 bp, Homo sapiens
ccatatccaacacaaccaatcctatcctgaattcatccacatcccaccacctccccagctacctagctccagccatcctctctccacaacctctgaatcagtctttcacttttcccagcaatccattctccactcagcaaaatgatgataaagcacgtcacatcaaggctctgcctcaatttaatggcttcccattgtatttagaatcatctccaaactcccagagactatggtcagctacaatctggcccaccttctgttccagccaaatttcctcacagcacaaggacgtttgcacctgctgttttccaagcatgaaacccttggcccctatatctggtgctatcacctaatatcaggttttagctccattctcaccatttcagtgagcacccaatccccatcgcagtcattctatcacatagccatgtttttttttgtttgtttgtttcattttgtctttttttgagacagggtcttgctttgttacccaggctggagtgcagtggtgtgatttgggctcactgcaaccttccacctcctgggttcaagcaattctcctgcctcagcctcccgagtagctgggattacaggcgcccgtccccatgcccgcccagctaaattttgtatttttagaagagatagggtttcaccatgttggccaggcgggtctcaaactcctgacctcaagtaatccgcctgcctcggtctcccaaagtgctgggattacaggtgtgactcaccgcgcctggccacatacccatggtttcagcatgtatcactatctaaaattattatttttgtttatatatctgtgtcgtcccatagaatgttaaggtcccaagatcagaaacttgctcattgcagtgggtctaacactcagtaggtcctcaacaaacattcgttaagatactaaagtggcagggtggggccctgtaaacagcttcaggaccctgtgcttgtaggggcaacgtggtgccctccaaggaagacagggaggtgggaggagcactgcccagagatggcgtcaggctgcaagacttcttgaataattcagcatcataacaacccagcctcaggaagggatagggcacggccaggacgaaacattaggaggcgatggacaatgggattcccacggggcagcttctgcgcactggacgttccctaacctgaggctctctaaagaggaaggttaggaatcctctgagcttcggtgggctggactcactgtgggaattcaatcgcccccatccaccaacagtgtgctggcgggaaaacgccgacacgcatgcgtagttctcgcgccggctcctctctctctctctctctctctcgctcgctctctcgctctctcgctctctctcgctcgctctctcgctctcgctctctctctctctccggctcgccagcgacacttgttcgttcaacttgaccaatgagacttgaggaagggctctgagtcccgcctctgcatgagtgaccgtctcttttccaatccaggtcccgccccgactccccagggctgcttttctcgcggctgcgggtggtcgggctgcatcctgccttcagagtcttactgcgcggggccccagtctccagtcccgcccaggcgcctttgcaggctgcggtgggatttcgttttgcctccggttggggctgctgtttctcttcgccgacggtaggcgtaatgaatatttcgacctttggatcttagctgtcccctccctgcgttcgcacttaacctttttcaccattattattattattgttattattattattttttgagggagtctcgccctgtcgcccaggctggagtgtaatggcgccttcttggctcactgcaacctccgcctcccgggttcaggcgattctccgacctcagcctcccaagtacgtgggattacaggcacccgccaccacgcacggctaattttttgtatcttttagtagagacggggtttcaccatgttggtcaggctggtctccaattcctgacctcgtgatccgcccgcctcggcctgccaaacagctgtgattataggcgtgagccaccgcgcccggccaaccatcattattatttttaacggtaaggatggtcagattttactaatgaagaagagattataaaatcttcaagtctttatatccacttgctttttgaggggtggagtgggaagaaggttatgtaattcatacgttcttcagacatgtgacaaacattcacggagcccggcgacgagcgtcggggttgggattcgcactggagctgcagatgggtgccaggatggactggtccctaccctccgcttgaacctaggaggcggaggttgcagtgaaccgagatcgtgccactgcactccagcctgggtgacagagatactccgtctcaaaaaaaaaaacaaaacaaaaaacaagcggactgggcgcagtgcctcaccctgtaatcccagcactttgcaaagccaaggcgggaggatcctttgagtttaggagtttgagaccaacctgcgcaacacagtaagaccccgtctctacaaaaaatacagaaattagccaggtgtggtggtgtgcgcctatagtcccagctattctggaggctgaggtgggaggattgcttattctggaggcagaggttgcactgagccgaaatcaagctactacactccatccagggcaacatacggagaccctgtctcaaacaaacaaacaaaaaattgctcagtacctggccaaaaaagaagaggctcactatgcagaggggaagtggaaggagatgtttggacttctaaactcaatagagcaggagaggcaaatgtagaatgtgctcaggaaatatctgtgagatgaatgaacttgagggaagtaaggtactagatattacctgccctacccagaacaaatcctgtgcaatgtttccttgaaaagtgagaagtctggaaggggtggctactgacatagtgaagcaactagttcaattctacaacttgacagctacccctgtgccaggctatctacgaggatacttagaatgcataagacattccttcaaggaactccaggaacagaggcctgacatgttgcaatgtttagtgtcaagcagtgtactagagacacattatcacactcaaacctcacaacaattctgtgaggtaggagttatcactccccttttatagatgaaacagaggcttagagtgattgatttattgaaagtcaaacagccagtaaatggtgtagccaggattccaaacttgctgtctcactgagactgtacttaattactggagggaccgggtgtggtggctcattgctataatcccaacaccttgggaggctgaggctggtggatcacctgaggtcaggggttcgagaccagcctggccaacatggtgaaaccccatctctactaaaaatacaaaaattagctgggcatggtggtgggctcctgtaatcccagctactcaggaggctgaggcagggcaattgcttgagccgagatcacactgcactccagcctgggcaacagggcaagactctgtctcaaaaccaaaaaaaaaaaaattactggaggaacctagaagaagaaatgatcaattttgcttggagtgtatctagaaagacttcactgagatcatttaaagaacaaaaaggatggctggggtccagcgcagtggctcatgcctgtaatcccagcactttcggataccaaggcagcagatcacctgaggtccagagtttcagaccagcctggccaacatagtgaaaccccatctctactaaaaataaaaaaattagctgagcatgttggagggcacctgtaatcccagctacttgggaggctgaggcaggagaatcactcgaacccaggaggtggaggttgcagtgagccaagatcacgccactgcactccagcctgggcaacagagtgagactctgtctcaaaaaacaacaacaacaaaaaatacaaacaagagacaagtagttcccaggtgcctaccaagtggtcaggcactgcacttacctcactgactgcagtaaccaccctttgaggttgtggcattgcctccattttccaggcaaggaaatgggctgagagctgggattagtcaggtcatgactgtgtgtgccactcccgctaaatctcatttgatgtggttcatgaggccacaccatggacagcttcctccttgtgtccactgaggatatggctttgtacaacactttggtttttgaacgactttacaaacctccctgtcttgtgaggaaggaagaacagttattaccatctgcatctgatgatgaaacaagggacgctgcagaggagccgcactgaccactccctccctccagtcctgtcatcccactgccagtgtcccaccctcttgtgccctgcacttcactggctaataacccccctcactttttcctctgtgaagccatcctggataattccccacccacgaatggtccctcctcatctcagagagctctccatgcacacctgttaccgtttctgtctttatctgtaaatatctgtgtgtctgacttccatgcctcacacacctctatagggcaaagactgtcttaaacatcttggtagtgtcagtattttgcacagtgaagtttttttttttaaattatatcagctttatttgtacctttttgacatttctatcaaaaaagaagtgtgcctgctgtggttcccatcctctgggatttaggagcctctaccccattctccatgcaaatctgtgttctaggctcttcctaaagttgtcacccatacatgccctccagagttttatagggcatataatctgtaacagatgagaggaagccaattgccctttagaaatatggctgtgattgcctcacttcctgtgtcatgtgacgctcctagtcatcacatgacccatccacatcgggaagccggaattacttgcagggctaacctagtgcctatagctaaggcaggtacctgcatccttgtttttgtttagtggatcctctatccttcagagactctggaacccctgtggtcttctcttcatctaatgaccctgaggggatggagttttcaagtccttccagagaggtaagagagagagctcccaatcagcattgtcacagtgcttctggaatcctggcactggaatttaatgaatgacagactctctttgaatccagggccatcatggctctttgagcaaggcacagatggagggaggggtcgaagttgaaatgggtgggaagagtggtggggagcatcctgatttggggtgggcagagagttgtcatcagaagggttgcagggagagctgcacccaggtttctgtgggccttgtcctaatgaatgtgggagaccgggccatgggcacccaaaggcagctaagccctgcccaggagagtagttgaggggtggagaggggcttgcttttcagtcattcctcattctgtcctcaggaatgtcccaagcctttgagtagggtaagcatcatggctggcagcctcacaggattgcttctacttcaggcagtgtcgtgggcatcaggtgagtgagtcaaggcagtggggaggtagcacagagcctcccttctgcctcatagtcctttggtagccttccagtaagctggtggtagacttttagtaggtgctcaataaatccttttgagtgactgagaccaactttggggtgaggattttgttttttttcttttgaaacagagtcttactctgttgcctgggctggagtgcagtggtgcaattttggctcattccaacctctgcctcccagattcaagcgattctcttgcttcagcttcccaggtagctgggattacaggcggccaccactacgcccagctaatttttgtatttttagtagagacggggtttcaccatgctggcaaggcaggtctcaaactcctcacctcaggtgatccgcccacctcggcctcctaaagtgctaggattacaggtgtgagcccctgcgcc

SEQ ID NO: 4021 - DNA, 6000 bp, Homo sapiens
gggaggagcaaaaacaggtcttaagggcctgggctcggctgggtgcggtggctcacacctataatcccagcactttgggaggctgaggtgggcggatcacgaggtcaagagatcgagaccatcctagccaacatggtgaaaccctgtatctactaaaaatacacacacacaaaaattagctgggcatggtggcgcgcacctgtagtcccagctactcgggaggctgaggcaggagaatcgcttgaacccgggaggtggaggttgcagtgagccgagatagcgccactgcactccagcctggtgacagagtgagactccatctcaaaaaaaaaaaaaaacacaaacctgggctctggagtcagactgctgagtttgaattttagagatactgcttactaaccatgagcttttagggaagttacttaatcttgaatgcctcagtttccctatttataaaatgaaaaccacgtttgcatccgtttgacagggttgttgtgaaggttaaacaaaatatatgtgaagtacttggtacagtgcttagatgttttaaataataataaacagtattaatttttccactctcacttgtctccttggaccccaaattggagataaaagagaggatccagggctgggtatggtgcctcacgcctgtaattccaacactttgggaggccgaggcaggcaggttgcttgagctcaggagttagagaccaacctggacaacatagtgagatcctgcctccaaaacattaatgaaaaaaattagcagggcatgatggtacctgtctgtagtcctagctcctcaagaagctgaggtggacggccaggcgccggggctcatgcctgtaatcccagcactctgggaggccaaggcgggtggatcacctgaggtcaggagttcaggaccagccaacatggtgaaaccctgtctctactaaaaatacaaaaattagctgggcgtggtggcatgtgcccataatcccagctactcaggagactgaggcaggagaattacttgaacccgggaggcggagattgcactgagccaagatcacaccactgcactccaacctgggcaacaagagcgaaactctatctcaggagaaaaaaaaaaaaaaaaaaaagctgaggtgggagggttgcttgagcccaggaggttgaggctacagtgaaccatgatcataccactaccttccagcctgaacaacagagaccctatctcaaaaaaaaaaaaaaaaaaaaaagagaggatccagggatggagagaagggggagtgattcctttgttggtctctgttttacttctggggtccacctgtttttttgtgccttacagctcgacagaacaattggccccctctaccttctttttgtccagttcagccctgctttttccaggacatctccatggagatcccccaagaatttcagaagactgtatccaccatgtactacctctggatgtgtgagtagtgagaagccttttggaggaagttacaggtagatctcttaactgccctggggtccgctcaccaagaaccaaacacttcacctctatttagaactcaccagcctgctagcaaatgttcttgccctctccccactttttattgtccatatgcaggaatatattttgaattctttagatgtctttgggctgggtgcagtggtatacgcctgtaatcccagcactttgggaagctgaggtgggtggataacctgaggtcagaagtttgagactagcctgatcaacatggagaaaccccatctctactaaaaatacaaaattacctgggcgtggtggcacatgcctgtaatcctagctactcaggaggctgaagcaggagaatcacttgaacccgggaagtggaggttgcaatgagccaagatcatgccattgcactccagcctgggcaacaagagcaaaactccatctcaaaaaaaaaaaaaaaaaaaaaaaaaaaaaaaaaaaggccgggcacggtggctcacacctgtaatcccagcactttgggaggcccaggtgggcagaacatgaggttaggagatcaagaccatcctggctaacacggtgaaaccccgtctctactacaaatacaaaaaattagccgggcgtggtggcgggtgcctgtagtcccagctacttaggaggctgaggtaggagaatgggcgtgaacccaggaggcagagcttgcagtgagccgagatcctgccactgcactccagcctgggcgacagagcgagattccatctcaaaaaaaaaaaaagaaaaaaaaaaattagctgggcgtggtggcgggcgcctgtagtcccagctactctggaggctgaggcaggagaatggcgtgaaccggggaggcggagcttgcagtaagctgagattgcgccactgcactccagcctgcgcgacagagccagactccgtctcaaaaaaaaaaatgtctttgcaaggggatcacacattattgacatttgctttctccatctcccctgttgaggattccatgaaggcagcagctgccttcatttccttactctgccatgtttggtgaatattataggatgagcatagatgggaaggagccttcattgcagtccagaagggctcctcatcctgtccctctgccccttaggcagcacgctggctcttctcctgaacttcctcgcctgcctggccagcttctgtgtggaaaccaacaatggcgcaggctttgggctttctatcctctgggtcctccttttcactccctgctcctttgtctgctggtaccgccccatgtataaggctttccggtaagtgtgttagtggtgggagagtgatggagacctgggatgggccccacgtctgcccatccttcagctctaattcttctcccaccctccccatttttttcctctttgtaggagtgacagttcattcaatttcttcgttttcttcttcattttcttcgtccaggatgtgctctttgtcctccaggccattggtatcccaggttggggattcaggtttgtgaggctgttatccaccctcacctttccctctagatccagccagcactgggtgctgggataggagttgttcagaaaaaggaaatgtggttttaatccttgggaggtactagtttaatgagatacaagacatacttccaggatagagcgcagacagcactcttgacacatatagattgaagggaagaatgctgcatttggccaatctaaggtggcttcctggaggaggcatagaaccatggttgaaaggaggaagaagaatccccagatgagtgcctggaagagcttggagagctcagggctaatggttcagaaactggaattaaactatgaagagattagatacagtttgggattgtggtgcttggaatgctgctcgattgacagggagccactgctgatgggaagggtaggaacaggggatgctggtgacataaccagtggagaagctgaggagcccctcttcactggtacatccttccctttacagtggctggatctctgctctggtggtgccgaagggcaacacagcagtatccgtgctcatgctgctggtcgccctgctcttcactggcattgctgtgctaggaattgtcatgctgaaacgggtgagggctgtgtcgaaggtggggccgggatggtgagatcatgggtccccaggggcgtgggtggaacattcaggagcaactggcacaggtcaggctgctgggttgttctcagctaatggacctctggggtgtgtgtttctgtgtgtgagtgtgtgtgctgggcagcaggctgctgagtggtagtgatgctgttaggctggggtggggaaccagtggctggaatgggcggtaatgtctttgtcctctacttgcagatccactccttataccgccgcacaggtgccagctttcagaaggcccagcaagaatttgctgctggtgtcttctccaaccctgcggtgcgaaccgcagctgccaatgcagccgctggggctgctgaaaatgccttccgggccccgtgacccctgactgggatgccctggccctgctacttgagggagctgacttagctcccgtccctaaggtctctgggacttggagagacatcactaactgatggctcctccgtagtgctcccaatcctatggccatgactgctgaacctgacaggcgtgtggggagttcactgtgacctagtccccccatcaggccacactgctgccacctctcacacgccccaacccagcttccctctgctgtgccacggctgttgcttcggttatttaaataaaaagaaagtggaactggaactgacatccccgtttcctgaatcttcattgggaattaggccttatgaaagagaaaggagagtgtggagtgaggtgggaaggtcggacccggctttagtgtaaactgggagatatgaggggcggggcggtggagcccgagtggctggcgcaggaaggaggtgggaagtccacggaaacgcgaaacccggagacgccagggagccctgctccccacccctctccattaatgacggggaagagccaccgcctctgccgggaacgccaaggaatacgcgggcctggagcctgaaaagctggatggggctcaagtggaggcccaaaggatcactagcagcctagccagggtccagagcgaggcagggactggaggagcgcttatccgactgcctcgccctgccgcgggatcccccaaccccgacagggtctcagtcccgaactacaactcccggggtgcaccgcgccggccctcgccgccatgcccctccttcccgcaccatccccattcccatcccccttctctagtccccgacctgcggcagccggagctcggggagcggagcgtggtggggaggggagcgggacaggcgacacaggagacagcggcgccgcggcctctccccaccaggcggccccggatcctactggacgccctgagggcacaccgaccgcgcctctagagtcaccccacgccgacccctcccctcttctctagacttatttccatccttcccgcttttaccctccccacccctccctgggctccaggccgccgccccctcctcactcctggaccggcccttctcggtgcccctcttccctagggagatgcgatgagccggtgcccccgcgtcctcatcgtcgccccgggcacggtgcccgtccagtgcccgtggtggggagggagcactccgcggtccctccgtgacgcccctcgcttggccccccccacagctggcgtccctcggccatgccccaggggacccagccagggggtgggctctagagcgagtggggtggagaggagaaaggacggggccttgggcgcctctgagatgctcccaagtgccagggagggccgagcgaggcgcaggcaaccgggcagcaggcatgatgccctcgcctagtgactccagccgctcgctgaccagccggcccagcaccaggggccttacccacctccgcctccaccgaccctggctgcaggccctgcttacgctggggctggtccaagtgctcctgggcatcctggtggtcaccttcagcatggtggcctcttccgtcaccaccaccgagagcatcaagaggtcctgcccgtcttgggctgggttctcggtgagttgggtgcacagttgttgggtgggggaggctcctcgggccccaccctccacaccagctgcaagtccacatgcttgcctctcctccctctcctggtcctctgcctccttacagggctgggtgcatcctgtggtgaggggctcactcaggagcctcccctgccaggctgagcctgtgcccactctgtccccagctggcgttctccggggtggttggcattgtgtcctggaagcggccattcactctagtggtaggtgccagggtccagtgcccactgggaggcaggtgcccagcacgcaaggggaagcccatttatgtcctcaagaagggaactggctccccagttggtgccagcc

SEQ ID NO: 4022 - DNA, 6000 bp, Homo sapiens
gcagtgagccaagatcgcgccactgcactccagcctgggtgacagagtgagacgccatctcaaaaacaaaaaagaaaaaaacctggcagatagtaccattcttcttgggtctggtagaggctactccttagctgaactgaattttggtgttagtactagctggcatggttttacacaagtatgtggaatcaacagctatgaagtacctccttgttggatggctgatgggcagatgggagctcatcagacaaccccccttcccccatctctcttctcagcctctgtgtccagatgtttgactggtttgactaccatggccacatgtgtatctcctttgagcttctgggccttagcaccttcgatttcctcaaagacaacaactacctgccctaccccatccaccaagtgcgccacatggccttccagctgtgccaggctgtcaagtgtgagtggggtgggccgaagtggactctggggcagtccctcccttcattggatctctctgtcggttgtgcactggtgaagcccctaaacagtcagctgtctgttatctgcagttctttgatttactgtcatcttgaaacgtcttctgacttaactccttgactgatgtctttatcgtcactgattgctcttactctacacctagcctagcagcagctagaagagaaagcctttggaatcaaagcacttaattaccctccccttttcctttctccctttcttgggaaagcatcagtcagacagcaaacataaagagacaaaaatacactccttagggtaaaggcttacatttgtctgggatgagatgttcattcacagcaaaggagatgggaacacagagtatgtagttcagctaaggggcaaggtggggaattcaaagaaatatatcattcctctggagtcatcaaaataatacagtttcacagaattgagttaacataatgccagctagacacatgtcaaagtgtgtacacactacaactcaaagcaaacttttttttttttacatcagttgagctacatatgtatcttacattagaaagagcagagcttcttagaccaggcattccatttagacgtagagcagaaagcagccctagtgattctggacctgtctcctcactggctttgccctaggtaaccaggcctggggtcagctgataccagttagctctggccacctgcaccaagcctgacctggccttctcccctacagtcctccatgataacaagctgacacatacagacctcaagcctgaaaatattctgtttgtgaattcagactatgagctcacctacaacctagagaaggtaagatggatagggtctgcccttggttactgggggcaggcagctgcaccactttgccttctgccgagccctttgttttctcccttttatttcgtcctcccacattttctccctgtctggctccaactgggtaaaactaaataggttgaaagggagaaatctcttaagaagacttaaattgggagataacttgtacaggggacttcagataactttccagtagagtgaaagtttttaaggttcttggtttggactttatttatttatttatttatttatttatttatttatttgagacagagtctcactctgttgcccagactgatgtgcagtggcataatctcggctcactgcaacctctacctcccaggtttaagtgattctcctgcctcagcctctggagtagctgggattacaggcacccgccaccacgcctggctagtttttgtgtttttagtagagatggggttttgccatgttggccaggctggtctcgaacccctaacctcaggtgatctgcctgtctcgggctcccagaatgctgggattacgggtgtgagccacagtgcctggcccggacttcttttttgagatgtgtatttctgtgaggtaggaaagctcggctcctttgactaactggagataatggagatctcagacctaaagaagctctccctcctttgacccctttgctacatgttacatatttttagagaaactcctttgctacatgttacattttttcagaaaaacccatttgctacatgttacattttttcagaaaaacccatttgctacatgttacatgttttcagaataactatatatctggcacttgagtgtagtcttcagatgcttacagatgtgcacgctgttctataatcatttcttaatccttttgctcccctacttctaaaagtattatgctggatgtggtggaagctgtaaaacaggaatttcccagggcttgtaaggccaggcaggagatcacagtaccttttttaaggctcagaagcaatgtagagaatactggtggaatctcagtctgggtgcagaggttcatcctctttctcctctgctcctagaagcgagatgagcgcagtgtgaagagcacagctgtgcgggtggtagactttggcagtgccacctttgaccatgagcaccatagcaccattgtctccactcgccattaccgagcaccagaagtcatccttggtaagggagggcaaggctgtccaagtgtgtgagatgatgtgagggtggggccacctaagcctcataacaccttttccctcccattctcacccagagttgggctggtcacagccttgtgatgtgtggagtataggctgcatcatctttgaatactatgtgggattcaccctcttccaggtaagtgatgggatgtcttacttgactgcctggcattcttctacctggttcctttgttttctgctgaggacctgcctactcagttctccacattgcctgccttcctggcagctgatccttagcatgcccttttcagtcccatgctcagttctgtttttgtttcccagacccatgacaacagagagcatctagccatgatggaaaggatcttgggtcctatcccttcccggatgatccgaaagacaaggtgaaccttgagggggcactagttaactcttttccttttctctccacagaattggtctatttcacatcattttcttttttctttgatacctcctctccccccagttactttcagatggggaaataagggaattgtaacaagggtgaccttctgattcctcaacctccccttcccctctagaaagcagaaatatttttaccggggtcgcctggattgggatgagaacacatcagctgggcgctatgttcgtgagaactgcaaaccgctgcgggtgagctgggctcgggataaatagtgcccaccgtccagaagtcacttccttcttagggtggtttgccccctggaatgctcttcacaagcagagggttaggaaaggaggggaggaaagctgaaagaagacatctttggtcaacagaggaaacataagagggagtggttttgtggagggaaggaggttagacagcctaaccttgagacaaccagagatcaaagcaatgtcctggattctttaggtcagacagaaaagaataaactacctttgaagagcttacattttaatgaggaactaaagaagattcatgaagttgacaaggatatacaagtagaaagaactttcaaagattatggagtaattgtgctagtgggaaggtaggttgagctataatatcagaaacgttggtcctggtgtggtcgtggttaggtagccttcaaattggttgcaagcagagccttggttctccaagaatgaaaggtagggtcttgaagaaggcagggtttgtaaggcatcctgcctcacctttttcctgccctcctccaccagcggtatctgacctcagaggcagaggaacaccaccagctcttcgatctgattgaaagcatgctagagtatgaaccagctaagcggctgaccttgggtgaagcccttcagcatcctttcttcgcccgccttcgggctgagccgcccaacaagttgtgggactccagtcgggatatcagtcggtgacgatcaggccctgggcccccctgcatcttttatagcagtgggtgtccagtccaggacactggtgcttttttatacaagagaacgagccagagttcactccttcctcctggctctctatatacctgtgaatatgtgaaatagtgtaaatatgaaagaacttgtacctatcacttcaacccctgccttgtacataatactattccatccacacagtttccaccctcacctgccccctcatacggagttggatgggggccgagtgaggtaaccaggtggcatctaccccatgttttataaggaattttgtacagtctttgtgaaataaaataacgtgcttcatttgacccccatccctggagttggaggtttgggaatgctggggtggagggatgaaactattggcaaactttctgagtttgggtatgaagggagtcctccttaccctccaaaatgaagcacagccaggctaccagtttatttcccctgtccaccttatcatatgggagggtagtgatgggtggggcagcatttctttcagattaaaacagagaagtgttatgaggtggcacttctcggatgtggaattatgagagttgggaaagatctgactcctagagtcattaggccgcggcccagtatagagccagaaactcaggttgaaaacgtgctcaacctggctcctaggggggattgccacgaccggtcagaaggctcccgtcgtccatctcgggagactaggaaggccggattcctacgcgaggcctgctgggaagtgtagttcgttagtggaaggaagtcacatggaagaggggcggtagttggttgtgggcactgggttagaggtatcacgtgggggcactttcgtcttagcttttggacaagacgcaggcgcaacccacggctgctgcggggatccttgtggcccttccggtcggtggaaccaatccgtgcacagagaagcggggcgaactgaggcgagtgaagtggactctgagggctaccgctaccgccactgctgcggcaggggcgtggagggcagagggccgcggaggccgcagttgcaaacatggctcagagcagagacggcggaaacccgttcgccgagcccagcgagcttgacaacccctttcaggtgacttgcgccagtcggcctcttttgggcggtcaggttgattcttcccggttctgtagggtcgggctaacttgtatccccatttgtgacatttgatcctgggaagagccgccacgtggggtgacagtgactccagaccagtgagcactctggggggcgggccctgccccttaatgggctggtgctggcagtgttggatgatggatttgaggtaaatgttgtcccagtcctgggacaacggcgtggccccgaaggtgcagtacttggagccacaggcagtttgggaatggtccctgggaattcccctaggtggcactgggtgccagctgagacccgggtctctgccctcaggacccagctgtgatccagcaccgacccagccggcagtatgccacgcttgacgtctacaacccttttgagacccgggaggtgagctactggagagcataggagttcaaggaagggaagggtttgccagtgagacaagttagcttgggtacaggggacttttctgcatgcacaggaaggaagaggcactgtgatcttagttccctgagagaggctagtcagccatgggatgcctcatccttctagggccaccagggccaccaacccaaatggtttgagctctaaaagtcagtcctgggaagatctggaggctggcaaggccttaaccaatgttctgtatgggaaggctttcttgaagaaaataaaggttggggctggttggagtttaggttaggtgtgcagtttgaaagcaaggaatgaggaggactacacctgtttgtcccactggattagaagatggtgagttgtaagaatttaaggggttttcatggtacttaaaacttaaaaaaaaaagccaagcatggtgtgcatgcctgtaatcccacttgggaggctgaggtggga

SEQ ID NO: 4023 - DNA, 6000 bp, Homo sapiens
tcacaaaggacccttgccttgttcttatctactttgccgctttttttttttttttttttaagatagagtctccctctgtcgcccaggctggagtgcagtggtgccatctcgactcactgcaacctccacctcctgggttcaagtgattctcctgcctcagcctcccaagtagctgtgattacaggtgcccgccaccatgcccagctaatttttgtatttttattaaagacggagtttcaccatgttagccaggctggtctcgaactcctgacctcaggggatccacccacctcagcctctcaatgtgctgagattacaggtgtgagccaccgtgcccggctactttcccgcttttagttggagccctacttcttcctgctgctgcctcttgggtgaggtcgaggagacccctgtttctggcctcctcactgacgtcgccattccatcttcagagtatgatatctacaaccaaaccaacaagtcatgctgtcgctctcatcctgagagactgcctctcaggatgatatgcccttatgctaaaatggctcctcattactggctgtgaggctgagagggaacaagagggtgaaggggctgagaggacacggacatccttcatgtgtgtaggaggaaggggtataccgtgtgctttgcatacctagaagcatctacctcaggaaggtatcttccctgggttcagacattcaatggggtcagtcaagatttggaggttttttggggactcactgggagctgtcccacatcctgtgcctcagacccgagctttcccaatgatggaggaagaattgtttcagagaaaaagcagagaaaatgctttctgagtagcaaaatgctgggcttttgcatttcaaaagccaaagtccagacatgtgtcagagtacactagagctgtgctgttccatatactagtcacatgtagctattcaaacttaaactgaaatgagttaaaaaatgaggcggggcatagtggctcatgcctgcaatcccaacactttgggaggccgaggtaggtggatcgcttgaggtcaggagttggagaccagtctggccaacatggccaaaccccgtatccaccaaaaatacaaaaattagccagctgtggtgacaggtttagccatgttggcagggctggttttgaactcctgacctcaggtaatctgcctgcctcagcctcccaaagtgctgggatcacaggcatgagcccaccgcacccggcccatgtgttttgtttccagacaggttgttgctttgtcaccaggctggagagtagtggtgcaatcatagctccctgcagcctcgaactcctgggctcaagcgatgcttccacctcagccttctgagtaagctggggttacaggaacatggcaccatacctggctgcttaaaaattttttttgtagagacaggtatcgctttgttgccaaggttggtctcgaactcctggctttaagcagtccttccttccaaggtgctgggattgcaggtgtgaaccaccttgcctgactgtttttgtttttgtttttttgaggagtgcttgacacctcatttgtcttttcattatggttaggactataggtcatcctccttgagggcaggcaccatatcctattttgtatctctcttttttttgagatggagtctcactctgtcacccaggctggagtgaagtggcacgatctcggctcactgcaacctccacctcccaggttcaagcgattctcctgcctcagcctccctagtagctgggattacaagggtgtgccaccatgcccggctaatttttgtatttttcgtagagaccgggtttcaccatgttggtcaggctggtctctaactcctgacctcatgatccacccacctcggctttccaaagtgctgggattacaggcatgagccaccgtgcctggccctattttgtatctcttatagtcactatcacagtgcttgacacataacaggtgctcaaaaaatgaatgctaaatgtactaatgaaagaacaagtgactcggatgggatagaggcaggaaaagggtcagtgtataagtgggcaacccaaagatgaagacatttctcttctggacctagaagtggctacatagtaaggtgtccaaagagtgtgtgctaaagatacattgctttcaggtgcagcagagtctgagaaacaagaacacccacactgtccatctttccggtcctgaagaaatggctctagaaagcaatatttgagcaaacaaggtgggccatgcctataatcccaacactttgggaggcagagacgagtggatcacttgagcccaggagttagagaccagcctgagcaacatggcgaaactccgtccctaaagtaaaaaaaaaaaaaattacccaggcatggtagggcacacctgtggtcccagctaatcgggaggctgaagtaagaggatcagctggcccaggaggttaaggatgcagtgagccatgtttgtgccactgcactcagcctgggcaaagggtgagactctgcctaaaaagaaaaaaaaaggaaagaaagaaaaaggaaggaaggaaggaataaaaatttctccaattggctgggtgtggtggctcacatctgtaatcccagcactttgggaggctgagacgggcggaccacaaggtcaggagatcaagaccatcctgccaacatggtgaaaccccgtctctactgaaaatacaaataaattaactgggcatgctggcatgtgcctgtagtcccagctacttgggaggctgaggcaggagaattgcttgaacctgggaggcggaggttgcagtgagctgagatagcaccactgcactccagcctgggcaacacagtgagactctgtctcaaaaaaaaaaatttctccaatcagcagacgtttcttgagcactttctttgcccttgaaaaagtgtacactacagaaataggacctaatcattaaggtacatttttctttttcttttttaagacggagtcttgctctggcaccaggctggagtgcagtggtacgatctcggttcactgcaacccctgcctcctgggttcaagcgattctccaacctcagcctcctgagtagctgggattacaggcatgcgccaccatacccagctaatttttgtatttttagtagagacggggtttcaccatgttggccaggatggtctcgatctcctcacctcgtgatccacccgcctcggcctcccaaagtgctgggattacaggcatgagccactgtgcctggcctaaggtacatttttcaagccagaaacaattaaaggaaaacaaataaactgttgtgtgtaaaagagctcaaagccaaggagggcttcccagagaggacaagaccagaacagggtcctgaaggattggctggatttggataagaaagagaggcagtaggacatttcagggaagccacacaccaaggcctgaagtcagagcagattggaggttgtatgtagagaagtcattattaattcctggactacttcctgtgtgctcaggcaagacactaagcaacgggaaatggacaaccttttctcaagaagctgcaatcttggaggtggagaatggaaggacagatactaaggcagatacaggcaatgtgtattattctacaagaatgtaacccccagaaagtagaaaccatatctgtcctatttatcactgtatctccagaacctacagcagcaccaggaacaaagtaggtgctcagtaaacgcatattgaatgcaggaatgctacaagggaggtatagaataacagcaatactgataattaccatttactgagcacatacatgtgccaggcactgtactaagagttttacatacatcatcttatttgatactctaaccttttgtgagtgctataattatcttgttttacagatgtgggaaccaaggtgttatataagtaatgcttgttcaaggttacctaaccagtaagtgacagaactgggattgaattcatgactgcctaacttcacagttcatcctctgaacctaagatctactgttcaaaatgctgttttgggaagtttggcagctgattaaaaagtgcagggaggccgggcgtggtggctcaagcctgtaattccagcactttgggaggccaaggtgggcagatcacttgaggacaggagtttgagaccagtctggccaacatggtgaaacaccgtctctactaaaaggacaaaaaattagccgggcaggtggcacactcctgtaatcccagctactggggaggctgaggcaggagaatcgcttgaacctgggaggcggaggttgcagtgagctgagatcgcgccactgcattccaccctggggtacagagcaagaccctgtctcaaaaataaaataaaataaaataaaataaataaaaataaaaagtgcaggaaagacctaagatagaaagactactagagtaaaacccacatccagaaaccagcaagaactgaagcagttatagtaggaatggagaaaaaaagatctacttttttggcacttcaaagggcttctaaataaagctcagggctcggtgacctgctggatgtagggaatgtctatgtgtcttgtctgagaatagaaaaaatactggttggaatagcttttctctaattctctgttcgacagtactagttgacattttagatagatgatccaaatttctaggtttgctagtttcccaaagcacctaatgaggtgcgggtcacatacagtagtgaaaaatcagcttgaaaagccccccaaagagggccgaataagaagcctggagaacgcacaaacctcttaggagcgctcacagcctctcaggcaggcgggcactacaaagggaaaggtggggcttctccaagaactacaactcccacaaggcattgggcggaacaccacggtttccggccagtgcttatttccggtctttcggatgctgacgctctcttcctgtctttgtggctccggaaaggcgtttgggatgccaacggtaagtccggaggcttagggcgtccgaacgggagaggcgagagcctcgtgtccgcgcatcaccccgtggctgggggttagctaggggagggcgggaagggcagaggacgcggtggctggaggacgtgtaaccttgcaagaggcgggaggcggggggcagaggtgattgacccccgcccccccgcccgtgggaccaagaaagggatgtgacaggcgaggacgaatgggatctcaggggctggactggagagtggggtacagggatgtgaggaggaccccgcgagtccgcggtgggatcccaatagagctgtggccaaggaggaggggagcagcgggaaggctgtgggcactcctgtgtgagggaaagctacaggctcctgcaggtccgagatcggccgaaatcaggcaccccaaggaagccctgctctggccacatggtgtcccctcagaagactccaccagccggtgggcatcccggggcttctgacaggaagagggcagtagatatattggtgcttgtaccggtttttcgagggctgcagggtgaagatggtaggagagtctggagaacgggtctgctctggtggcttatggactactctgtggaaggggctgctgttctggtagcatcgaaggagctttctacgggagcgctgtcaagaggattttggtgaatttgacgtacttggtttgataactcactttgcttttttctctaaagatgaggctgctgtcatttgtggtgttggctctatttgctgtcactcaagcagaggaaggagccaggcttttggcttccaaatcactgctgaacagatacgccgtggagggacgagacctgaccttgcagtacaacatctacaatgttggctcaaggtaactcgaggccctagagttacagattaagcctatttctggattcttagttttcagatgggaatagggagcatattggtgggtagtggtttctctttgggacacttccagcatcaga

SEQ ID NO: 4024 - DNA, 6000 bp, Homo sapiens
tccctacctcgtccctgacacccaggccctctgccaccatctccctgtcatccgccaactggccaccagtggccgcttcattgtcatcatcccaaggacaggtaagtacattggagaggtaaggagacagagtatgactaaaagagattctgggcttgggattaagagaccttatttggggcccagtttatatgcagtaaccttggtcaagtcttactacctttgtgaacccgtcacttcatctgtgaaatggacataatccctattctgccttacaagacagttgggagaaacagaaaatgtaagtgaatataatgagaaagcacttggtaaattgccaagtatattgctggcagaaggtcatgttttcagagaactttgggagccctctagggagccagggtcccttctctgcctgaagagtgtactgaggtgagctcagatacttcctccagagccccttgtcacagcagtctgagcttatctgttttgtctttccctaccttgcccaccagtgatcgatggcctggatttgctgaagaaggaacacccaggggcccgggatgggattcggtacctggaggcagagtttaaaaaaggaaacaggtgagtgtggcctggctggacctgtgctgagccctgggtctgtcttttggataacacatgcttatgaaagccccttgctccctatgggtaagacacatacatacccgtctctactcacagttagctcacctcactgcctggggagtgataccagagataattagaagtcaaggttgtagctgctgaaatagagggtgaccaaagggatcaggagccctgtggggagcactgagctgctgtccttcctctggggcaagcctgtgatcagcacccactggggagaagggagcagacctccctcccccaactttagactgtgaactcctttataggaatttctcctgctttggggttgggacaggtgatcaggtttctcagagtgtgagggcctcatccaggctgcccaggggcttcccacctccctgctgagctgagggagtggtaagaccgaagccagccagggaggggcagctggcagcatgtgcagatgctcagccggtacaggcctgcccttctggcctttggggctggaggagaactaggcagagggtgtagggaataaggagaaagcttccctctccctgctagctggcccaccccctcctctgcatctgctctggctggccaggaagctgcacaaggtctgattgttcggaccttgtctccagaagccctgacttgaaaagcatctgctgcttctcccctcccagctcctcccctgagaggaaccaaataattgatgttatcaggaggaaaagtgagctgggcccagcagccaggaagccacttaagaatggctccagagctgtggtgggagagacatgttccccagccccgcctgcaaaaccaggcccccagagccacaacagactgctttgtgtaaggcaccctgccagtctcctgctcctgacctccactcgcacatctcctctgcaggtacattcgctgccagaaagaggtgggaaagagctttgagcggcataagctgaagaggcaggatgcagatgcctggtaacattttagccctcacccctagaacctcaggccacctgccttgctcctccacgagcattcctagggagaacgggtagggctggataattctgaggctccacacgtagcctgccagggccctcctgcaggcctcaccttgcgaggagtacgaagttgccgcagcacctgagcttttcctctgcagatgggtcagcctctttgggccttgcgatgctcaggcttggtgttttccctcaatgcacctttgcctgctccccatatgtctccagggccagcttccagggcccactgctgctcactgccctcccagcccccagctgcccctgtcccctggagatcctggtgtttgggctgtgctaatgctgggtcttggcccatcttcccctctgccccccatccccaggactctctataagatcctagacagctgcaaacagctgactctggcccagggggcaggtgaggaggatccgagtggcatggtgaccatcatcacaggccttccactggacaaccccagcgtgctttcaggccccatgcaggtgggtcatgggtgaggtggggggatggtgtggaatagggacgaggtaccagagcagactccatccccagaccctccacatagctacctttttttctcttccatcactccttccccagcgcctcaacaatttgctcttcagttcaggaggtcagaccctctccatctttccttctcccattccacaggcagccctgcaggccgctgcccacgccagtgtggacatcaagaatgttctggacttctacaagcagtggaaggaaattggttgatactgacccccaggccctgcagtggggctgactccagatctctcctgccctccctggcagccaggaccagcacctgtagtcaccccaccacacgcagactcatgcacgcacacaggagggaggcctagctgctcagaggctgcagggagggcccaggagccggctgggagggtggggtccctttgttgccaagacgttaggaaagcgaggaaagtgcttggattaggagagtcttgtgggcccctggccagccttcctgcctcagctcccctgctgtctccaggggcaggtggtaggcatgggtacctgcatttcactggaatgggttcttggatctctgaggggaaggaacagcaaaagaggcccttcttcctcacccaagatgcagggtggttggggccaggagtttggaccctctaggtcttgggggaagagctgggtaatacctggtgtctgagtgattctctgcagacccttcccctcctcaaggatcacccatcctcctttcagccccctttatggggaccaggcagctctggagccagccacaggggctgttagagaagcaaggcctggagtggcctgcaccgagtagcagggtcagggttcgtgtgctcctcctcctgctgcaggggctgcacatcccattgccccacttctgctttgtgtctccctctgtctagcttccagggcagggagcaggccccacctagggctgcaggcagtctggcctgtgccagcacggtctcctgtgcccaccagccccacaggtgctgtgctttgtgctcttggctgctgtgctgggacagaatgggatgccaggaagagaagaaagggggtgcagtctgaggccaccaccccccttcctatctaagggagggctgaagacaaggggccggcattcagtgggcagcagaaaggagaggctccttgaagctgctcagtcagaggcccccgtccctccttttgccttccgcaggactgaagacctgaaggggctggcttttggagtgttgaggtgaatatctgggagcagagatcatgaatagctcagggcagtgaatggcgcaccaagagcagggctgtgtgtgggaggctgcagccaggattgcctcagctcctccccctcaggctgggaggatagcacaggctaggggctcggggtggagggtctcagctctgctgcccccaccccagtactagcctagcttcccaagctgtggcttagaggatagttggcttcctgcctctctcctctaaaatagcaagtctgggaaatcctggggtgagtggagtcaccccactcccagttgctggcagagactgagactaaagcatcacttaataaaccccccaagcccaatccctgtctcctggtgcctgtctgtacagaagtttcattggggggtggggcactgaagatggcatcctgaaatgcattttggaaaggcttctttgaagtggatggaacagaacaagaagcaggcaatttgagtgaaggccctggagatggtttgataggcactgtcaagttccttgactgtaaactgaggcggtgcctttgcaggggtgatagtgaaaatctcttgccagcaacatcgctgcctggggttggttcgctgtcactagctgggtcctcttccccaagggggtggggaggtgagccttgaaaccagcctctggccaggcgtagtggctcacgcctgtaatcccagcactgggaggctgaggcgggtggatcacaaggtcagatcgagaccatcctggctaacacggtgaaaccccatctctactaaaaatacaaaaaaaaattagctgggcatggtggcgggtgcctgtagtcccagctactcgggaggctgaggcaggagaatggcgtgaacccgggaggcgaagcttgcagtgagccaatatcgcgccactgcactccagcttgggtgacagagcgagactccaccttaaaaaaaaaaaaaaaaaaaccagcctctgagtcctcaagtgcctgtcctgcaaggattggcatctcaaattgtattcggggggggggggggggggagggggaggtggtgagcctggtgaatcccccatgatagaaccaacatttaccaaaggcagtttgctctgagccctaggcagcaccaggtgctaagaggcagcaaagcatggtgagagatggcttctgaaatctgttctgcatttggggatttgggttcctctgccagcctaaggcagagctgtccccaactgctgggagaacctggaacgggaacactgctctgagtcgccggggggactctacagcaccatggccacatcctgccttgggcccctaccctgttctagccagtcagcacagggagtttgggtcgtgctggaggagctggctgtgtgcaggcggccgagtgagctgcctgctaatggggctgggccaccccgtgctgctccctggaggctggacaaggctgggattgttccctggctcccctttgtctccccactccccgcccaggcctggcccgcctgcctggccactcttcctccatcagcctggctggcagcagccttggactccgcccgtggagccctgggcctgttgacccaccagcttaggagcacccaccaagctctgggtaaggaagctcaccttctggggctcttctgggaaaatagaggtaaagcatcttgctccagccacccctcccccatttccatagcaactgcacacactccactccagagatctccaaaccctactactaagggaaggcaccgtgagggcagctagaccccagcgtattcctcactcctcccccagatagatgggcagcactcagggtaggggagacccccgaccatcccacttgtgggagcgagcaagggataccctgggaggccctcatccatctttgttctgctggggtgcagggactagggccaggtttgcctttgcccagcagggtctccagcacccatctcgggcagaggctgggggagtgactgctggtgcaagccccaaagtgcatgcggcaaaaacatggatgcagagctggtggcaagaagaggggctaagttatagagttgctgcaaagttttggcctggggaggtggggggagtgtcctagtcctcctcctggggcggctccgcctgcccagctggcccagcccctccacttgtgccaaggaatgtgccgggagaggcgggcggggcagcagagctgcggccacccggaggcagtgcacaggtctggggctgagggatacctgggctcaggaggggcagggaccccaaaattctcctgggggcacaagtgtagtcctcagagaaaagccaggcatccccctacctccttgtcccacctgatggcatctggcttctccagagattcggagtgccaagagtgttctgtgctcagttcaggcgctgtgggcgaagcacattctggtgggaaagggagtggtactcaggctgtctctgtgctggcctccaggagtcaggattcttcctgagacaaaaactggggcctgcggggctggatcactatttgaggcagcctcccggctgggagg

SEQ ID NO: 4025 - DNA, 6000 bp, Homo sapiens
ggcatccctggcacacactcatcagtgggaggttgtactgaaacacttgctaccacaaaaggccaaggcttatccctgccactgccccacccagcacagacgaagcctgtgctcatgcaaatgtgtgttcccaaacgtgcccgcccaagggccactgcctggtctcacctgtactacacacacacacagacatacacacacacacacacacacaaacatctctgcacccccatagcctctggcccctcttcacacccaagcagcaacccctactccaccgaaacctcccctaccatcttttcagcagatcaagcaagagtcttacaggctatcagttagggaccccaaggagggacccaggaaagaggagaggagcaatgagaggaggcagtcagagtgtcgaggaggggagaagaggcacagactggctgacttacacagcaagagagagagagagagagacagaaagatggaaaggctcaacgaggagggtgggggcagacgggcagaaaaacaaagagagagtgaaacagagacactgaaagagaaactgacaggaagaggtcagagagatagtgacaggcaagaaggaagacagataaggggagggagacagacagataaggacagagagctacagaaagcgagatagacaagaaagaaagaagaatgagtaggcattcggggctaggggacagctgacgccctggggcctgcctagctgctggatccgacataccagggagttcctgagaactcggctgccctgtagtgacatgttagtgtgccccccccaccccaacaatacacatgccaggggcccctgactcactgacggttctcagaactctccccctctaccctctaactttccctaacttataggaaccaggaccagcctaagtgacccctcccttcctcctttcctcccttcccagccttggccccaccaggacagccaggatcaggtcctaagtttccctgtggacttagtagaggcctataaagtaacctccactgactccgagggaggccaagtccctattctacccaccccccagcccctgcccagagggtttcaagctgtagggacccagggagggggtgagaatgcagtgggctggcagggtgtgtgggagctgtcaggccagcgtgctcaaagctgcctcaaagctgcctcattcgtttggattcataatcaatctgtctattcgagtccattatctcctcgttagctctgcgggtgagtgaggagggagggggctgtgcaggcagtggggagggggatgtcaggctgcagccccacccagggggacatctcagctcaccaccctacatgcttgctagtccccagttctggcctgtccactccccctaccactcccatccctaccctgctggacccacttggggcttggaaagagttgggaaacacgagccctgatggggagcactcaggagtctggaccccaatctgaaggcccagggtgatgagagaactggactaggactggcaacctgtctctcatgccccctcccatcatgcagagacctaggcctagaccaagacaaggccatctcctctactcctggtctccctagagctattagagagagagattgagtgccttcccgttaattaccatgagatacccaaggaactcagtgccaattactgcaagctgctcaagtaacttccagacagtgatgatcctcacctcggataccttccagcccatcacagcacaaggccaaggttccttgtccaccctcgaaaccccaggccacaggaggaggattttctagcagttctcccctcttctagatgtcttgctggccatgatagccatatgtaatattcaagtattttccagccatcaccatatgatgcctgagtacctccaggccagtcattaccgcatactcccataggtttcaccagctgctaaaaagtacttgagtattttgtaaccaattcctgcagaatgtcagagtcctgcagaatgctgaagattcctcccagcttcgtgtaccaaagggaggagggtctctcagcaagggccctgactccccgccccaggtagagagacaaggttggagagggagatgggagtggggagagaaaatccaggagggggtcccatttcccagatccaaatcaacgggttctgggggaaggaatggtaaaaatggaaagaggagagctcaaccactcagctcctcaccgcctcccaccaatgccagccagctcaatccccaattccagaagaaaagctagggttgcctcctcataacaagaaagtgggcgggggctggcttgcccctagaaaaggaaaaaggcagtaagggtgacaaactggggacttctctgctggtaaccatccttctctgtaggacagagcaggggcttctggctgagctccagaaagcgccttctagacggctaggctctctcagacctggtccacggagatttcccccttcgatctccctgaagccggcggcccagctgccctgaacactaggggacatccaggcactgaccataaagcttgctagggcagcggcggctgcggaggaacgcccgggcagcgccgaaggctgcgtggtgccagccttccgccgtgctcgtcctgcctgaccagcaaacaagcagcgagtccgcgccctcggggcactgcaatgcctgcctgtccccgcgcccccccaccgcccgccggacactcacagctcagtcaggttctctgcgccgggcaggtggtggaggctatccagggccccatcccgggtgcatcgcagtcccgaggagccgtgggggcagcaggcatcggggcagggtgcggcgcccgcagatgccagtatcagccaagccagcaggctgcccggccccgcagcccagctgtgccagccaagctgcccgcgccgtccgcctcgcagcatcgcggcggcgcccgcctcgctcaggcggggcagccgtctgtgcgctcccagctgcagctgccaggcctcccccgacatgtgcgctgggcggtgttaaagacccagccgccaggaaagggcggagccagcggcccccgcccggccccgccttgcccctcttctccacccgcttcctactctctgacgcccccccctctgccccctcccctgttaggggcccccagcgtcagccttctccccgaggatccgcctcagctccggcagacgctgaggggccgcagcagaacgcctcggaggtgtctgctgaggccggaggtgggaagctgatacgttatttctctcagcttaaagcagctgcatttttacatttggggaggagggaagatgactgcgttgaggaaaggttgctgtccaggtcatcctagccagccccaggctcagcgctccatcctcgcggcgcgcgtgcctaggggagtgagcatgtcacttggagtaagttaggtagaacattctccgaactctaggaagaaaacgaaaaggactaccaaaggatcaatcgcagaacctggggaggaagacacagacggggcagagaaagggaaggggtcgcctaatccggccgaagggagtccggagagccaagaccgcgcctccaagagaagccacagggtggcgcgagaagcccgcgcgcaaaggcgcgagctccccgcccgcgctgggtgcctgggggtgcgatctgcagcccccagtgagcaacgcctcaggtctcagcttcagtccctgaccccggccagccagcgccggccccggggcaggatagggcaaggcagggcagggctgacatcgatcgcctccctgacaagagcatcgatttattcgtgaagaaattaatagatcttctcttagctcctcggacgcaggagccgcccgcgggtggagctgaggaccgcgcaccttggaggccgagcacctggaaagccccgggatccccagcacccagggcagcagaaggctggtcccaacccctcccaccgcgcaagcctccgtggctgcactaacccatccgtctcaagctggggagagcgaagggaagaggggtgtctcttggcggggagacaggcaaggccccagggagcgggggaaggacgacctcctagaggctcacggttctctccgccaaggccccagcacggatggccccccaagtccccgagacagggacacacagaccgaccgagcagcctgagctcaagaaggtgaccagacggaggcagagccctacacagtgatcgccttcttcctcgggatcttggtcagaaccaagggactaggcggtgacggagcctggcgctaaggggtctccaaagaggacaaggaggcctcctaggaggctgagaggggctcccagaggccaagggctgtccacgttctcccgggtcgaggctgccagaagttaccccgcagatgtcaaggcaccgggaagcagaatctagacacagcgctccccagaagcccgggcgcgctggctgcccctccggcggtgcagccccacttggaagaagcctgtggtggggacaaagggttggcgggagccgctgcagccgcagcgggatttgaggaagctcagttcttggcccaccctccccccgtattttggccttatttccccaacagacctgtcctcccctcagttgtcaggctaaatattttgacttggcgggaggggtggagagaacggaaaggtccctgcgaaccaatctgtttaggcggggggcggggagggcgggagctgggcgcggcccctgcgtgccggccctgggaaggaccgcagccagcactgtcagctggcgctggggggccgcgcgcccggagggatccagggagactctccctgcggagtcccacgcgccccgggacccccgctgccctccttgggagcggtccccagcctgctgctccgccctcagggttggctggcctctcggcctgccttttgctcagaaccctgtgtcattttctccctctggaggcccgagactctccctgtcactgtctgcatctctgtccccatctctcaatctcatgctgagtctctctgtctccaactgcctgtcactgtctttgtgtctctgtgactctcatttctttttttctgtctcctgctgtctctgtgtgggattccttgtctctctgcccctgccctccctctcctatctgaaccctggtctctgtgtcccttagggcttatcacaccgttctccccagagtcaccgggaggagagccgggactggacacaagccagggctgggacaatggcagtgcctagtctgtggccctggggagcatgcctgcctgtgatcttcctctccttgggatttggcctggatacagtagagggtgagtccccagaactggctcccagacccctacctccctcccagccagctgggaggccaaaaaactgagcttgcagccacagcacctccacttactctgcactggaacatgggggttggggttagcgctcaggagaactgcccagcaggaaaagcagttagttccccacataaaggtgtttttccctcagctccctcagagatgagaagagcttcaaaacgtggacaagtagatatcttccgtccctactagtgaaactgtgatcccagtgaagcttgcctgaaaacccaaatgaggccgtgagagtgttagaagtcatctctagggccactgaatgggaagaggcaggggtgggataggtagctgagaaccaggcaccattaagtaatggaggcaatgttgccgacaggaaactgcagctctgagaactaagggtaaagctagactgggtcctgagctcctgcctccagggccctgtcctgtgtcccccctcttagggcccaatccctacagggaggaaggctggttttgggggaagactgctcttcctcaacaccccagggcctgtcccccaggctagatactgcccatcagtacgttttagagaggaggggtggggggactatatagactaaatgaccctcatggaggtgctgggggat

SEQ ID NO: 4026 - DNA, 6000 bp, Homo sapiens
tgttctttcctgggaatggagtgggtgtctcctccaccctatgaaaatataaagattttcccaccttcccacttttgggccttacctcttgtgatgctcttcctcatacctttggatctgccattctaaagtgcctgtggatacctgagcagcccgaatgggtccctgacctcttaccatgctcctgatgctttctaggcctggaacttctccatcttcctaagtcttatttgcttgattgaaacctacctatctctcaatattcatttcttctggaagcctttactccttaatctccactgtgtccattcacatgctgtacagagctccaccacagcagtgggacacaagtatgtttactcttttctattagtcttctgatgctagaatgcaatttccatcagggcagggaccatatctttttatctgggtatgtctagtgccaagtgtattgcccatcaagcaggggcattgaataaaactccactgagtaactgaatgcatggcttcatgcatgcatgaattaatgactgaatgaataatgattctgcttgggaatcatatctttatgaactgtgaaaaagttattagcagagtgtgttagaagagtgagcaaaaaaaaaaaaaaaaaagcatggtaaaacaagacagaaagccatcagtgtaatctcgatcttggttcttgcttttttcttctactacaactgatactcaccagcctgccagaaagacacccacagaaagctgctgtgggtgattctactaacggttggtgtagttgatgacccatggttcacagctccccttggcctgaaaagtcataacccatccaccttctggaaaacccacacatatacaattaaaacaggaagcagaaagctttgaactgaatttgacctctagacatccctccccacctgttgttctcatggaacccaggcaacttgccaggaagtattttcatacacggagagaagactgctcaccaccacaggtgctgctctgatgtcttctatgagcctccctaagtctttctgcctctctgcctcccctcagacaccaaggctgggttcccctccacctccactgtaggaatagtaataccttctttagtaaggatttaccatagtttccattgctactaaaggaactgataatcttcatgacgaaggaaaaaatcgaactttgttaaactccagtcccctagagatacactatctaaaacttcaacttactcttggccttctctgattctctgggctttcactatcttcattatcttccatggaggtaatgaccactagcttccaagcatttatacccattctgaattctctttcatgctatttgctccatgcagagccctactggacttctagatataataaatttaattgtaaaaaatcttctgggcagaagggcctggctctgtctaaattacattggagagtgtctgcatagacaacatttggtctagccagttctgtcccagaagttcttcaacaaacaacatcacctccatagaactcggaaagtatctagttactatcttggacaggaagttattagggaaagccccactcaacaaagacatatcatgctgctcaaggtaattattgtaattattaaaactgctactaccactactgccataacaatgatgatgaccatgactatgactacttctactgccatttatgtagcaattattatgacaagtaatttatatatattatgacatttaattctctcatagtgaccttggaaccccaagctcaaaagattatatctagggatcttggaagttagcctgtttcattttcttattttcccactctaactgtcctagtaatcaaattcatcaagcaggaagtgtgatttgttttattctgacatattttatgaagactctatttgtctctgtctcagttctggcatgccccaacttggcactgtattttgtattccattcaagacattgaacacggttcacagagatgactcttgctctgcatctggcaaaataggcttcagtatgttaccacctgtggaatctccatgttaagggtttacctggttgatccaagaggcatttatatgtatgtctaatgctggttctttctgatacctgtgactccatcctgttggtggcaaaatatccttgcacaaaaagtattatctctcactttgatcaaacctacaaacataattttatttctgccactattgccttaatttttaagttactttccccaccccccaccaagtgtctattaagcctcttaatctctggtcacagtgcctactgtgcattcaagtttagctacgcttccaggatatgcctattcacttgtaaattactgccgtctgtcaaatacagagtagcacccacatgaaacatgttagccatcttagaggatttgttgccacctctgtggcccacacacctcattactgctgctttccacctgcaccttttataccaactgtgaattttacctcatatcatttggtaacaccttaagaaatattgattcttaactgaagaggccacatttccatagagggtatatagaaatcagtgaagggatatggattattttgaaaaatctccttgatgtctatgaaaaacttgtacctaccatcaatttaccatcaactttttcatgatcctatttgtactcctttccttaattccctcccatccacaaaatttctatagcttccaggttggtcagaatgggaaggaattataggccacctagaaacccattcagtaggcaagatttgatgatcagtgactagctttggtcctgggaaagagtaacttacactttcaaacacatacaaaccgtttgcctatgcagaaagttaaagtagtattgttttcaacactttaagatgagagaggccataaaacctagtttcttataatgaatctttaaaaagtacgtaaatagcatatgtttattgtaagaatactagaatacacagataagcaaaataaggaaaataaaaatcagctttaattagattttttggatataattacagtaactctgtggtgcgaattgtctcagacactttttattggagagcaggggataatgtgcagcagataaagtgcactctgcagccacttttttcttttcttttcttttcttttttttttttgagacggagtcttgctctgtcacccaagctggagtgcagtggcacgatctcggctcactgcaagctctgcctcccgggtttgtaccattctcctgcctcagcctcccaaacagctgggactacaggcacctgccaccacgcccggctaattttttgtatttttagttgagatggggtttcaccgtgttagccaggatggtcttgatctcctgacctcgtgatccgcccgcctcagcctcccaaagtgctgagattacaggcgtgagccaccgcacccagcccacttttttcttaatcatatatcctagacatcttatcttgctattaaatattattccacagaattattttaatggctgtttggttttccacagcatttgacacataacttatttttaacacacatctctccttgtgatatatttttagtattttctttttacattattataagcaaggctttaatgaccatcacatataaatattagcctttctcaaagtaaaactatgataatagtgagaataaaatgttaagtatccaattgttaaaaattcaatgttaagtattcaggtaaatgttaagtacctgaacaggtaacattgagtctatgaatattttcagtcagtccctcatttataagcacctgtgattttttggtttagagtttcatcctgcataaggttcactgatgagacaacatctactgggactacatctaatcaaagtgagcatgataataggtgttcacataacacgcgctttgctttgtgtgagataactgtattaggatcagcctggggtacaaaaagcaatgcagattagaaataggcaatgttgtgattacagattagaaagatggcaatgttttcagcaatatagtgcaagtgttttgaagtttagtaaaatctcattctagaaagtcatcgaatgactacgaaaaattttacttaagaaatatgagctattgaaacaatggccttattattttatgaaccttgagaagcaatatatcaagataatagggcacaatgtttaagagccagactgtgacactgggctgcctgggtttgaatcccagatctgttactactagaaattgattaagctgatcttggtcattttactggctgctatcatctgaatgtttgtgtcctggcaaaattcttatgttgatacttaatcctcaatgcaatagtaataaaaggtacccaccttttattacatgaccttttaggggtcatgagtgtggaactcttatgaaaaggattagtctccttgtaaaagaggcttgagggagcttgtttgctccttccatcatgtgaagacacatagaggacaccatctatgagaaacaggccctcatcagacactgaatctactggtgccttgatcttaaacttcccagcctcttgaactatgagtgataaatttatgttgtttataaatttctcagtctaaggtattctttatagcagccccaatggactaagacacttacctttactagtgcctcaatttccttattcatgtgaaaggggatagtgccaattcagaaacttgctgaaggtaataaataactctgtaagcatgaggcacttagaactgtgtctgactcattgcaacccatatgtaaatgctaggtatcataatgagggtcaagttacaaaatttctctggcattgagaggatcagctataattgttttagcccttccaggacaaagataatggttaaacatagtggcactattctacttccttttttgctaattatacaaaacctattctgaaaaccacatttcatcgcctgctcagagtctccagttggtgaccaagagtacatctcttttcaaatagctggattaggtcctcatgctgctgtggtcattgctggtcatctttggtgagttcaataatttgactgagaagtgaggtggcagctgaatgaggtctactgctcccaaaaggttggaggttttattggagcccagggactggtggggatgctcaggtcctgcctgcagcttgggcttcaaaggcagatgcaaagaagtaggctgaggacagtgaatttgcagcacatccattaagcattaagcacaatgcttaatgttcaaggtggaccacttttccatttgctggtcatgaattgctattttgatatcttagatctcattgagtaatataatgttctcatagtaaaatgttcataatattagcatttagcaatgcccttctcctccatgaacaccgattattcaattgttatctataagatttgggttcagcagatgcattgagaccctttgctaatattcctctgtttaatcgtggacaatgagggagatgacagctgctgctagaaaataagattcctgggtgagtgcagtggctcatacctgtaatcctagcactttgggagtccaaggctggtggatcacttgaggtcagagttcgagaccaccccggccaacatggtgaaacctcatctctactaaaaatacaaaaattagccaggcgtggtggtgggcacctgtaattccagctactcgggaagctgaggcaggagaattgcttgaacccgggaggtggaggttgtggtgagccaagatcgcaccattgtactccagcctgggtgagagagtaaataagatccctttctctatgctgtgtaggcactaaataaatatttgttattggaatacaaagggctctaacgtgaaatatggccataggaaagagactgatttgttgatttcttggaactctcacaatgtatgtttcctgatgagccctttgtgatcgtgttgtcatgtctatctacca

SEQ ID NO: 4027 - DNA, 6000 bp, Homo sapiens
ccccgtctctactaaaaatacaaaaaaaatagccacacatggtagcagatgcctgtaatgtcagctacttgggaggctgaggcaggagacttgcttgaacccaggaggtggaggtcgcagtgagctgacatcgcaccattgcactccagcctgagtgacagagcaagactctgtttaaaaaaaaaaagtagctatcaataattctatttatcattttactggaggtcataggccagggaaaatgggcaaaaaatataataaaaggtataacaattgaaaaaaatctaatgaaactttcatatttagagatatcattagaaaatccaaaaggatctatagataaaatattaaatgtaataagttaatttaacatggatactggtagcaaggtcaaaatatttttttatttataatatacagtagacccctccttaattcatggttttgttttccacagttttagttacccatggtcaatggcagtctgaaaatattaaatgggcaattccagaaataaataatctataagttttcaattgtgcaccattctaagtagtatgatgaaatttcaggccagcctacttcatctggacaaggatgcaaatcaccccttaattatcatatctccactgtatatgctacccaacccttagtcacttagtagctggctcagttatcagatcagctgtcctggtctccagtgcttgtgttcaagtaacccttattttacttaataacagccccaaagcacagaagtagtgatgcttgtaattcaaatatgccaaagagaagccattaagtgcttcctttaaatgaaaaggtgttaagtttttgacttaataaggaaagaaacaaaatatgctgatgttgctatgttctacagtaaaaaggaatcttctttccataaaattgtgatggggaaaagggaattgtacaaattttaccatcacacctcaaattgcaaaggttatgatcagagtgtgtggtaagtgcttagttaagatcttaaaaagccatcaaatttgtgggtggaggacatgaacagaaaggggctccaattggcagcaatcaggttcagcactatttgtggttttgggcatccaccagaagtcttggaatgtatcctctgcaattcagaagggactactcatcggctactttgtattctttgacctacatctcctcatttcctcccaccaccacctgcttcctgcccctggtaatcactgttttattctctatttctgtgtactcaactcttttaagattccacatataagtgagattatgcaatcaatatctgagaaaacctgtgtcttgatgagcttatcagaagtgtacatggtctttaggcccataggagagtatgagttagaagcatcaattaaagcttcgatttagaagtgtgcacatgttgattttttaatttgaaacaaatattgggactagggataatctttccctagaagacaggtttcatatgtcaagcaacaatggtactaatgcagagtggaaatacaaaccatgccatagagctggacaagcatagtcacagtgtagtatggaaatgtgtgacattgctatgtggacactgtggacactgccatgtccatttctgtacttttgaaacagaaaggaaatatgaaatactggatatgatatgtgagaaagaatgtaacttgaaaacctggttaatttctagacctttcaaactatctcaattgctccacttttcagggaaaagacagtgtataaagtaaatttttccctcaaatatgacatttgaagaattacaaaattttcattttgtctggcgattttcctaactaaatttaaatttacagtcatcttcttgcaaatgttgccagaaacaaaacggagtcactaaggaaaaaaaaaaaaaactggcagagctagggaagactatgcagagagggttctcacacttgtatacctaataagaacaactaccacgaaagactctgcaaaaaccacaaccttgaaaaggccatcacaaccttacatgaaaaatgcctcaaagacatctgccctgccagcaactgtctgtttaacctctgactggtgtcaccgttgttattgatatttgtaggcaaggataattatttcaaaacaaatatgtaattctcttaattttttttctttaaaaaatttgccttcctttacctccctgagtatgcacatcgtttactattgcatatatattcccattgcaatgctctattctcaaataaatatctttttcttttagagagcctctttttctgtttgttatttaggtagacattctgcacatatttggcaaaaacttacacgctgttgaaactgaaaccaagacctcttcctctatcttccatctctcaggcacaactcaatttctaactcagtctttggcaatactaatattcctttctggtaacataattttgactggattactgttctcatgttttaggcctaacttgtttaaaaatttgatgagtggccgggcgtggtggatcatgcctgtaatcctggcactttgggaggctgaggtgggcagatcacaaggtcaggagatcaagaccatcctggccaacatggtgaaacacagtctctactaaaaatacaaacattagctgggcatagtggcacatgcctacagttccagctacttaggaggctgaggcaggagaatcacttgaacccaagaggcagaggctgcagtgagccgagatcatgccactgcactccagcctgggcaacagagcaagactctgtctcaagaaaaaaaaaagtttgatgagtgtggggctagtgttgtgatagtctcctgtgccctgccaactcttttggattattttttaaaatgaggaacatttcagatttagtttgtagcaattcaactttgggagtcttgcaagaactcacttattttaatggaaaatagcccaggttgtctaccagcttttcctgagctctgttttgggtgttctacccaaaataaaaaacgtataaacacaaaaatagtaatgttcatgtctgtgacagccaatgttaagtctctgctgttgtctatggctgttatccaaaaagtagattcaattctgtcatgtattggagtctgggaatgttgttaagagatacatacattgaaatttggagagctgctctgtatttatcaattaggcagtaataatcttggatgaaggctagtcttattaatgttgtgaaccagtcttattaatgttgtgaaccagtagtgtccccaggaatagagaacactacactactcactttgcattttcttatccacataatagaattagttagtgataaccctctttactcggaatcgattgctgccacatttctgcatgatacatagatctctgcaaatatgtgatttttttcctaaatggagaaaatccaaaaattcttcttaaaatttttcatgggcatacaagaagataggaggtgacatcttaaaacaagtatctctgaactttttgtataaaaaaaagcaacctctttgctctattattaataccacatgtggtgatatgaatgcccaaatgtagacagcagttatgagatattacaagagaagaaaaaagctctgccgcttatggcaacttacccaaaaagttatctttgacttaggctggaggtgcacatagcatagctcctagagttctgtttatgtcatgaatatttgttactcaaaactccataggccaagagctcctgaagagaaggtcacatgctagcagcaattgtcattttttccctcaaatattgctatagtataattttgtttgaattataaacttcagtctttattatatttgattctggcattttggtttgtagtgctatagtacaggaaatgttttaaatgctttgcctttatgtaagtgaatatcggtacacacacatacacatacacacacagacacagacacacacacacacacactcacagccagtttagaatgtggggtaaggaacaccagacaaagagggcaatataagaaagagaagacattgaaaacattgggaagaggcagtaacagagtgccagagaagataaggcagctgggagggggagaaactaagtgaggtggataaactaaaagcatccttctgggttaaagcagactaaaagcttagcaattgcttaatatcaccatcttatcctatagatgtgggaataaaggctaaggaaggagaaatgaaaatgcagaatcatatgggggcttttccaaggaggtatgaaggaaggtgaggacagggagagcggctggaagtcagggggtaagagaaactctaaaaatcagggcttgagggaaataaaaggtgaggtaagaggctcagggctgtgggaggcacatttttctctgaaaagcagtttggatgaggaagagatttggcagttggaagagagaagaagtcactacagggtactgaggaaaagctttgctgaaattggagatcaaataccagctctgccagtaagaagttgcatctcccagtgaaatgctgctgctgccatttcaactgttagctgttctctttcctggtggtaacagtgaacatggtaagagtcactctggcagctcccagcactggtgcaggggtttggattttaaaaagcaagcagggctttcctaggtgcaattggacactaagggtctgggtctttctgtctcccgccctcttcaaccattctggtggttgggactagaacctgaagccttaaggcagtcaaatgtgtcagacttcctgtgttctttagactctaggttcttgttttctaaatcattttcattcccattcttcctaattgtctcctgcttctctctttatcttcaccatcttgcttttccactcttcacagccttccaggggccgacctcctttcatgttatccagacctcgtcctttaccaatagtacctgggcacaaactcaaggctcaggctggttggatgatttgcagattcatggctgggatagcgactcaggcactgccatattcctgaagccttggtctaaaggtaactttagtgataaggaggttgctgagttagaggagatattccgagtctacatctttggattcgctcgagaagtacaagactttgccggtgatttccagatgaaatgtgagtctagtccaccgaactgggaagagtctcaaggactctcttttctctcttttttgcaaagtgttgctctctctgatgcttctcccttcctttctattttacccaaatgcacgcacatgcttttcttgagtagtctctcactccagcttcacaccatcacacctcatatttcagattcttgctgcctctgcactcttctcttactctcagactgtcttccactttgtaaccagctgctggtttgtcttatgtgaaacttctcctcaagggcccttacttctcctaccctgtgcctgagtgatctaacgtgtggctttctcccctaatccatcttttcaatcatctcctccccgcaccctcctcttgctgggaacctccactcactctggaatgctgcactcctgactgcaccacgctctgcctcacctctcctttcatactcactgtactcctttatcacatacctttgtcttcatggcatgcacatttttctcaatgctcttgtttctgaaaatgtctaaatgttatcattagtttttagctcatcatcattttacaccaaataactttatccccaccaaaatctaaaatcctaggttcttttctcatgcctttttttcttatttgtgtttaataacttgctctcttttccctctacatagacccctttgagatccagggcatagcaggctgtgagctacattctggaggtgccatagtaagcttcctgaggggagctctaggaggattggatttcctgagtgtcaagaatgcttcatgtgtgccttccccagaaggtggcagcagggcacagaaattctgtgcactaatca

SEQ ID NO: 4028 - DNA, 6000 bp, Homo sapiens
ggggaggggcgctgggaatccttgctctgacctgcctttctgtcccacgcagggcttcctaccacgccagctgcacccgggcttcccccaacagagataccgcctcccctgtcccctccgcggggtctggtggcagtgaggacaccccggggggtactcctgcattgggatcccccagagctggtccctaagagactggatggctacgtcttggaaggccggcaaggctcccagggctgggaggtgctggacccggctgtggcaggcacagaaacagagctgctggtgccaggcctcatcaaggtatgtgcgaaaggcgatacagagagaggcctcctaggggctctcctgcgtccttctccattccccaaactctatcttctcatcttgatttgagctcttcacctctgcgtcctacctcacccttccgtcccacgtgcacggtctttccgcgccccgctgggttgggcggtgctgggccctgacctccctcctggtaccccatccccatcgcaggatgttctctacgagttccgcctcgtggccttcgcgggcagcttcgtcagcgaccccagcaacacggccaacgtctccacttccggtgagcacctggcgtgagggaggagccccagggctgctccgagtccactgaccctccctcgtggacccctgcctaggtctggaggtctacccttcgcgcacgcagctgccgggcctcctgcctcagcccgtgctggccggcgtggtgggcggagtctgctttctgggagtggccgtccttgtgagcatcctggccggctgcctcctgaaccggcgcagggctgcccgccgccgccgcaagcgcctccgccaaggtaagtccctccaccctcagccctgctactgcgcacttgggcctagcctccttaagcccctcctacctgggggaaaagccctcgctcctgtgtgatccaggtgcattctcttagtcctgcatctggtcctgcctacgcttttcccagccggatggggttgggcgcctggtgttgggtgagagagtctccgcctagagggccttgatttttgcctgtgtcacctactattctcatgcccttccagatccacctcttatcttctctccgaccgggaagtcagctgcaccgtaagtgcctccacctccttggctttcttctgcctttccattgtacgtgccagtatcttctgcttccttttttgcatctttaccagggggatgttgggtgttggggaggaacaaaagtgggagagggtaagaaggggtgtgcagtggccccagcctgaggccgttccagtatggcctgtgccttccctccacccctccaccttgttggtcctttcctcgcttgttcttcctagctctgctctgttgttcaccaaacctctcaaggcctgacgctggctcctgggagggggacctgcccctaccacagaccctgatctcctgtccttccccagctctgctctgggctcaggcagtcctgacagcgtggcgaagctgaagctccagggatccccagtccccagcctgcgccagagtctgctctggggggatcctgccggaactcccagcccccacccggatcctccatctagccggggacccttacctctggagcccatttgccggggcccagacgggcgctttgtgatggggcccactgtggcggccccccaggaaaggtcaggccgggagcaggcagaacctcggactccagcccagcgtctggcccggtcctttgactgtagcagcagcagccccagtggggcaccccagcccctctgcattgaagacatcagccctgtggcaccccctccagcagccccacccagtcccttgccaggtcctggacccctgctccagtacctgagcctgcccttcttccgagagatgaatgtggatggggactggcccccgcttgaggagcccagccctgctgcacccccagattacatggatacccggcgctgtcccacctcatctttccttcgttctccagaaacccctcctgtatcccccagggaatcacttcctggggctgtggtaggggctggggccactgcagagcccccttacacagccctggctgactggacactgagggagcggctgctgccaggccttctccctgctgcccctcgaggcagcctcaccagccagagcagtgggcgaggcagcgcttcgttcctgcggcccccctccacagccccctctgcaggaggcagctacctcagccctgctccaggagacaccagcagctgggccagtggccctgagagatggccccgaagggagcatgtggtgacagtcagcaagaggtgagagcagtccctgcccatccctgcctccgcctcagtcccaccccagacctctcacccctctcccaataccctgcaccttctctgctccactcccaccctgggaacgggaaaacttgtcccttttagaagcttttgctgaggtccagggatttttcaggggaaacccatgacctaacgtgagtttgcggtcgctgaattcagacttttctgaacagcctctattcctccacccacaccatatgtttgtctttttttttttttttacaggaggaacacatctgtggacgagaactatgagtgggactcagaattccctggggacatggaattgctggagactttgcacctgggcttggccagctcccggctcagacctgaagctgagccagagctaggtgtgtgagccccccggaaaggcaggcatctcggccatactgtcccacatccccccgccaccttaggacccatctattcccagtcaggccctgcctcccaggctcctctgctctagactgtgccttgcccccttgggccatctgtactggaagggcctagcgagcttcacatctgagctcttcactcagtgaacctcagggcttcttctcattgtcctgcccgcctcttgcaggtgtgaagactccagaggagggctgcctcctgaacactgcccatgttactggccctgaggcccgctgtgctgcccttcgggaggaattcctggccttccgccgccgccgagatgctactagggctcggctaccagcctatcgacagccagtcccccaccccgaacaggccactctgctgtgaacatccctgatgtgaggctgtgaaaaggcatatggacctgcaaaggaggcccccaaccagacagacctagtttcaaacgagggcactgcccctgcctgcccctttggtgcccaggcacagaccctgatagtgggtttgggtcaccttggtatggaatgtatgtgctgaccccctaggtgagtctggggattggaacagggatcttaggtctgcctctctctctctctctctctctctctctctctctgtgtgtgtgtgtgtgtgtgtgaagttttttacaggtgaataaacaaagtttgaaagatgtttctgtgtgttatctgtctttgagagagtgccaggaaaatccctggacccttaaagaagaggagaatcttcttgaataaatggaggtgcattcagcattcattcaagaacatttattgagtgcttacggaggccagctactaaaggccagccactgaagtagatactgagaaaatacaaagctctggaagcacgcctttgcccttgaggagttctttctagtcagtgaggcggacaaagaaatagttaccgtatgataagttccgtgataaagctatgtgttggttattgtagcacaaaggaagatgttgcattcaaggccacctttagtgaacgctaatatcgtgtgctgggacaaatgccacatattgggggggagtcctcaggaccctcacagatagatggtggtaataatagtattcactatgtgccaggcactgctctaagccctataggtggactgtttagttctctacaattctatgaattaggtagtactattagctctgttctatagaccagggaactcaagcatagaatgcacaacagtcacacagcaggtaaagggtagagcaggtggggagccagtcaaggaagggaaactgtcctaggcagaggaatagcctttgtaaaggcacagaagagtgagaatgcttgacaatcagtgggactggaatatagggctgtgtaggactcggggagggaacagagaataatagaaaggttggacaggactggatattgacatcctggaatctcaggttcaagggaggactctatcatgtgtgcagaactccaccccgggggactctattcaactgaagcctgaaaggatggggggctctttctccacccctgaactgtgctgtcctccaccctcagagacaaaagaaccccagccagcctcctcgcgctgaggtctccccctctgatccctccaggatttaggaagagataccaggtcatagaaaaggagatgaaaggcagggagaagacaggtctgagccctgggtcccaacaccgaaaacacccctagggccctgggcagagtgacctcactgttagtccctgcccaggcttgaagtaagaggtgagcaagatcacgtgggggtgctgtcccggcctgcaagtcccagtcctgtcacacactagtcagttggggtcgggggaaggccttcctgtgcctccttttaccttgccagcctctaaactaggaggcttcttcctacataaacacgcccacagtgtttagctaactttctaggcagaaagtttcctactggggcacaagtctacgggctctcggtggaggctgaggtactcacgggtggagaccactgcagccgcctttgtagattcagactccccgaacctttaacccttgctctggtctactgtccctctgtctcaagcagtcctccctccttctgcgctgcggcgcctttaaaccttcttggcccttgccccgccccgggtccgccccgtctgaggcgggaccctcctgaaaatccccggctgggcagggcgcaccacttgcagctgcagcccttgccttgagtcagtgcgccgctctccagcccgcttgaacggtgagcaggtcgggggtacgggggtcggggacatgtgcgtgctgtgtagaaagcaagaagccagcgctttgaacttgctccagcgagctcggggatcaagggctggtaccaggcaagggtccggtgactactttaccccgccccgtgctgtcaggtcctgtccccaagccctgacccgacattgttggacgatgaggtcaggcgaggttagcccatgcatagacagggcgtccgtctggagcagggactcagggactgagccccacccgcgggctccatcgctgagtcctcactggggcgaggggaaaaaagggcgtcggactttagctggctggccccgagtgaccccgggtcgtggcgccggccctgggccagctcgtgctcctgggctttcccgcgcgacccttcacttcctggttccaggagcacgtgtgagcactgcgtgccctctgagtccccgaggccgcccttttcattcctgttcctgctagcttgctattctggggacttgaggtcacgggctggggctagggggctctgcatgggtcgcacggtgaccttctgtgaagctccagtcatctctatgacggtcccctgacctcgggggtctgggtgctgcagccctgactgcgccccggggtgccctgtgtgaggttgtgggggtggtggtggctgcttttaccctgcccgagcgccgctgcccccaccgggtgccccctgctgctgggaaagccggtggtggccgcgggcggacgggcgggctgcccagaccactgcgtcaccccagcggcgggagggcggtgggtgactcatctgttgtaacggcccagggtgtggtcgtgggggtggggggcggcggctgggaggccggacctgcaggaccggaggtggactgccgcctccccccgcgccctgtgcctcctggggctacctgaagccggtgtcctgggagatctgt

SEQ ID NO: 4029 - DNA, 6000 bp, Homo sapiens
ttttaacacctccccaacctctccatcctcctggagtgaggaaacctgagttgggggaggagagttgaggggaaggaggagaacagattcagagaggcaagctgagcatagtagagagcagagactgctccctccccgactaccagcctctagcctggaagacctaagccagggtaagggagattatttgataataaggtaagtttggaattttgaatattacatggcacaggaagtactcatttctaaaccgagaccagtactcatttctggactgagaccgaggccagagttcacatctgaggcagagaagactaccccactgaataagattaaaagggcagtgagagaaaaaaattgaagttctatttgaatcacaatccattagcaagaatgaaaattacacttggctaggcactgtggctcacacttgtaatcccagcactttgggtagctgaggcaggaggatcccctgagtccaggagtttaagaccagcttgggcaacatagccacatcccatctctataaaaaaaaattaaaaaacttagctgggcatggtggtgctcacctgtagtcccagctagttgggaggctgagatgggaagatcacttgagcccaggaggttgaggctgcagtgagccatgattgcaccactgcactccagcctgggtgatagagcaagaccctgtctcttaataaaaaaaaaaaaaagtgaagaaacgaaaattagacttgacaatcatgctctcagaagtgactttctccacactggactcggagagctcagtggggtggaaattattttcctctcctcaataggcatcatggactgtttatgcctacttatggagacaggtttaataaatctgaacagttaccttctggctatcagcatactcactgtagcagcctcggctcccccttcaagagtaaacacatttttggctgcaagaagtgcagttaaccgacaggctctagctgcagcaccttcgggatctacgctgttcccggcagccccagcccatggctgtgcacagcaagagtcctggcaccaggacagtcttgcacagctagagtcccagtgcctggacatgcctgcccaccacaggccttctctaacgggcagtcggtgccagagctccctgctaagtcagctgagactgtgagacgcatcaaggtctgaggcccttctggctccacctgcttccttctccatttatcttttccaggcctttccccacattaaaactctttatctctgaactccagcttctgcttctcagataatctaacggtattctcaccctttaagctctgagcattatactcatgaccctgttttcttttctttccttgcttttattttttatttctattttttaattcacaaaaatttatacctatttatggtgtacaacatgttgttttaaaatatgaatatgttgtgaaatggctaaatcgagctaattaacgtaagtgttgtcttatacaactatctttttttgtggtaagaacactgaaaatctactgtcttagcaattttttttttagatggagtctcgctctgtcgccaggctggggtgcagtggcacgatctcggctgactgcaacctccgcctcccaggttcaagcaattctcctgcctcagcctcctgagtagctgggactacaggcgcccgccaccacacctggctaatttttgtatttttagtagaagcaggatttcaccatgttggccaggattgtcttgatctcttgacctcgtgatccacccgcttcggcctcccaaagtgctgggattataggtgtgagccactgtgcctggcctgttttagcaatttttgagaatacaatacattgctattaactgtagtcaccatatggtatgatagatctcttgaacttattcctcctatctgactgacttttgaaatctttccaccaatatttctccaatccccacccctcccacagcttctggtaaccaccactctactctctacttgtagttcaatcttttttttttttttgtcttttttttttttttttgagacagagtctcgctctgtctcccaggctggagtgcagtggcacgatctcggctcactgcaacctccgcctcccggattcacgccattctcctgcctcagcctcccgagtagctgagactacaggcacccgccaccacgcccggctaagcttttttgtgttttttagtagagatggggtttcaccctgtcagccaggatggtcttgatctcctgaccttgtgatccccccgcctcggcctcccaaagtgctgggattacaggtgtgagccaccgtgcctggcctagtttaacctttttatacattccacattaagtgaacttatgtggtatttgtctttctgtgtctggcttatttcactaaacataatgtcctccaggttcatccatgttgttgtaaatggtagcatttccttctttttgttgttgttgttgttttgttttgttttgctttgctccctctcaacttaccacccgctactcagctttcctcactccaggaggatggggaggtgtcaaaactcttcttacctagctgagtggctttgcactcagtgggcctggaggatggctaggatgcactattttctgttaagggcagttttgctggttaagttttgctggttccctctctcttacccctggctgggagtagatgcatctctattctgggtggtctctgctggagtgcagtggcatgatcatagctcactgcaccctcaaactcccgggctcaacaatcctcccacctcagcctcacatatagcaaggattacaggcatgcatcaccatgccctgatcatgtttaaaaattttttttgtagacatggggtctttctatgttgcttaggctggtctaaaattcctggcctcaagggatcttcctgccttggcctcccaaagcgctaggatcataggcatgagctcccttgcccagcctccttctttgtttaaggatggatagtattccattgtgtatatatctacaatttctttacacattcatccattgatagacacttaggttgattccatatgttggctctagtgaatagtgctgcaataagcgtggagtgcagatacctcattaacatactgatttcatttcctttggatgtatacccaacagtgggattgctggatctaattttatttgttaaacagatttattacataaaaacgttttatactcagactgaaatctggttcacctttaagaaaaaattctaatccctcaggttttatactcataaattgaaatttaagaactactcacttcattatcttcttcactaagcagattctaccaatctttgaagaactaaggtctcatcttaaatatctctccttgatagcttttccccaaccctcctgactccaactttgccaaatcgccttattataggctccttcaattattcctttggtaagattcatcaaacttgtagttacttgtccaatgtcaattgttagcattatgagctccatgaagtcacgatctaaaattcttggtcactgttaattccccagcacttaagacagtgtatggaccatagaagctactcaataaacatttaacagatttctgaatttgctaacctaaaactaggaaatgttggcacaagaccaaagctgaatacgtcttcctctattgttcccttggtcttgagacaccactcttcacagcacagactcataaaattgattattagaagaaacttaaagattatccagtctgagaatccatctgatggcagagatgttgcagataatccaagcaagtgattgtcctcttagcttgaatactagggacagaagctactttctaaggcagcccattgcatccagaacagctttgactgccaggaagctatttaataaccctgatcctctgcagtctcttcttgaatctgaattcatataagttgatcaacattgtattctcacaaaacgatttaaagtcttttcataatatgaacaacatagatcaactctctgatcaaactacttttttttttcttctctcttttttttttttttgctttgagacagagtcttgctctgtcacccaggctggagtgcagtggcacaatcttggctctctgcaacctccacctcctgggttcaagtgattctcttgcctcagcctcctgagtagctggcatacaggggcacgccaccatgcccagctaatttttgtatttttagtagagacggggtttcaccatgttggccaggctggtctcaaactcctgacctcaggtgatctgcctgcctcggcctcccaaagtgctgggattccagatgtgagccattgcacccggccaaactgctttcttaaagaggattgaatcaaatgtttttcccctgcgaatagcctctcaggtgggaacataactagctttaaataaaaaggcttaatcattcatccattataaagctatcaattgagtgcagacacatgtctagtatggggccagcaataatgggacatacacaggaaatgaaagatgaagtctgtctggggagatatagatgtttataagatcaaatgatcacagcaacataggaattacccagagagagctagggaagaatatcctgggagccaaataacaggatagggaatgttctacgagttcggggcatgcagtacgtgcggggacctggggcgggtaggaagtcttgaaagacttcatttaggaagtgggatttgggctgagtttggtggatggcatcatgagtcagtgagtaaactgtcatgacaatcaggatctgaaagagaactaagagagccatgatacatagggaggggcttagtgaggacagaggacgtcagagggctgtagtcaggggaaaattatttcccttttctcaggaccatcagtcaggctctttgtgtctaggagcctcctaatgcagtcttctgcacagtcctggggactgactgactgaatcacacctctggggctgggggctgctgacatgtgtgcctttccttggctgcttcttctcctgctgctccaggagggtgagtgaagctgccagctcgtgcacaggaatgtcccctacacctctgttcccctgccccactgggtctgggccagtaagaccctttcttaggggttgaatgtgtcagctcttctggagttacaaggagtagggtgtgtggcttcagggcaggaccgagagacacctggggatatggaagaaagagcaatcccaagatggcaaaggagaaggtaaaacttggagggtgaagggacagatggaagcaaactccttttaggtgcttaactcagggaaaggggaaatctagagtcagaagcagcagctggagaacaggatttagtgtgagagtcatagaagctgcccagctgagattacgctactctggcagctccactgccaggttcagcagcccagagacagcagctgggttgtttgcttctcttttcttcctgcataggcagccaaaggagactctggagatggtgtggatccgaggaagtggttgcggtccttcaggagtccatcagcctccccctggaaataccaccagatgaagaggttgagaacatcatctggtcctctcacaaaagtcttgccactgtggtgccagggaaagagggacatccagctaccatcatggtgaccaatccacactaccagggccaagtgagcttcctggaccccagctattccctgcatatcagcaatctgagctgggaggattcagggctttaccaagctcaagtcaacctgagaacatcccagatctctaccatgcagcagtacaatatatgtgtctaccgtgagtttaggctgggaaccataaagctggttttgggggctcttctgagcttctcacaccatggagtgggcgtctcaggacttggggttatggtttgaggggctagaactggaggcagactgtctccaatctagat

SEQ ID NO: 4030 - DNA, 6000 bp, Homo sapiens
tatatgagctttctgtgcttctgtctcccagctgtaaaatagagatactcgtagtattcacctcatggggttgttgtgaaagctgaatgaatgaatgtgcacagagtgtgtgcaacggtgcccagcatgaagtaggtgctctgtaggtattagtaattgttcccttctcaccccactcagagctgggtggagacaaactcgtaaatgactggcagtcacctggtgctacccacctcctgccccctgaggctcatctacaacactcagcccacaaacctctgtctaaccaaaccactgccatctcctgcccttggctgacccccaccccaccctaggctgctcagggtagagaagaagtaatatcacacagtgggggttgcttcagtcccacgctaccctccagacatatatctgagctgtcagttccctcttagcagactgggaatggagaagtgggatgggtgagcatctggggcggagcccaggctcccagcacccacccgatgggactggggaacaaagaacttgtcaggaggtcagaagggagaccgaggggattccagctctgaggaatccatgtgtggcatttgagcgtgggtggcagctggcacgaatccttggttcagaactggcagggccccctcaggagtcagggccaggtcgtgccaaagccccagtggcatcgcggctctgctattcctgaacagctgtgctgctccccttggcatagggttcaagaatgggggcaggagtgtgggcctagccagggaaagaggagggttcagagagtagacacacacacacacacacacacacacacacacacacacacacacagttcaccatgaaggtgcagatgcctggctcagggagaaaagaggggagggagagggtggaaagcgaatgtgtgtgtgtgtgtcgggggggagatggctttgtggttctgtgagtgtgtttggtgtttgggtgtgcataatgtctctgtgtttatctttgtgtgtgcacttctgtttcagtgtgtctctgaatgagtttgttatcagggcgagggtaggtttctgcactacttctgtctctgactctgcttgagcctctcagcaactcagcagagagaatcttcccttctgggagggtgggaaaatatagctcatcagggcagtatgggccaatgctttataaacacacacaaatcacaggacattcttgtgtgtgatccttagctccccacaaagctacggttgatacacatttaaaagagagagagctgagtcctatgtgtatgcttgtgccatttctatatgtctgacagtctgacgagcatgtgtgcttatgtatttgatgtatttgtcactttgtccccacggcagtatctgtgtctacagcttggtgtatactcatgtgtgctaagcccatatttaactgtgtccctagtgacgtttgtctttaagcagcaacataacaggagttagaagcacaggctccacagtgaggcgatccatttcgaatccctgtgtggacagtaactaatgcattaaccttggacaagtttcttaacttttctatgcctcagttttctcacagggataataatagcacatgaggataaatgagatcacatttagtgcctgacacaggtcagcatatgtgaatggtcctgtctttgaacgtgctcctctctgagagctgtctgcttggttgtgactgtggtgtgtcacatctcagctggattataaactgcttttgggcagagcgtgggtctcaattatctttaacaatactcatgacacctcagtgtcaccttggtgtcttgtgtatatgtcatcttgaggtgaaatgagacctgtttcatgtgaaacaggacgggtgtcggatgcaggcccatgcctggggtagtacatggagggcaggtgggaagctggtgatggcagtgacaacacagcccagccgggcatcagggtccctcatggtcactactgcatacctgccaggtctctctgcaaacccaggctccctcctccttcgtgtctcagtctggcctggaaactcactgaagggcttccttcctcctttctctgctcaccccaccctcgggcaccagcctaggtgtgtgtttttaatggatgagatgagtgccctccaatctacaccatgcatcgctgttttgcagcttgtgtgtgtttgcccatggctctgtgggggtgtgtttctgggagccgtctttctgtctgatccccgctccattacagtggggacatgtgtctgtgtgtgtgacgtgcctcgtgcctggggtttgttctcctcccccagctttcccagttacataagcagctgaggggtccgtcaggcctgggctgtgggctccctctgctggccgcctctggaacccgcagtctgggttccagaggggcctgggttccagaggggcctgctgaagacactgttctctccttgggccttatcccctctggagggagacaccaacccagttctcaacgccaacctgcccccagctccttcccagccccaggccacagggtaagagaggatacctcacctccctgaagacccctctcatcatactcatactgggggttggttatgacttgtttatgaaatgtatccctaacatatagaactatgttccctgagggcaggggagcaggcccaccttgtttaccatggcatctccagtgcccagtacaaggcctggcccaatcaatatttgttgaatgactgagtttacagggtggagaggcttgggaggagggacagtgaggtgtaggaagatttggggctttggggacagacagacaagcctgggctgaagtcacccctaagccacttaaaaactgtgtggccttgggcaaggtacttaacctgcctaacctcaagtttctcttctgttaaatgacaccaccttgcaaaatatgctataaggactaggactaatatccaaaagggccttcttgtgtaagcatttcataaatgacatctatcattattacaattggtaacatctttcatccctcaagcatcatgaaggcattaaatccactcgataattaaatccattataaagggagagacgtattcttccaaaagcttcccctatgagtttcagttttcacatagctcgatatgcctgtggatggatttagatgatgaggttctggagcaaccttctggatatttcaaagtgggaataaacaggcaccttattgccctgttcatgggccagtgctggcagtcctgggaagtgagggctggacctctgatctcccttcaaggcctcagtttctctggtttctccagggttcctcaatgtggcttctactggcaaccccgtgagcatcttctcagagtcaggcactgtgccacgcttgaggaataccatgtcaaggaaggtctggtctggcctgtgccacttaccctctctgggcctcagtttcctcttctgtaaaggggggtgagtgagtgggagggaagggggatgagaggggagagggaggatgttggagggtagagggtggtaaatgggctctggggtcacctcccactgacagccactctgacagccttggctttgcaaacctggccatctcttctccccattctggtctcatccttcctgcccctgcccacttcccatctttacagttcaggaagagacagagcacctgggaagggtgcctcctccattctcccacctccagggcaagccccactcttcctagaacagagcaatgttcatctcttcccactgtcactgaacatagagactccttcacctaaatgccaggtctaaactaagcctcttaggaagcagttcaaataataattcaaaacctaaaacaaaataatccttatctcccattttgtgttagtttcctgtgccaaacactttatgtacattacctatcatcacaataaccctttgggtgatgtgatcaacctcaattcaatttgcagaggagaaaactgaagttgaaggaggttaaacaactgggctaggatcacccaacccagaaatgacgtcacatggacggccccctctcctaatccatttttcttttggttttgccctctgagggggtgaaaaacaggtctccagtgaccttctggatcctggaagcgcccttcagctcaaacccttcgcattcaggaactcctggcttccgccaacccctacttcagcagggtttgcagcgaggactatggctcagagcaaataactgaattctaaatgcgtggtcacagtcacctcgccaatcccagggaccctgcacccaactctccaggaaaggctggcaggtgcggggtggaatgcgctctgtgcgagggtgggtgggaatttcgatgcgcagaggtgcagttagctcactcctgcgggggcctcgggcggagccagggccaggggcggggcgaggccggggtccagggcggagccaggattggaggctgacgttagccctgcggggacggggaaggggtgcggcttgggactggggcggggccggggcccggggaggagccaggattggagtccgactgtagtcctggtggggcggggcgggggaggggccggaactggggctgggccgaggcccggggcggatccagggctggagtcttggcggggcggggcggggaggggcggggccggggcggggctgggactcgatgcgactcaaaggtgagtttcgaggggcggggcggggccggggccaggtgcggagcaaaggccggagtctggcgggggtggggcaggcagggccaaggctgggtccggggcggggcgggcctagacggggcggtggaaggggcggtgccggggcgggccggggcgagaatggtttcagaactgccgagggctggagggaaagcagcgggaggggcggagggaggggattcggcagctccagttcagctcgctcggcgcacccacgcctcgctgccccgcttcctgccctcaacctgggcatgcgccccccacccttccggccccccagaacccgcgccatcccccggagcctccccagagctggccgcgcaggatgggcgccctcaggcccacgctgctgccgccttcgctgccgctgctgctgctgctaatgctaggtaagccaggcccccgttccggttcccggccctgccgggcaggtgcctgccatccagcacccccctagcatttcggggctcctcacatcctcctccgtcaggggtacctccagcctccccggggtcggcgtccagctgcgctttgtggctgtccgccgagccagtcttgggaagagtgcaggctccccagctctaagccagggactggggcgtagagaggacccactaaggtgctgccccaggcactgctcggcctcccggggcaggccacacatctcagctagcatacccacgtactggggtcgctgcaccaaatgctgcgactcctttctgccccacactcagctccaggcctggccttgggtgcccgccctacgagggcagtgcctgcccagcttcataattgccccagagttggctggaggcccagaggccagttctgcccacgatctttgaagtaagtctctcccagttgcgctccacgcacttcatcaactgggggcagttccctctctcacccccatctccaccctgggttgggtccctctttgcccttcttcctgtctcccaaatggcacttggctctgcagccacccatcagttttcacaccgcttagttccagcttccttgcctcaggagaaaccaggttccatggagactgatcctgggatctccaagcaccttgtgcctgctgtggtgggtgttcatggtggggtgttctgggccaatcttgcatggatgcatggggataatgacagtggaattgtttttggcctgaactggagggctccctgtaggaggtggtctggggaagagtatggcatggagacagtgaaactgccagtacagatgttgatgaggctgaagcccttgaaatgaga

SEQ ID NO: 4031 - DNA, 6000 bp, Homo sapiens
ccaaactaagcttcataagtgaaggagaaataaaattctttacagataagcaaatgctgagagattttgtcaccaccaggcctgtcttacaagagttcctgtaggaaccactaaacatggaaaagaacaaccggtaccacccactgcaaaaacataccaaattgtaaagaccatcgacactatgaagaaactgcatcaactaacgggcaaaataaccagctagcatcataatgacaggatcaaattcacacataacaatattaaccttaaatgtaaatgagctaaatgccccaatcagaagacacaggctagcaaattggataaagagtcaagacccatcagtgtgctgtatccaggagacccatctcatgggcaaagacacacataggctcagaataaagggctggagcaatatttaccaagcaaatgaaaagaaaaaaaaagcagggattgcaatcctagtctctgataaaacagactttaaaacaacaaagataaaaaaggacaaagaaaagcatcacataatggtaaagggatcaatgcaacaaaaagagctaactatcctaaatagatatgtgcccaatacaaaggacccagatttataaagcaagttcttagagacctacaaagagacttagactcccacacaataataatgggagactttaacaccccactgtcaatattagacagatcaatgagacagaaaattaacaaggatatccaggacttgaactcagctctggaacaagaggacctaatagacatctacagaactctccaccccaaattgacagaagacacattcttctcagcaccacatcacatttattctaaaactgaccacataattagaagtaaaacactcctcagcaaatgcaaaagaatggaaatcataacaaactgtctctcagaccgcagtacaatcaaattagaactcaggattaagaaactcactcaaaaccacaaaactacatggaaactgaacaatctgccctgaatgactactgggtaaataaaaaaattaaggcagatataaataagttctttaaggccaatgagaacaaagacacaatgtaccagaatctctgggacacagccaaagcagtatgtagtgggaaacatagcactaaatgctcacaagggaaagcaagagaaatctaaaattcacatctgacatcacacttaaaagaactagagaagcaagagcaaacaaattcaaaagctaacagaagacaagaaataattaaaatcagagcagaactgaaggagatagagacactaaatacccttcaaaaatcaatgaatccaagagctgttttttgcaaagatcaacaaaatagatagctagtcagactaatgaagaaaagagaagaatcaaatagacacaataaaaaatgataaaggggacattgccactgatcccacagaaatacaatctaccgtcagagaatactacaaacacctctacacaaatactagaaaatctagaagaaatggataaattcctggacacatacaccctcccaagattaaaccagaaggaaatcaaatccctaaatagaccaataaaaagttctgaatttgaggcagtaattaataacctaccaaccaaaaaaagcccaggactagatggattcacagccgaattctaccagagatacaaagaggagctggtgccattccttctgaaactattccaaacaataaaaaaagagggactcctccctaactcattttatgaggccagcatcatcctgataccaaaacctggcagagacacaacaaaaaaagaaaattttaggccaatatccctgatgaacattgatgtaaaaatcctcaataaaatacaggcaaactgaatccagcagcatatcaaaaagcttatccaccagccgggcatggtggctcgtgcctgtaatcccagcactttgggaggctgaggtgggtggatcatgaggtcaggagatcgagaccatcctggctaacacagtgaaactctgtctgtactaaaaatacagaaaaattagctgggcgtggtagtgggcacctgcagtcccagctactcaggaggctgaggcaggagaatggcatgaacccaggaggcggaacttgcagtgagccaagattgttccactgcactctggcctgggcgacagagcaagactccacctcaaaaaaaaaaaaaaaaaaagcttatccaccacaatcaagttggcttcatccctggtatgcaaggttggttcaacatatgcaaatcaataaatgtaattcatcacataaacagaaccaatgacaaaaaccacatgattatctcaatagatgtagaaaaggcctttgataaaattcaacatcccttcatgttaaaaactcttaataaactaggtactgatggaacgtatctcaaaataatgagagctatttatgacaaacccacagccattatcatactgaatgggcaaaatctggaagcattccctttgaaaactagcacaaggatgccctctctcaccactcctattcaacataatattgaaagttctgaccagggcaatcaggcaagagaaagaagtaaagggtattcagataagaagagaggaaatcaaatagtctctgtttgcagatgacatgattgtatatttagaaaactccattgtcttagcccaaaatctccttaagctgataagcagcttcagcagtctcaggatacaaaatcaatgtgcaaaaatcacaagcattcctatacaccaaaaatagacaaacagagagccaagtcgtgagtgaactgccattcacaattgctacaaagagaatataatacctaggaatacaacttacaagggatgtgaaggacctcttcaaggagaactacaaaccactgctcaaggaaataagaaagtacacaaacaaatggaaaaccattccatgctcatagataggaagaatcaatatcatgaaaatggccatattgcccaaagtaatttataggttcaatgctatttccatcaaactactattgactttcttcacagaattagaaaaaactactttaaatttcatacagaaccaaaaacgagcccatatagccaagacaattgtaagccaaaagaacaaagctggaggcagcacgctaactgacttcaaactatactacaaggctgcagtaaccaaaacagcatggtactggtaccaaaacagatatatagaccaatggagcagaacagaggcctcagaaataacatcacacatctacaaccatctgatctttgacaaacctaacaaaaacaagcaatggggaaaggattccctatttaataaatggtgttgggaaaactggctagcaattatgcagaaaactgaaactggttcccttccttataccttacacaaaaattaactcaagatggattaaagacttaaatgttagacctaaaaccacaaaaaccccagaagaaaacctaggcaataccattcaggacaaaggcatgggcaaagacttcaatactaaaacatcaaaatcaatggcaacaaaagccaaaattgacaaatgggacctaattaaactaaagagcttctgcacagcaaaagaaactatcatcagagtgaacagggaacctacagaatgggagaaaatttttgcagtctatccatttgacaaaaggctaatatccagaatctacaaagaactcaaacaaatttacaagaaaaaaaaaaaaaccccaacaaaaagtgggcaaaggatatgaagacacttctcaaaagaagacatttatgcggccaagaaacatatgaaaaaagctcatcatcactggtcattagagaaatgcaaatcaaaactacaatgagataccatctcatgccagttagaatggcaatcattaaaaaatcaggaaacaacagatgctggagaggatgtagagaaatgggaatgttttcacactgttggtgggagtgtaaactagttcaaccattgtggaatacagtgtggcgattcctcaaggatctagaactagaaataccatttgacccagcaatcccattactggttatatacccaaaggattataaatcatgctgctataaagacacatgcacacttatgtttattgcagcactgttcacaatagcaaagacttggaaccaacccaaatgcccatcaatgatacactggataaagaaaatgtggcatatatataccatggaataccatgcagccataaaaaaggatgagttcatgtcctttgcagggacatggatgaagctggaaaccatcattctcagcaaactaacacaagaacagaaagccaaacaacgcatgttctcactcataggtgggaactgaacaatgagaacacatggacacaggtaggggaacatcatacactggggtatgtcacggggtggggggcaaggggagggatagcattaggagaaatatctaatgtagatgacaagttaataggtgcagcacaccaacatggcatatgtatacatatgtaacaaacctgcacattgtgcacatgtaccctagaacttaaagtataattttaaaaaatcagttttcttttggctttttcttagctttatacttaaatatttttttctaatgtaattagagtggaattgttttttgaattttatttttggattactcatagctagtatatacaattgcaattgaattttatattttgattttgtatcttttcaccttgctgaactcatttatttgttctagtagattttaggaaattccttacagacttttacatataagtttatgaaagatgcaataaaggactttatcttcttttccaaaaaaaaaaaaaatttgtgcacttagctcagaaaaaagtaaacaaaaaattaacacagttacaaattaggatttttagtgcaggggaagaagttgtcaccacgcctctaagaggaaggggaagtctcagaagtattttcagtttatgacagaagggcaaaaacattgactgcctcaaggtctcaagcaccagtcttcaccgcggaaagcatgttgtggctgttccaatcgctcctgtttgtcttctgctttggcccaggtaaatgtcaatccagatcggtgtagtcactgagtgactccctggttttgtgcagcttgctcaacctaaatcgtctgtatacagttgtctggctctctgccaagggattggggcgggaaaggggacgctggcagtgttacctgatatactactacctcctctcaactttggatgcgataagcctgagatggttgtcggtgaacaatttcaattgtgtctgcatgtaagaaagttatttgctggggcagaggaaataagcttttgaagacaagactgtttgtggtttatgaccagcatcttgtgttataaagagtaccaagaccaagaaaatgggccctcataccaatgtatctactatcgtactgtgaacctcagggaggttacttatccttcctgaacctcactatcctcatctaaattattaaaaacctattattcagttgagccaaattttctgggcccaaccaaacacaccaaaaataaccctctcaccttttgctcattgcaaaaaaaaaggtttccatctctcccctcctttagtgcaaattagggctagctagtccagcaatgcattatatatggcagtgagaaaagaatgaactgatccagctggcttcttgtttcctgctgtccattatatggagaagatgaagattcatatcacatttggggaactacaagtggtccacgggagacaaagtgtagcattcaggcagagatagtccaggagaccaatggaaatctagtccagagctagcccagggtagcagataaaagtaggaagcattcactgagcacttattgtatttcaagtattgtgccaggtgctgtacacacgttatgagtctcatgagaattctatgaatttatactattaatatctccattttaaaatgaagaactgaggtgaacttaatttaaataa

SEQ ID NO: 4032 - DNA, 6000 bp, Homo sapiens
cagcacaaggcaaggatgccctctcttaccactcctattcaacatagtattggaagttctggccagggcaatcaggcaagagaaagaaatacagggtattcagataggaagagaggaagtcaaattgtctctgtttgcagatgacatgattgtatatttaggaaacctcattgtctcagcccaaaacctccttaagctgataagcaacttcagcaaagtctcaggatacaaaatcaatgtgcgaaaatgacaagcattcctatacaccaataacagacaacagagagccaaatcatgagtgaactctcattcacaattgctacaaagagaataaaatacctaggaatacaacttacaagggatatgaaggacctcttcaaaaaccactgctcaaggaaataaaagaggacacaaacaaatggaaaaaccttgcatgctcatggataggaagaatcagtatcatgaaaatggccttactgcccaaagtaatttatagattcaatgctctccccatccagctaccactgactttcttcacagaattggaaaaaactattttaaacttcatatggaaccaaaaaaaagcccacatagtcaagaaaatcctgggcaagaagaacaaagctggaggcatcatgctacctgacttcaaactatactacaagtctacagtaaccaaaacagcatggcactggtatcaaaacagatatatagaccaatggaacagaacagaggcctcagaaataacaccacacatttactgccatctgatctttgacaaacctgacacacacaagaaatggggaaaggattccctatttaataaatggtgttgggaaagctggctggccatatgcagaaaactgaaactggaccccttccttacacattatacaaaaatcaactgaagattgatcaaagacttaaacataagacctaggaccataaaaatcctagaagaaaacctagacaataccattcaggacataggcatgggaaaaggcttcatgtctaaaacaccaaaaacaatggcaaaaaaagttaaaattgacaaatgggatctaattaaactaaagagcttctgcacagcgaaagaaactatcatcatcatcagagtgaacaggcaacctacagaatgggagaagatttttgcaatctgtccatctgacaaagggctaatatccagaagctacaaagaactgaaagaaatttacaagaaaaaaggcaacaaccccatcaaaaaatgggcaaaggatatgaacagacacttttcaaaagaagacatttacgcagccaagagatgtatgaaaaaatgcttatcatcactggtcattagagaaatgcaaatgaaaaccacaatgagaccatctcatgccagttagaatggcaatcattaaaatgtcaggaaacaacagatgctggagaggttgtggaaaaataggaacacttttacactgttggtgggagtgtaaattagttcaaccattgtggaagacagtgtggcaattcctaaaggatctagaactagaaataccattcgacccagcaatcccattactgggcatatatccaaaggattataaatcaatctacgataaagacacatgcacacatatttatttatttatttatttgcagcactattcacaatagcaaagacttggacaaatgtccatcaatgatagactggattaagaaaatgtggcacatatacaccatggaatactatgcagacataaaaaaggatgagttcatgtcctttgcggggacatggatgaagctggaaaccatcattctcagcaaactatcacaagatcagaaaaccaaacaactcatgttctcactgataagtgggagttgaacaatgagaacacatggacacagggaggagaacatcacacactggggcctgtgggggatggggggggctagaggaaggatagcattaggagaaatacctaatgtaggtgacgggtggatgggtgcagcaaacaaccatggcacgtgtatacctatgtaacaaaactgcacgttctgcacatgtaatccagaacttaaagtagaataataaaaaaattaagttacataaacgtaaaataaaatacacagtattaaaaaaaatcttgtaataccatttccacataagaaattcatctctccagtaaattacatatcaccataaacaaaaatatacaggaactgagagaaatcaataactctactgttttgtgcaaatgcagttgagtttatgatcacaactgcccttatctataagtctgctaacccttgagccttgaagggaaaagataaacaccagcagccagtgttttaattgtaccacaagaaggcctgaacaacaagaacatttttcctgcattggtttcatcaataccctgtcattgaagtcaggaaataccttgccagtaagggactgcgttttaaagttattttgatattggacagtgcccctggccacccagagccccaggagttcaacagcaaaggcactgaaatggtatacttctccccagacatgtttctaattcagcctctagaacagggggtcataaggacctttaaggctcattatatacgtactctatggaaagaattgtcaatgcctaggaagacaaccccaggagagggccatcatgaaagtctagaaagattacaccattaaagatgctatcattgttgcagaaaaagtggtgaaagccattaagcctgagacaataaactctgcttgaggaaactgtgtccaaatgttgtgcgtgacttcacaggatttatgacagagctaatcaaggaaattatgaaagatattgtggatatggcaaaaaaaaaagttggggtaaaaggtttcaagaaataaatcttggcaaaattcaagagctaatagacaccacaccagaggaattaatggaagatgacttgatggagaagaatgcatctaagccaggatcaaacaatgcggaagaaaacatagaagcagcagtgccagaaaacaagctgacattagacagtctgacagaaggcttctgactattcgggaccgcttttgacttcttttatgatatgggcccatctatggtatgatacaggcactaaaactaaaacaaatggtagaagtaagaaggggtaccatatagaaatatttttagagaaatgaacaagcaaaaaagtcagacaaaaattaaatatacttctgaaaagttacaccgactgtgcctgtctcttccaccttcccttcaacctcctctatctcttcttccccagggacccctgagacagcaagaccaactcctccttatcctcctcctccttagcctacttaacatgaagatgatgaggataaagacctttatgatgatctaattccacttaatgaacagtaaatatattttgtcttcatcatgattttcttaataccattttattttctctagcttactttcctgcaagaatatggtaaacaatgtatatgacacatagaatatgtgttaatcaactgtgttgttggtaaggcttcctgtcaacagtaggctattagtagttgagtttaggggtgtcaaaagttatgcatggattttcgactggttgaggggacagcactccaaacccctgcattgttcaagggtcaactatattcagtattatgtaagtatatatgggaaatgatcagcaggattatttaatgtgtgactctagaggccaggttacctaggaatgagctagctagcatgaggactcgtctcagttaaaaaaaagctcctccaggtctcaggggtagtgtccccagccttctcattactccccaaaacagctgagtcaaacttaaatattcatttctatccccattcccagacaacatctcccatacacacattacacaatcactcttattcttgttaaccaagatgaagaccctctacaagaaatagtcctgttacatctagctcaactccacctaagcctgcctctgcacctgctgtctctcatgcccaggagtcacagtctttgccaagtgacactgctggcttttaactcagttccctaattcactgtgtgatatagggaaaagtcacttcctctccttctgagccagtttctccatctgcaaaatagattcaatagtctaaaaatcccttttgacttcatttttatcaaacactttttgtgtccctaataaggtgtgatcataatcataatgtttcatgatgatatcatggaattatacataattatatgtatgtagttatactatattatatattaatatattatataattatatattattgtatcatatataaatataattatatattattaatataatacttaatattgattatgttaaataatatcacatgttgattatacattataatacataatcatgtacttgtgatcattttatataactataattatgtaattttaattgctatgtttttttaagctcctaccatatgtcaaaacatttttcctctttcatatcccccaccgccattcgcctaataatggtaattcattctttgagcctgtctcaggttggttgtcagtttctttaggaagcctactccaacttttcttagcctgagttagatgcccctattcctctcatagttccctgtatttttcctattgcaatgcttactacattaaattggaactgcttatagagttgttgattactccaaaaaagagtataaatgccatgaaaggagggtgatcaattgttttgttgctctgtatattgccagcacccagaagagggcctggcacatagtaggcacacaataaatatgtgttgaataaataattaatgctaggcactttaaattggaaaaaactagcacagtaatacaaagaccaatgttaactaaatcagttaacatgcacttcctttcttaaatgtcgttataaaaaggaggaagaaaactcaagtgaaactgactctgctagaacagtgccgtgcttttccacagaaggttagaccctgaaagagatggctcagcaccacctatggatcttgctcctttgcctgcaaacctgtgagttctgacccttgctgatcgcctcctagttttccataaagttttaaaaattgcccttaaggaagacattgaactgtctttttgatctgtgtttagcagaacaccctgggtctcagtatctactgtactcaacaggatccaactggctggggagagacttaaaattcaaacctaagtgtttaggttcagctttaaagtttatattactgagttatatttctgagatctggagatctcagtttccaaaggtctgaggcaaatccttctcagaggaatcagcacttggtaaacccacccaaaaagcctggcaaaagaaagatcttctaaaagcttgaatgacttacaagcaatttcttcttggcattcaattgtgatggcgtttgagagagaaaaatgtctttcctaattatagttgattgttctatcaggttagagtgatggatgactcatcgttatcattgttgagcctcatctctataaactccctttattttcaaaacacagagctattactctgcttttatcctcaacaaactctaaaataaatgaggaagagattactatcccattttttacaaatagtctcaaaaaagagttggagaacttgaattaaaaaccctatttttcttacttatggcataacagtaaactaaaagaacgacatgaatattgattgttatttgtacaaagaaaattgtaacattaacatagatctgggagtgctgtgtcattgtacatgttatctccttaaatacaaacaattgctctaacagaaatttactatgtttggaacttctagatctacttctagtatctcttgccagttctgaaaatgcactagcagaattctggcatgagttagaaccctgggaacctagtacgtttggattttctgtaaaggtagaatcaatgcactgtgatctctctggtttctttggcc

SEQ ID NO: 4033 - DNA, 6000 bp, Homo sapiens
taacactgtggaaaccccaggcatccagggagttcaatagcaagatttccttcctccttattctcttgagtattcatggtgatactcaccaggaaaaaggaaagagctctgatcagtgtcaggattcccaagtttggtccagatcctgccttacaaacaccaccagctcctttgcagggctgttaggaggatcaaataaggctgtgaatgtgaaggcttttgaaaatggctttgtaactacaaggcactatcacctgtatatcttctgttgttggtctgttgacatctgctcttaatagctcaaggaagcagctcagtatactaaatgtactaactgcaaatctctggttagtcacattgcccctcaggtcctgtattagtttcctgtggctgctgtaaaaaattatcacaagcctgatgacttaaaacaacagaaattcattctcccaccgttctgtaggcacaaggtctaaaattaacatattggcaagacctgctccttctgaaagctcaaggggagaatctttctctgcctcttccagcgtctggtggtctctggtgttcgttgaattgtggctgcatagctctagtctctgctttgtcttttcacatggccatcttctttgtgtctctgtgtgtcctttttctatttcttagaaagatgcactactctcattggatttggggatcactctgattcacccagtataatctcatctcaattcttaccttaattacatctgaaagatcctgattccaaataagtccacattctgacgttccaggtgaagaagaatttgggggcagagaggactctatatagaatccactctagaacctcagaaccttcatctaaaccatttctgaccctcattcaatgtatgtttttatttagttctagattgcaccaaacaggaaaactcttcatatagtgcctagcattagctcagttatctgtgtagaggggatccaggagatcagagtggagaggcctcatagcgagtctagagaaggtctaattctggaaatgagaggaagggcaaagtaaacaagagaataagtgtctgtctttgagagaggaaggtttgacatgaatagacagcatgcattccaggagccgtgcagcttgaggagagaacaccagtcttgaaatcagacctggatcattggtttcccatttttacaggatgccaatattctcacatcatttagttatttcaactgatattttatgaatacgtagacagtatgccattcactccaccatttggattctcagttattgtaacagtggtgtgttggtaaatggttaagagccagatctctgaaaaataatatatgcatatatgtaaatgagcttgttataaattttgcttatacgaagaatgtgtaacacgcaatttataaaataaaatttattgtattttaataaaatgtacaatcctctttattgtaaattccatatagccacagatctcacaggctgtttgctttcatattggcttaattcatatccacagccaaactgtgtttacaagtgacaaaggaatgtagttccaacatgaatgttggttaatgtcttttttgaagttaaagaaatgtgaaacaacaaaaacatatgttggaacatcacttgctcatcagtgacactagtgactttttgctgaatcagatgatagtttttgaatactggaaaaatgtttcctcaattttttatgctaatcctaatgtaagggccatagtcatggcacatgtttaagtttactctgcatcattatgttttctctattactttcttacatttagacaatcaacaaaacagtaaagttctgatttatattgcttgctgatttccatggcataaactctcaccatggccagtttcaagctcccaacactatgccattgaatgcagagtggggaagagaggtccagaagcaccaatgttccagtatttaatttccactgtagacacataagagatgtcaattacctcaagaacatagatatcagtaatgtcataaaataattaagaaacaatgagctttgagattttattccctctatttaatataatttatttagttgtgaagttttttttaaaggcagggttttgctctgttgcccaggctggagtgcagcggctatttacaggtgtattagtccactctcacactgctataaagatactacccaagactgggtaatttataaaggaaaaaggtttaatcgacttgcagttccacatggctaaggaggccccaggaaacttacaatcatggtggaaggcaaaggagaagcaaggaccttcttcacatcacagtaggagagagaagagcagccaagagcagaaaatactgccttataaaaccatccaatcttgtgagaactcactcactgtcttaagaccggcatggaggggaaactgcccccatgatccaatcacctcccaccttgtccctttctcaacacttggggattatggggattacaattcgagataaaatttgggtggggacacagcggcaaaccacaccaacaggcatgatcatgatagtccgttttcacactgctataaagatactacagcctcaaactcttgggctcaaggggtcctcatgcttcagcctctcaagtacctgggactacaggcatgtaccaccatgcccagcttaactgtaagtttatataatttaatttaattttatatgtttaataatggccatgttcatcaagcacctcacaagattcctgaaaatctattttttatttttattaaaaaaaattgtttgtagacatgaggtctcactctatcgcccagactattttcaaactcttggcctcaaaaattctcccacctaggcctccacaaatggtggggttacaggcgtgccactgtgcccatccagattcctgaaaatttaacaattttatgagttggtacatgctgactcgagcacacaccactgggaatagttgtgaggaggacagttgagtgctggggaaaggaaggaagaaaacagtgaggataaagttcacatatctcaccagcttttattacctgatccccatggggaggcccatcagagagtgcctatgacctgttacaatggactctaaaaacacttccctactctttcaagtctccctgtgagcattggttacacttccagtatcccattcttatagtttaactcatgaaaaagggcgggatcctccttctgccaatactagttccttctcctcaatgaaaagttagacacaaactccaaaataaaggcaactcccagaatacaacacagccccaattaaattaaaatggcttttatccaaaagacaggtaataacaaatgctgacaaggatgtggagaaaaagtacccttgtacactgttgttgggaatataagttagtacaaccactgtggagaatggtttgaaggttcctcaaaaaactaaaaatagagctaccatatgatccacaatctcactggtaggtatacacctaaaagaaaagaaatcagtatattgaagagatatctgtactcccatgtttattacagcactattcacaatagccaaggttggaagcgacctaagcgtctatcaccgatgagtggataaagaaaatgtggtacatatacacaatgaagtactattcagctaaaaaagaattagatcctgtcattcacaatgacatggatggaattgaagatcattatgttacgtgaaataagccaggcacagacagacaaactttgcacgttctcacttgcttgtgagaggtaaaaattaaaacaattgaacttgtgggcatagagagtagaaggatggttaccagaggctgaagggtagtgggggttggggaagaagtggggatggttaatgggtacaaaaaaatagaaagaatgaataagaactagtatttgataatacaacagtgtgactatagtcaataataatttaattgcacatttaaaaataaaaatataattgcactgtttgtaacacaaaggataaatatttgaggtgatggatatcccatttaccctgtgtgattattacatattgcatgcctctatcaacatatctcatataccccatacaaatatatgcataccccatacatatatatatacatacacacacacacacacacacacacacacacacacacacacacacatatatgtatatctactatgtacccacagacgttaaaaattagaggagaaaacacacacacaacaaggagactgagctggaaggatggagctctgggatagatttgtcctacatccctgcctgggagggaatccacacacatgcaagaagacaaactaggagcatgggctactaaattataccacattgcactcatcggggtcacagggtttcttccaagtgacccgcacatgcccttcccatctctgtgtgacagtggcacctgcaccagactgcatgttgaggtgtcatctgaaattatgaaataaaacagaagtaagaggtctattagctcatcaaaatgcagttatctaagttcagctgtgaactgccaaatttgaggagtgatccaatgaaacatcttttctttgcaatccaagaagacttaccggagagaactgctcagagaatctgcaacatccggttcctggagacagctaaggaaagaagctggggcgcatgtttctgcccaaagccgggttttggccgaggtgactacacaccccctttcctggctcccataggctaagtgcctggcttcttgagaagcctgcttcttgagaacaaaaaagtgatttaaagcctcatgggagatgagcaatcctcaagacacaagcagaaaaagtcccagtgatacaggaagcgggttcaggaacctgctggttcctgatacataaatcagacagcctctgctgcatgacacgaagcttgcttctgcctggcatctgtgagcagctgccaggctccggccaggatcccttccttctcctcattggctgatggatcccaaggggctcctctccttgaccttcgtgctgtttctctccctggcttttggggcaagctacggaacaggtgagtgttcatctgcctgatggtttgagtcccatgttagctgccaggaatcagcgtatcttcgtggatggagagaaggtgcagggctgggtattgtgtttggtcactcttccttagggactggctgtcagtttcaactgcctctttcaaagaggaaggaacattataagttcctgggcccttgggtttccaagactcagccccaccaaccccagtttccaaggaaatgaggggctctaagccaaaggctccagtcacttttctgaccagtcttagggtgacaggccctggtagaagtcttgcttgagtggttggttttacatgggcatcttctggcaaagacccagcctagagagactgagctggatggactgagctctgggagaagatttgccctacatccctgccctgggagggaatctgtgcacatgcaggctgacaaaccaggagcatgggtcaacagaaagcattggctagagtgggaagagagagtagaagtgaaaactccaggcttttggctgagaaccagcagtggccacagtgcggtcatactggtgtgtattttcttggaagagaaggtccaagaaagcaagagggaagaagttgggatttctgaaggctagggctggttacagtatgtgggaaatgcaaattgggaaccctcagagagtagctccagcaggaaggccagacaagagctacctttggatctggactctgttcctgtctttctgtctatcttcttcccaaggcaggctattgctttctgtttagaagtatcagggctatgagaaaaggtatttgagaaagaaaaagccaagcaagaagtggactttggactgcctgtgtgagtggggtgagaatctccttctgcttatttgtttagactgtgggaggtagcctggagtagaagaggtggcatta

SEQ ID NO: 4034 - DNA, 6000 bp, Homo sapiens
tttctggggaaaatttattggaatgacttcactttctctcactctccaggcactagcaaagctgtgcctgttgtggcattcaaggccctgcttaacctaccaggggtctgtcttccatcctcagctcaataccatacccctccttgaacatttttgggctactcaaggccctatattctctgagttcctaatttcacattggcatgactctcatagtgtttcctatgtgttctccatttcttgtaggcatattgcagatcccctgatgcccagaaccttgataaccccagagtctgtgtgcatagtagttaggcatgccagctggagcatcagacagacgtagatttgaattttgattctggttctaattagcaaaatgcccttgggcaagccatttgacttgtctgaacctcagttatctcttccgtaaaataagaatagtgtttataaatatcctcatgtgaatgttggaggattattattttgttgttttgttgttgtttttgtttttgaaacctgatccttctgtaaaatgttggaggattaaatgagataatataggcaaaggtcctggcaagtacttgacttagtagatacacagaaaataatagcttctgtcattactatcactttgtcaaagtcaagcagtaggtcaagtgcccaccagattagatactgagaagagtgtgtattttaattcacatcatgaggattgttgacctgtacttcatcttctagggtctttgcagccccacctctgggtatgcccaaacttcagggatttctgcaaccagggctttggtgcaagaacagctgattcacttagggcagggagagggcttttgagcctttattggtcacttctctcagacttgtttttgaatctatgcagaagcctaactagctagtcctgaacctcagaatgggcacccatagtacttcagtgcccgctgttaccatgcaaaaggaggaagattccttggcttaagtttatatttcatcctttgttttaacatcagcctatatcccatggctattaattcacatctaagcagactgttgagaattatagagctgtttacttgtcaatctaaaagaaagaggctgaaacacaaaatatgatttgaagactttacttgagccaaagggaggacagctgcctggaagactcagacccaagtaaaattggttttgagctctgctcagcctttgttacaagcaggtttttaaaggcaaaaaaagtgatacaaagttttttttttggaattctcattggtttgcagaaataacattaattagtgattggttacatattgttaagctgtaaggtgtgggttatatgtccagtgcagcattattagattaatttatggttacttgcagcaatagcaagtagttttaagaggtgaatacatagcccaaaggtggagtagggggaagtaaaatgtgatttctgtctcatttaaatgtctctctgataatttgaaggactcacattcttcagataaaagttctttcctttcttcaacttttcacaacaacattcaaaggaggtattttaacatttatttttatttttacttttagtagagatggggttttgccatgttgcccaggctgctctcaaactcctgagctcaggcaatctgccctcctcggcctcccaaagtgatagcgacaggagacagacaaattcctggacagatagaaaagggtccctggtgaaactagactttcaagacaaagacagtttaaagcctgaaaactgggctgccagttctgggtagagtccacaaccagagtgagaacttccttgataccttttagctaatcgaatggtgctttttccaggcctgcctatggacaaatctgagccgatgaaaaccccagactcagcctcacagagggctacctgttttggggcccctctcacacagtggtctacccactgtctggtcccctctttgctgagagctttccttctgtcactcaataaaattattctctgacctactcactctcctttgtctgcatgctttattcctcttggttgcaggacaagaacccaggacctgctgagctgcaggtggcaggaacaagctgtaacatacccgtatttgctgagctgtgggcactgggaccaagtgagagctgtgacacacccccattcactgaactgcaggcagcaagactaaataagagctgtgacatgcccccatttgctgagctgcaggcagtgggactgaacaagagctgtgaggtgccctcatttgctgagctgcaggtggcaggaacaagctgtaacatacccgtatttgctgagctgtgggcactgggaccaagtgagagctgtgacacacccccattcactgaactgcaggcagcaagactaaataagagctgtgacatgcccccatttgctgagctgcaggcagtgggactgaacaagagctgtgaggtgccctcatttgctgagctgcaggtggcaggaacgagagagagagctgtaacatttcttggggtctcaggccttgggattccccaagcaaagctgtaacaccccttagggctccgcagttgctggcatctccgagtttcttagtgccactgtgttcccttcatttagacactggtgcccaaggtggaagcaggtcacagcactccccgtcctgccactgactgagtgtggatcctatggctcaggagttcaagactggcctgggcaacatggtgagacctcatctctacaaaaaattttaaaaaaatagccatgcatagtggtcactgtactccagactgggtgacagagtgggagcctgtgcccccctccccccaaaaaagagaatgtaacattaatttacagggtctcttttaaaaatctaatacaatgttatcttttcttgctgaaggagcagggtcgtatcctaaggttaaatcaatttataggaaaaatataacacacagttccaaagtgtaacaatttgaccaagaggaatttgattctggtgctgtttcaaattttatttgcagggttctttcttttcacttttatgtttttttcccttttatttttagttgacatataataattatacatatttatgggatacagagtaatattttgatacatgtattcaatgtgtgatgatcaaatcaaagcaattaggatacctatcacctcaaacattgatcatttctttgtgttgggaacattccaaatcctctcttctagctttttgaacatatacattaaattattcttaactgtattcactccatagtgctacaggatgctggaacttattcctcttctctagctgtaactttgtatctattaaccaacttcttcccatcctccacttccctctacccttcccagcctctgataaccacaattttactctctacttctatgagctcattttttaagcttccatatatgattgggaacgtggttttttatctttctgtgcatgacttatttcacttaacataatgtccttcaggtttgaggactgagaagagcagacattttattgttcatctccatgttgagaatcagaaatgtccccaattaaaaagtgattacaaatatgttatatcaggaactgtggcttgcctgtgggtcctgggtgggcaaataactaatttacattcaataggaatgagcttgaaatttcctagacatgatatgatttggctgtgttcccttccaaatctcatcttgaattgtagttcccataatccccacatatcatgggagcaacccagtaggaagtaagttaatcatacgagcagttaccatcatgctgttctcgtgatagtgagttctcactagatctgatggtttcataaggaaggggctttccccattgctgctcagtgcttctctttcctgccaccgtgtgaagaaggacgtattggcttccccttgcaccatgattgtaggtttcctgaggcttcccaagccatgctgaactagaagtcaatttaaccactttcctggccaggcacaggcccatgcctataatcccagcactttgggaggctgaggcaggtggatcacttgaggtcaggagttcaagaccagccgggccaacatggtgaaaccctactaaaaatacaaaaattagctgggcatggtggtgcttgcctgtaatcccagctatgtaggaggctgaggcaggagagttgcttgaacctgtcaggtggaggttgcagtgagctgagattgcactgctgcactccagtctgggctacagagtgagactgcatctcaaaaaaaaaaaaaaccaaaacaaacaaaacaaaacaaaacccctctctttcctttataaattacccagtctggggtatgtctttattagcagtgtgagaacagactaatacagactacaagggtgggaaatccattcttttgggccaagtaatcttactttttttctgatgttcagtggataggctgatgtcaaacttcaaatagtgaattatcataaaggaagaagagcagagggtggtgctgggggtaagatatgcagcacaaaggctacgtgggtctgatttcccagacttcaggctctgaatgacacctacccaggcttgactgggaagctcctatgtcttagcccctgaattaatcagagggattcctgcctgggaacgaaaagcagacattctctatcagggtcccttattcttttctgagtactggcccccctgagagtacagtagaagctatgaatcttccccctacaaaaaagcactcatgtaccttcaaacaaaattgttctcagtttccgtgatgctcttagataaaaaaatttacaagacctccggtttctggtttctggggccccacacaagtgtgctgggtggagagaaaatctcagtggtttttttttttttctctctaaccctgtttggtaagttccgtttttagccccggcctttttctagccaggctctcaactgtctcctgcgttgctgggaagttctggaaggaagcatgtgctccagaggttgggattcgtgtctggctctggaattgctactgctgcctctgtcactcctggtgaccagcattcaaggtactttccaccaactgtgtatctgtgattgtgcactgaaggcatggtcagttgggaaaggggagacgggatgtagttcaaccctagaagccagatctggtgtctggaaagcaggtatttccattccaatagcatggccatggcatggttggggagcctttcttagcactgatgaatggagcttcatctcctttcccacggggatgtgatcaaaacaggaacctggggagcaagagaagtaggctcctcatattttgtcccgtggttggtggtccatgaagttgtggaaaagtgtttgttttttcattttgaataagaagaagctctacactgacagctgctgcattttatgctcagacacactgtactcccttaggcattctttgagacctctgtatatgtgaggtgttgcatcctgagccaaggtaaatgatattgtcattgacccaaagaaaagatagatcaaaattataggaagaaaagcttggaaaggattgctgtctggggtctctgaatgagggtctgagaagaggctggaagtgcttcagcatcaaaggaaccttaacacatctgattgctaagagttaaggtccattcctctgccacagcctgttcggtccccggtgtgtgaccaagggctgagctaactttccttctcctgttagagctgcctcaccctctttcttcatccagtacctctcttcttatgccagctgagaaacagcagtgaaacctttgactttcttgctattcccccaagtaaatactcaagtctttttaatttaaagggctttaatgctcaccactctgagtaaaacagtaaaaatcaacaaacatgtggtagtcacactgtggcataaaatgatgatagtttgtaacttttggggagatgaggtagaatgtgtggaggatc

SEQ ID NO: 4035 - DNA, 6000 bp, Homo sapiens
ggtggggacacagccaaaccatatcataagtttatctgattacaccactaaactttgatcacattcatttctttctaggtgtcaacgtagcacagaaaaattaaaagagaacattggcttgcacaaatgactttatcattataaccccaattttgattttctgtatttgtaattcacaaactagataaaattcacaaactagatggtagggcacttagaagtcattatgtttttttttttttaattgcaaaacacttggtctactaatatgtcaaacataaaaatctcagaatataatttcatactaaatcagattctgatttatacaatgtaataaaagatacaaatgtataagacaaatttatatttaattatctttaaataggaggctaaataggaggctattctatggtgcatttcccttgcaatttgggaaaacttttttgtacctttttcacgtagaaacattttgttccaacacagggaagcagagattgattccatttcccacaccacattgctagtgtcagagagatagcctgcggttctctgcatcgtcagagctgtttctcacactgaatctgggaatggcaaatttcttgttatgttgaattctgagatgagttaagacatggattgcactctttagcctttgctcctgtggatgtgggttctctgcgttatctgatgtcccataaattgttttgagaggctctgtcttccatcttctttatgagactgttgcatctcttacctttaacctgaacctgaaagttatcacagccaataaataaacaataactggctacttctcttccaacaagtgaaagcccacagaagataaatgtacatagaagggaaagcgattttctagcccttctgagaaaaagagacagaaaaagagattgtgcttattaaaagtgtcgttatggtttcattcaaacaggaacacagacaatattcagatggttagaaataaaggcaatgagttctcatttagtgtctggtgttacagaagttatttattgaattcttgcaagattggttgactatacctataagatcagttgggctctttgtgaatggttcatctttgacaactttaacaacttctttccagtggtgcagtaaaggattaaccttgttcaaagagaggcccaacctttgcccttggctcctgggaggtaatctctaagctttgaaatgtcctgcttgataagagtatcttcattactggggaccttgttagcattgtcaatgcttataatgtgatttatggtgggagctctgaccacatagcatcaactcaatttctggaggggccagagactatggtcagccacatgggtggtcagccatgtctatgtgagcaagtcccaataaaaattctggacaccaagacttggaagagcttccctgcttaacaatattctctgtgtgtattgtcacacatagtttctgggagaagtaggccctgtctgcacagctccactgggagaggagaactggaagtgctgtgactgactcctttgtttgggactctcctggaccttgccttaggtacctcttcccttggctcattttcatctgtattttttgctttaataaactctaatattacagaagttatttgttgaattcttgcaagattggttgactatacctataagatcagttgggttctttgtgaaggcttgagtaaaacatttgtaaaacagctttcagtgagttttgtgagtcattctagttaattatcaaacctgaagatggtcttggggacctcaaacttgcaatttgtctcagaaatgggtggtcctggggactcatgaaatttgtagttggcatcagaagtgggatttactggaatgaccttgactcaccgaagcttgatgaaagcatggtttgggcaggggtttatgaacctttgattcccagatggccgctaacctttaaatgcccctgtctgagtcccctgtcccagacttataaagatctcgtgaatatgtatgggaaatgtagctaagggagtctctggtttatattgattttgtaggtcttgggtcctcgtgctaaagtggctgagttgcacagaaggactctctgcacaaaaattaggaagggcaagataaaaactccacgagggcagggtccatggtgactcagctaaccagtctatctcaggggaaatagaaatgtcttccttagagaattcattcattccttcagcacttgacaatctacgaatcaactctgaagaaccaggcgctgggtgaggcttggaaacactaagctaaggagagcatagactttgtgttgaagagctcagggctggggaggtcagtgtgtagaacaaatggcaggttgttttttttttttattattgttgtttgtttgtttgtttttgctcttgttgcccaagctggaatgcaatggcgtgatttcggctcactgcaacctccttttcctgggttcaaatgattctcctgcctcagcctcctaagtagctgggattacaggcatgcaacaccacacctggcttattttttgcatttttagtaaaaacggggtttcaccatgttagccaggttggtctcaaactcctaacctcaggtaatccacccacctaggcctcccaaagtgctgggattacaggtgtgagtcactgcgcccagcacctttttttttttttttttttttgtgacagagtcttgctctgtctcccaggctggagtgcagaggcacaatctcagctcactgcaacctctgcctcccaggttcaaaggagtctcctgcctcagcctcccgagtagctgggattacaggcacacaccaccacacccggctaatttttgtatttttagtagagatgaggtttcaccgtgttggccaggctgatatcgaacccctgacctcaagtgatccacctgccttggcctcccaaagtgctgggattataggcatgagccactgcgatcagcctacaaatagcagatattgtgtgatagagtttgtcagggaccacaagacagacacacactcagtggtacagctgctccgagttctgtttccaggggatgataggtcatccacatgcctggtgggaaggatggagctggtgttggggtcaggattggagaggctgattcctaattcacattcattagtgggttccaacagctggatcttgttttccacctgtcgtgtgaggaagtttacccttctttgttatatcatgtcttgtgcaccacttctcaaggttaaggacatggccagatcaactctgaagaaattccccagggttgagggctgccccttgggagcagacaaaggagagaagagatgataaccattagacccgctggaaaaagctattcagagcttaaaaaaatgaaaacaaaaccacaaaaacctcatctatgtccagtgttttttgtgtgcatattctggagtatcatttttaatttgatcctgaaaactgccttgtgaaggtggggaggatgtattgttgaccctacaggctcagacagcaacaaggccagaatcacataggttgtaagttgctgaatgggagctgcaagtccaagtctttgactctaaatccagcgctctgtccagagccccgctgctgcctctgttggcagctgaagctgtcagtctgctgccccctgcccagttcagacagggtggctggaaatggaccaaaggatggaaaaagagaataagagcggacttgaagggaactgaaagtatttgttaaggggaaagcagaaggaagaaagaaagaggcatgaaccctggggcctggccttgaagcacagtgttccaggggaggggggatgccgctgtccccacccctccatgggggcctaagcagatccagagctgcctggccttcctggagggtggcgtccaagcatggatgggaaggcagcaaaaataggcccatgtcacttctgggagaagacaaaagagggaagagaggactactatagaaaagtagaaaaagaggaagggagggaatctaggcatacagatcggaaatgtggagcaaaacaaaatttttttttttttttttgagacacagtgtcgctctgtcacctaggctggagtgcagtggcgtgatcttggcttaccgcaacctccacctcctttgctcaagtgattcccctgcctcagcctcccaagtagcttggattacaggtgcacgccacccagcctggctaatttctctatttttagtagaggtggggattcaccatattggccaggctagtctcgatctcctgatctcaagtgatctgcctgcttcagtctcccaaagtgttgggattacaggcgtgagccactgtgccccgtgtgaaacaaattcttatgaaacaaatttaatttacatgtgcttaaactttggtgtcaacttgcatggaatccccaggcttgctagatttttctagtgcctccagcccttaggtctcttcctatgttctctcagctactcctcctttccttcaacactgttagccgcttatccagggccctacgtttcagcccactcctcctccagcccctctccactccacctccacaatgtctgttggaatggaacagttggggatactggctgtttggcccccatgggggtctctccatataggattcagagaattggaagacttcttgggctgaagcagagaacgggatgcaattttgaaactggctttgtgagtcactgtgaacttcaagcaccctcccacttgaggtaagcttcaccagtttggcttgtgggaactgtcagaccagctccaggcgctggggctttctcagtggccttgtcagctcacagcaggcgttaacagcctctaattgaggaaactgtggctggacaggttgcaaggcagttctgctccccatcgtcctcttgctgactggggactgctgagcccgtgcacggcagagagtctggtggggtggaggggctggcctggcccctctgtcctgtggaaatgctggggcaagtggtcaccctcatactcctcctgctcctcaaggtgtatcagggcaaaggtaaggaggtcctacctggcgtggggcgagggagggactaggagctgtgcccctcagggagatcagagccagagcctctgcttgtgccacatacacagtcatctggaacttgactccgagcagctcctgacagctctgacagtctaaatcagacaggacaggctggcagtgcactgggaggtctgtgagaggggtatctggccctgccaccagcaatccaggaagtcttgggtgaggagattccttcccactggcttcaatttacccttccgtgtagtggagagagaagcctccttccagccgcctgtaaagatgatgaaaattgcatcctccaattgtggcatgagagaagagaagcagtcccaaggaagtgggtggttctcgagctcagagacagatggatggacccctgaggcaggaaagctgagcccagggaggggagggcgaggccagcagccaggaagaagctggaaggcatggtccctcatctccccggcttcttcagccatccagatgccacaggagcctggaaattattagggacatgcagggttggggcagaagaaggagacaatatgaggaagctccacagcaaacctaaagctgtcagccaggcatggagccatctaacatttactcctggggatcccagctgagggctgctcccctctttctccagttctggggtccaggatgctctgaaacctggatcccgcatttaatttaattgaattaatttatttatttcatttttaatttttatttatttatttattttttgagacagagtctccttctgtcacccaggctggagtgcagtggcgtgatcttggctcactacaaactctgcctcccgggttcaagtgattctcatgcctcagcctcccgagtaggtgaaattacagacgtgcgccaccatgcttggctaatttttgtatt

SEQ ID NO: 4036 - DNA, 6000 bp, Homo sapiens
ggtgagacagagcagaagggaaggttcttgaaaacagggagcttacaaattaatgtaaaggaatggccagaagatagtagataggcctttgtggtggctcacaggaggctcacttgaggccaggaattcaagaccagcctgggcaacagagtgagactccgtctccacaaaaaactaaattagctaggtacacacctgtagtcctagctacttgagaggttgaggcaggaggatcaccttaacccaggagttcaaggctgcagtgggctataatcatgccattgcactccagcctgggtgacagagtgagtctctgactctaaaaaagaagatggttagatacagaaggagacagaaagtgaaggctgggcgcggtggctcaagcctgtaatcccaccactttgggaggccgaggtgggcagatcacctgaggttagcagtttgagaccaccctgaccaacatggagaaaccccgtctctactaaaaatacaaaattagccgggcgtggtagcacatgcctgtaatcccagctacttgggaggctgaggcaggagagttacttgaacccaggaggcggaggttgcggtgagctgcagatcatgctgttgcactccagcctgggcaacaagagagaaactccatcccaaaaaaaaaaaagaaagtgagggtcagtcctgtaagacagaacgcgatggaggaacagaggctcaaaggaagggtcctctgggagaaccacattttctctctttctctctttctttcttctttgagacagaatctggctctatcactcaggctggagtagtgcagtggtgcaatcagctcactgcagccttgaactcctgggttcaagtgatcctcccacctcagccctgtgagtagctggaactacagctgtgagccaccatgcccagctaatttttgtatttttcttggaagggaattttgccatattgcccaggctgatcttaaactcctgaactcaactgatccacctaactgggcctcccaaagtgttgggattacaggcgtgagccatgatgccaggccaagaaccacatttcaatgatctgtttaagtctgtcttttccactacacagtgatattcttaaaaaatcaaggctttttgagttatactatatcagaagctaaaaataataataaaaaataataaaagtaaaacaaacaaaaaatcaagtttgggaggccatagcgggaggatcacttcaacccaggagtttgagaccagcctgggcaacatagtgagactgtctcttcaaaaaaaaaaaattataataaaaaaaatcaaggctttgtcttggcttctatttgtgctcaaaagttttccatagttctaatgatcacaaaaccccttaaggctagagttcattttacagatgaaatccagagtgtattgctcagtacacagccaatgggtttcaaagttggtattgtatttaaacccagcattatctcattttgagccttcacaggcacctcaaactcattatgtctaaagtttgtcatctctaccccttccccaaaatgtgcttcttcctaagttttgtttctcattaaatggcaccacccagtggtccaaattagaaatctgggtgtcctcttggagtccaattccctaacttggcacatccagtcaatcttcaagtcctgtttgcctcctgaaagttcccaaagttactttcttccctccagtcccacgggtattacctattctgcatgagcttcatcttattcctggatttctgcagtaactttctaaatagtctccctgcctctggtcttgactacttcaattagtgctccacatttcctaaagttctgatcatagcactctctatttacagcactttaatgccttcttcttgccctctggataagacccaaactcttttagcatggtttgtggagtccttcattatttggcatttgcttacctctccagtctcatatctcaacattcccttcactctactgtccagccttgcgggcccagttttaatttcccaaactccctaatttcttcctcatttccagaattttgcacttatggtttcctctgcttggaacactattcatctgttaaaagttaattttctagctgggtgtggtggcgcatgcctgtaatcccagctactcgggaggctgaggcaggagaattggctgaacccaggaggcggaggttgcggtgagccaagatggtgccattgcactccagcctgggcaacaagagcaaaactctgtctcaaaaaaaaaaaaaaaaggtaattttcagaagaaggtaaaattatgacccttaaactgttgaagaaaaaattattctgacacttgttaaaacagtaaggaagactattgcaatagtcaatgagcagaatcagagtcagtggatggaaggaaaattacattaaggctaggaggattcttgctaaactgacctaacaggatctttcctgaaggcaggtgagggtgatcagatagatcagctatcaagggtggagaagcgggcagggaattatccctaaactgacttggcaggattcttgctataactggctaggcaggcccaagacagcgcataaggacaagacctagccaaaaagaggccttagaggagcctgttgaaagtctggttaaggagatggtctttgtcaataccaacataaaaatgaacacataggccgggtgcagtggctcatgcctataatcccagcactttgggaggctaaggtaggtggatcatgaggtcaggagttcaagaccagcctggccaagatggtgaaatcccgtctccactaaaatacaaaaattagccgggtttggtggcgggagcctgtaatcccaactactcggtaggctgaggcaggagaatcgcttgaatccgggaggcggaggttgcagtgagctcagatcgcaccactgcactctagcttgggtgacaaagcaagactccgactcaaaaaaaaaaaaattctccttgaagactgggtatttgggaaaaaaaaaaaggaaaggaaaggaaaaaaaagaaggaagggaagggaagggacgaagggagggagggaggaagaagggaaggaaggaaggaaggaaggaaggaaggaaggaaggaaggaaggaaggaaggaaaaagagaaataaaattaagaggcctgatgctgtggctgacgcctgtaatcccagcgctttgggaagccaaggtgggcagatagtttgagcccaggagttggagaccaacctggacaacatggtaaaactctgtgtcttcaaaaaatacaattagctggatgtgctgttgtcccagctactcagctactcacgggtctgaggtgggaggatcccttgagcctaggaggttgaggctgcagtgagctgtgatcttgccactgcactccagcctgggtgacagagtgagaccctgtcacaaatttttaaattaaaaaaaaaaaagtaaacaaaaaggccgggcgtggtggctcacacctgtaatcccagcactttgggaggccgaggcgggtggatcacctgaggtcgggagttccagaccagcctgaccaacacagagaaaccctgtctctactaaacatacaaaattagccgggtgtggtggcgcatgcctgtaatcccagctactgaggaaggctgaggcagaggtcgcggtgagccgagatagcgccattgcactccagcctgggcaacaggagggagactccctctcaaaaaaaaaaaaaaaaagtaaagaaaaaagaaattaagaaaagaatgaacacgtgtttattttacctaactcatgaagaaactagcagatgttataattaatacaagagaaaatctagagaacggacatatttatggatcaggaaaacagaaatgaatatgaaaatggacgccaaaactgctttttttccccacagtgtggggaacagcaggttaattgaacctctaccagacaggatagaatttgcatacagatcagttacctacatgaattgtaaaataactcccatgaaaacagaatctttaaagcagaaggatatgctatagacaagtccttcaggtttcccattagccatcacttctgggaagcctttctagaatctccacgtatgaatgagttgccacttctaggccagcatatttatcacgttatattgtttacatccctccctccatacaagatacacaagaccatgggctttttggggcagattctgtgagttattcaagtctctgattgcttcttcagcgtgaatatctgcttctaaggaacacaatatgctaggcggtagtgtttgtcgtaaggtaaacatattgcatgttaacggagcatccattttactctaatatctggggaaacatcatttgactttaaagaagacgctgtctttccctccaccttcaatgtttcattgttttattaactaatcgctttttatttccaggcctgcgggatacaacgggaatacaaaaatgcgctagagcggtccgcaacgctgtagcctgcgtaaggaacaattgatactaagtggcactaggctgcagggggtgccactgacacactgggagagggctcagccaaccacaaggtgataacgaggtcagcggagcaccagaaaccggctcactagcctcctgatcagtctcggcccagaggaaaatgaagggcttgagcttctgcttttacaaatctgaggggcaggaaatgaaatcccactagcagtctgcgtagtggagttgaaccctagcacccgctccccagggggtcgcctacaacgcgttccaggtgggcaggctcaggcgctgctccctcacaagcccccggccacgcggtgtctgggaccgggtgcctagtcagcccgggtggctccgccccgaggccccgccccatgacgcgagaccccgcccccgcagcgcccgcttccaagatggcggcagcgatgcctgcccggctgttggggtggcggtgacgacaggcagcaaaagaccaggtatgtgcgctgggaatgcgtcgacacggaggcctgggataaaggtttgggcattcgagagagtgagaagttttgggtaacgcctggagacgagcctgagcagggacggggtcctaggtggaagtatggacgggggccgggcgggctcacgttgctagtaggtagggcaaaagcaagagactgggataggatgggcgtgctccgaaagagctgggttttaaccccctccacagcgcggaccacgcccctctaggtgagcccttccagccacccctgactgtctctgcccctgctctccctctccctttctcttcagcagtaaccctcctccccacccccgctagaagaggggaaaggtagaaaaggtagaggacgccacccccaccctactctccgccgagctccggggctgttcgcttacagcccccaggtggtcacggtccctgcacctgaggagttggcacccaggcacatgaagaatagaaggagcctgtttcctacttcgccctgggtactccttaggccactccacggtcctgtcatgactctgtcgccacttcaactggttcttggtctgggggaaaacaatgtttccattagctgtcctgtccccactccccaatctgtcctgttggggtgggggtacgggggtggttaagtatgaacctgacacttatcattccagggtagcacgggagataggcgagggacctaccatctcctgctcctcctcttcctttccaaccactttccttcacttcgcctgctgggaaaccagcttcaccctgatcctgatctctggcggtgcaggtagctagttatcctttaccacttctgttccagctggtcccagattcgctgctggagtgctggatggagcctttctctgccctctgtgacatttccaattttagataatgcctcacatctctgtccccccgggaccccctggagcccccatgatccctaagaagacagcttgaacctaggtgagtc

SEQ ID NO: 4037 - DNA, 6000 bp, Homo sapiens
ccaccccagtagggatccaccctttgccagcagcccgctgggaacccagacagcgcccactcacggtgggagcagctagtgtctgaaggcattcgaagcaaaggcaaaatacacgaagatctctctctccgaagctaaatgtctaaatacgctctcgaaatcgtaggacccatgggtggctgaccttgaagttattttctcagagctcggctctgggtgcaggcccgagagcaatttgcgttagaagtactagaggaggtggggaaaacagaaggggcgagagccgagggcccctcgatacgaagtcagtgaccccgaagccctacggagcgcaccggagcggctgggggggacgggaaaaggggtctctaggatccccgagcgcttggcctccacacccatgggtcctttccctgcccaggcacaggataaacagttatcagcaaaacgtgaggggccagttcagatctccggagggccgcaggcaccaactcccagtcccactgaagtcacctcagcaacagcgcagccatcttgggttccggtctggacggaagtgacgccaggcggccccgccacccgagggcggaggcgcgccggctgggggtcggggttgggggtgtcatgtgacgagagtctctttaaaaggctctggagcttctccgctcagctctgcctagctggtttgctggttgttttctggttttttagtctcctcctccgcctcctgcagccgacttctaccggaatttgccaggatttcggcagaaacgccgctggctcaaaatctgcagtctacgttccacctgcgtacatattcattttgtatcgcactcccaaacagcaaacggcggacttgtttagattcttccttaaggacttcgcagtctgttgcgttccccctgcctcccaggtcggcctaaaaacgtggtggttggccggttgagaccccgaagagaaaagatactttgggttccctccctttctaatacgaagctttaaccagacagatacataaattgtgacctaagttggggagtgtgtagaggggcctcgagaagaccttgcggaccaccattcccgaaaacgaggagcctcatctaaccacctcgattagaccccacaattcctgggtttgagctgccacatggaccaggcgcccactagccgaggacaatgctcccttgttcgttgtttcagcgctatgtgggtgacacccacagctagaagaacccggagtgaggggaagaacacgctttgatttatatatgtgtatatatatatatacagttttagggaacccaagcacaggaatcaactgccgagcactcaagactgaagaaagaagaagagcaaatgataaaggaagggaacagagcacaaaagttcttgactcttgtggggagtagggtggagaggagtaaaagggacaggctagagcaactcctatttctacaaaaaaaatactcaattatattaatattcagatcttatgtatatttagcatccctgcacttcaggatttaaatagcacaaattcacttatttctgcatcagatgaataatactactttgcatttctataatgcttgacaaagcacattcgtacactttaggattgaaagaggctctctaatccaatctactatctatgcagggatctcctctgcaacacccataacagctgatcttcaagactctacccccccatattcaatgatgggtacctcaaacaacaagttttatttaatgaacaacttattcgttagttattatatttaaatacagttttgtgctatcgaaattccagtcattgacttggctctctggagcttcacgttaacaaacccaaggaatgcctttttcactcagatcttttttggtttttctttttctttttctttttcttttattttgagacgtagtctcactctgtcgcccaggttggagtgcagtggcgctatctcagctcactgcagcctctgcctcccaggttcaagcgattctcctgcctcagcctccccccaagtagctgggattacaggcctgcaccaccatgcccggctaattttctgtatttttagtagagatggaatttcaccatgttggctaggctggtctagaactcctgacctcaagtgatccaccggcctcggcctcccaaagtcctgggattataggtgcgagctaccactcccagcccactcagctctttaaatattaataatttcatttagcatgtagttatggactttttgtcagtccgtgaaaagttctgtaggggattcaaagatacagatgtttgtactgtccccaagaaggttatagccttagcaggatcaataaagacatgcaacaaagaaagtagcaacaacccattgaagagggtgttgataaaaggggtggttagataaagaggaaatgattgcttacagttgggaggtggagttaggtggaaattttggaggggagagttttgggggtttttttttttttgtactttgaattgctgttttatagaaatgttgactacaacatcctgtaaacatttgtcaatgatgatggttttgcctatggacttcataagcaatcccatatttagaattccacaacccaaatctaatactaatgaccatacccaccagggctgtggtctaatgagatgccaggaaggtaccaggacactgtccttcacctgggtgagcctgcagtggtctcatagcaggaataacaatgaccaccccacttacattaacttctagaggtcaggcacggtgactcacacctgtaatcccagtacttagggaagccaaggcagaaggatcacttgagtataggagttcaagatcaacctgagcaacacagtgagatcctcatctctacaaaaaattgaaaaattagctgggtatggtggtggctgcctgtggctcagctaatctggaggctgaagtgggaggatcgcttgagcctgggaggttgaggctgcagtgagctatcattgcaccactgcactacagcctgggccacagagcaagaccttatctctgaaaaaaaaaaaaaaaaaattttaaactagcccagcatgctggcatgcgcctgtagttcccagctacttggaaagctgaggtaggacaattgcttgagcctcagaggtcaaggctgcagtgagccatgatcatgccactgcattccagcctgggcaacagagcgagactgcctcaacaaacaaaaaaacctcagctctggttatgtagacatccccatggctaactccaccccaacaccttcaggttctcatgatgtaccaaattgaattcaccttctttcacctgtcatttaaggcctttcacaaactggtttcgactttcctgtccagtctcatttctgactatgccacttcaagtttccccaaatcaagtcaaagtggatggcacaagatcggccctgaatatatccaacacttcagaaacctacatctcatatacatacacacacacacacacacacacacacacacacacacacacacacacacacacattctgtctctccgtctcacctctttgtccttgcttttgctgttctatcttctggtaaccctccctatctccctttccaaaatgacagtcatccttcaaggctgattcatatctaacattgcctcctagacacaactattcttccctctgaactatttatttgtttgattatttatttatttatttatttttgagacagagtttcattctgtagcccagggtggaaagcagtggcacaatcatagctcgctgcagccttgatttcccaggttcaagcgatcttcctgcctcagcctcccaagtagctgggactacaagcatgtgataacatgcccagctgattttttaaaaaattttggtagaggcgaggtcttgctatgttgcccagacaggtctcaaactcctaaactcaagcaatcctcctgcataagcctaccaaagtgctgagattacaggtgtcagccactatgcctggcataaacttcatttattaaagtttattttgtctttaatctctcatataacttagtcttcctgatattgcagctgtgtgtgcccctcttttgtactcccagcattttgttcattactaaaggaagtgtcatggcttattatacttgattgttgatgggtttgtcctctgatcttcccatctccacctccccaaaccaaattttcaactccttgctggaaggacttaatttttattcctctctctattacctgcattctcatactttacatattgctggcacttaatacaattttgtagccttgaaataaattgaaatggacttaaacagcagcatgaagcactgaaggacttcttgacaaacggaaaggtcaggggcttcttgcctggaaatagtccagtggagaaaaacttctgtctgggaagaatcgcacaggatgaagggaggtgcggggaaaaaaactcccataggacttggtcatctcaagaagtctgtaatgcagcccacattagaggagataacaggggatatcctattttcagagttctctgggggaaacctccctctagttcctagggctgtgaggcagcctctctcaggcaaggaggctgaggagaaatccctttttatggcctttaaattgaggttccatatctatccctcagagaagtgtgtctgtgtccctgtttttgtccctctccctcaccaccccccacaacattccagcctggggcagggggaggccagtggacacaaagccctctgtgtatggggtggtatgtgtccccccacccctccacccagactatacaatgccccttctgctccctgcactctgcccccctccccaccacctctcaactgcacatgccaggctgcaattggttactggctgaggacagccccctcatgctggggccctaggggattttaagcaggttccaggaaccccccgttcagttcctggtcccccactttctcaaccccacagatgctccgggcccctgcccctgccccagctatggctcctggggctccctcatccagccccagccctatcctggctgtgctgctcttctcttctttgggtaagtggagccactctactctgggagtcttgggactcaggtgtctctcagcaatccccacagcctttgctgcactccccactgcaaccaaagaaagaacaagcaggagcaggaaggtgacattatattcagaaagaaaaaatatgcggctgggcatggtggctcatgcctgtaatcccagcactttgggaggccaaggtgggataattatttgagccccaggagttggagaccagcctggacaacataaccagactccatctgtaaaattcaaaaaaaaaaaaaatatatatatatatatatgaaaagaaaaaaatatgcatttagagggaggaagtagaggttttattttaaaagaaagggtaaaagagagtgtagcaagcttccctgagtggtggccatggctggacccaggttggaaatagtagcatgcccccagagccatgctaacagcctggtgggaagcagtgttagattacataaagaaataggctcaaacacctgggtttggttcccactcgtcccctagcagtgcaggaggtgccttaaccttagtttcccagaaggaaaaagagagtgcgatctaagtaaggagcccaggtttgtggtctcagctcctcagattttttgtctctctatggctcctcacctgttgtgtgggtgaatggagtgaggttctatgagattctgggatcttatccctctaaagctgtcttccttcataagctgaccagccctttccttgccccctggcagatgttgggtgagtaagaggtcaaagcaggattattggaatggccccttcccttctctgaactgccctgaatcctagtgcaatgagtgagccataggcaagtgggggtggtggggaggacatcaagggaaagggggctggccaga

SEQ ID NO: 4038 - DNA, 6000 bp, Homo sapiens
caagatcaaggtgttgacagggttggtttcttttaattttttaaaaaaacttttattttagatttaggggtatgcgtgcaggtttgctacataggtaaactcctatcacgggggtttgttgcacacattatttcatcacccatgtactaagcctagttactcaatagttattttttccgatcctctccctcttcctaccctccaccctcaggtaggccccagtgtgtctgttgttcttcctttgagtccatagggttggtttcttctgaggcctctctccttggcttgtaggtgtccatcttctccctgtatgggtctgtgtcccaactaacaaggacatcagtcatattggactagagcccacctaatgattttattttaacttaattacctctttaaaggctctatatccacatatagtcacatcctgaggtatagggggttccacatgtggacttcaacatatgaactgggagagacacaatttagtccttaatagtgccccaaagtggggaaaaggaagatctggaccctcgggtttccatagtagaaagcaatcactgctttctattaagtactcacagtggggcttatccaggaagaatgatatgctaataagaaggggaggaggaagtgatcctggacagccagatgatatgtgcactattccttcataatggagattctgaagaggagaagcacttgactaaacactttttcattcctactccgtcttcaaccaaaagctgtcaaacttctgtttctcagccccagcccctgaaattgctcaggaaaaggtcattaatagttccttgattgccatatttcaatcaaactcttgtttgaattcttttctacaacattaatactgttactgttgactactccttccttgaagatctgttcccactaaacttccttgttccctcctcttcagcccctcctatacaaactcctttgtcagctatttttcctgtgcacgcttcaaaaatgtttgcatgtcaagtttctgtcattgactctctcctcttctcctctccctctcaatccctccttcctttccctcactgtttccctttaattctctctcaatactcttacagtttcagagatcttatccttactttatcttaacctaggatctctggatggattcaaatagagcttcttaaattaaaggaaacataatgtgtatatttgcatcctttcttgggagaaggcccaaaggtttttatcagaggtttgaaacctcaaccgtgttggtgcctcctaaattgtgtcttttgtcaagacctgtcttctgagttccagggccatgtgtctcactgcctactggaaatcttcacctgaaaccttcacagctacctcaaactcaataacatcaaaagctgaaatcattgtctctccctcccaaagcctgctcatcttcccatttttcttttgtccatgaaagctactgccatcctccttatcacccaaattagaaatccgagcatcacccagacctctcccccttcatcacccctcagccaatcactcaccaagtcttgtccatccttccttcctaacttctctcctggatgcttccattgcatatccactttttaaacagagtggctcttgtctcaactagactgttgaaataatcttccaacttttccctccaccttccatctctctcccctctaactcattccttggactgctgtcagagtacttttcataaaatataaaacagatcttgtgattccccagtctaaagcctttttattagttcccattaccttttagaataaaatatgtactgttcatcctgacacacaaaactcttcgtgataaatactaattgagtgcctagtatgtgcctgcccttgtgctaaatgttgagggtacaggggtaaacaaggtgaacagcttccctgctctccaagacctttcagtccacaaatgcaatgagtttacagaggagaagcacaagctcctaaaggagttggggtggggttgggggtcagaacctaatttagaaaattgaggaaggtctcaacctcccatcttgcatttacaatagtaatcagcaggtgtggtaccaaatatggaaccaacaattttatctgcattatctcatttaagccatgagtgccattattgttagcctcactttacagataaggaaactgagggctagaaggttaaataagtggcagagttgggatttcctccagattcctgtgagacccagacatcttaatccttttggaacctgtgcttctcctttgtagtactcactacacttgtggaactacatccaactacacttgtggaactacagccagctctgcaaacatgacagtctacttcactccaagtctttgctcatgctgctcctcttgcctggaatgcctatttctctcaaaaatcttcctgctgaatattttgcgatctaattaaagtgttctctcttccatgtacactcctccctcagatagaattagccactgtcttctttgtgcatacacagcatttcataaatactgtcacagtccctctagcacttcaaatacttatctgatgttctccccctaagaaactgtaagtcctagaggatgacaatcaactgaattccatagtcagaaacttctgctgtgcctggccttccaatgagaaaaggagagaagaggaggggaaggaagaaaaagggaaggagaagaaagaaaagcaaacatgaagataaacacttcaatatatgatatcccaagaccatctacccttttgtaaaaattttgctttttttttttcccccccaagagtcagggtctcactctgtcgcccaggctagagtgcagtgccatgaacataactcactgtagcctctaactccggggctcaagcaatcctcctgcctcagcctcctgggtagctgggactacaggcatgcaccaccacatctggctattattattattactatattagtagagatggggtctttctatgttgcctaggctggtctcaaattcctggcctcaagcaattcttccacctcacattggccttccaaagtgctgggattacaataagccaccataggccaaaattttgcattttatccattactgtaaaattaacccttagaaatccaacaacactcaatttgagaattgttcaacaaccacttaatgaaaaccccctgaaagcttcccatcctgttgcagtccctttctctcctcctgtgctctctcctcttcttcctatctagcccacccttttggcagctaagaattcctccctccattggagagccacagaccaaagaggagtcaaataagaaaataagacctcaaagaaggaaaacaaagtgaaggccttgcatcagaagtcacgtggcagaaagccacctggatatctgaaaagaagaaagaattgagggatatccgctttttgcctcagagaccatccttagccctgaaggctttgtttctgctttaggtttcccagataagcatccgaagtgctacagcaaggaactttaagtttccagatacttgtctggattttgcaaggcgtagatgagtcacttgagaaggagaactggaatggctgcctgggttcatttccattgtccaatccaagggcctgtggagaaggggctgctgcaagactctgtgtgtggcggggggaggggtgggtacgtggatggcaatgggaggatcaattaactccacccaggagccaaatgaaacacacaaataaaaaacaaaacctgagtagtggtttttaggtcattctggagtagaaagagcattcatttatagcaaaggttggcgggcacctgtgtcagcccctgcctccactccacccctaacaagtatcaggtgcccacacgggcctgctgctcgcctcctgggcttttctaagccaggtgagacctgtcccagatgtccacgaatccactgggggagtggcactatcaagcagagtcatctgattttctgcctgggacctggaccattgtgagagtaaccaacgtggggttacgggggagaatctggagagaagagaagaggttaacaaccctcccacttcctggccacccccctccaccttttctggtaaggagccctggagccccggctcctaggctgacagaccagcccagatccagtggcccggaggggcctgagctaaatccgcaggacctgggtaacacgaggaaggtaaagagttcctgtcctcgcccctccccacccccaccttttctgtgatcttttcagcctttcgctggtgacttgttcttccagggcccatttctctaccctacctgggtttcttctaacctggaaatctaatgatcaaatcacactaaaaagtcagtagctcctgtggattacatatcccaggagcatatagattttgaattttgaattttgaaagaaattctgcgtggagataatattgaggcagagacactgctagtggtctgaagatttgaaaggaccactttctgtgtgcaggcagggcctcagctggagatagatgggtctgggcgaggcaggagagtgacaagttctgaggtgaaatgaaggaagccctcagagaatgctcctcccaccttgaatctcatccccagggtctcactgtcccattcttggtgctgggtggatccaaatccaggagatggggcaagcatcctgggatggctgagggcacactctggcagattctgtgtgtgtcctcagatgctcagccacagacctttgagggagtaaagggggcagacccacccaccttgcctccaggctctttccttcctggtcctgttctatggtggggctcccttgccagacttcagactgagaagtcagatgaagtttcaagaaaaggaaattggtgggtgacagagatgggtggaggggctggggaaaggctgtttacttcctcctgtctagtcggtttggtccctttagggctccggatatctttggtgacttgtccactccagtgtggcatcatgtggcagctgctcctcccaactgctctgctacttctaggtaagtcagggtctccctggttgagggagaagtttgagatgccttgggttcagcagagaccccttttcaggctacgaatgagactcccacgaagggatgggacccctcaccacatctatagctgtggattgagctcctaggacaagccaagatggggctagaaatgaggagaatgctggttccaattggggcatactcatgagtgaggccagtcacttcacccctctgggtcccagaatcactctgtggaaccaaagagcttcgactagatggtccctagggtctgtctctttcagtttgacattccagggttctcctctatgattttcaatttctaccctttcttgtggggatatgggttgaggctctttctgtagcttggttcagggaaattcaacctgtacccttaatttgtgagtttgcacagggagcaaggggtaagggagcagtgttgaaaatagggatttgtgttgacagtggcgcaagaggcatgaacagtggagaccagagagcaggtagcaaggtttccaccagaaacatcctgattcttgggaaaattgggctcctggggcagaggagggcaggggagttttaaactcactctatgttctaatcactctgatctctgcccctactcaatatttgatttatcttttttcttgcagtttcagctggcatgcggactggtgagtcagcttcatggtcttggattgacccagtggggcacatatggggacaaaggccataagatattgggaaatgcttgttgaatgggaaaatgctgatgtggggttagcagggatagttcctccaacacagcagaacttggccctgtgcttctctggccagctttccttaagatactgaacaggccaaaaatggggccaagatgctctaagactgagccaccaagcatgggtttgcaatgagctcattctggctttgaggctcc

SEQ ID NO: 4039 - DNA, 6000 bp, Homo sapiens
gggccaaattcctactcatcctctgaggttcgggtccatcatcatctcttccagccaagcctcctatgaccttccaagtccagttgttcccttccctattgtctagtccaccacatactagatcctggtcatattaatatctagcacacacctgccacattgcaatcagtctatttgcatatttacctcctccagaaagtaggacacatacaagtactcaataatatttgttaaatgagtgaaccgaggtgatggctgcaggctccctggagctaatggcccaacctgtccccagcccctcccagctggggctgtgagggtgggagataagtggtcacttactggctaggggaggggcttcggaggtagtgggcctgcaccgccctcacgttggcttcgtcctcctcgcttgggactacctgctcctcctctgtgtcctttctggtcgccatgacaacctgccaacctctgaaagtttggcaagaaaaaggcagttagggaattaggttcctgaggttttgttgggggagaagttgtgttggtgatgtcacctcagtggaactaggactaggaaggtcccggtgggcaaaagaccagcaaggaatatccagtcagacctggcccagccactgttaccgggacaccaagaagtgcaccccgccatattaggagcccaccttgaagtgacaatattgaagtgccagtgtggctccttccacagatgtcagcaagggagcaggcagaggagccagcaggttacctgatctcagctcaaaaagttgaagaacaatgacttccctggaccagcaagatttttcagttgaaattataggatgtgcatacacacacgcccctcacctatgcccatgcgcacacctttgtctctgctggggaagacacagctggccttcggtgtctctaaccaaggccacaggaggtagggcctttggctcaggcgtcatcctggagcctattaaaggacatgaaggataccagcagctggtcccagccatcatggttgtgccctgacactcagggcaaagccgctgccccttgtattgtaagtcctgggctcaccaggattgacaaggggagaagcacactcacctctaacctgcctggatgttccccaccaagggctgagggacccagatgaaatgactgaagctgaagctccggccagtgagacaggaaccagccacctccttcctcagggcttcttctcctaggggcaggacagctgttaacaggaaaccttagccaccctctaaatttagcctctggccccataggctggcagatttctgggaggaaggaatgcaggctctggacccaggccccaaagcagtcctcacttaactctttccctcctggctgattctccagacgcttacatttagcagcagaattggaagacgtttgtgcttggtagatggagaatctaaagaacagcttttctctgggttctctcttcagaccctcttgcctgggacagcctattcaaagttcttccagaagagagtctaaatccaaagatatagaagaataaacaaacttaccacagccgcatgtcaactagagaggcctaaaaaaaggaccagatatatagaatggaaagggtactcaacagatagatattgggagagcactgtggtacaattaaagagtagtcattgcttgtgaccaggattacatttctttttctttttttttagacagggtctcgctctgttgccctggtgaaagtgcagtggtgccatcacagctcactgcggcctcaacctctcagggtcaggtgattctcccacctcagcctcctgagtagctgggagtacaggcacatgccaccacacccagataatttttaaattttttgtagagatggggtctcactgtgttgcccaggctggtctcgagctcctgggctgaagtgatccatccacctccgtccaccaaagtgctgggattacaggtgtgagccaccgtgccctgcctgcatttcttttaatagacatgtctcaggatggtcaactggacagttgtgctcaccctccacatttcctcccctctactcacaccccaaggtgataatggattggcaaccctgggtgacttaagaattccatgagcttcataaatgtcaaataagctgtcttaccctactaacccctctaccatcacaatgatcaaagcaaagccaaatagcccacacctctcatcccacacataccatagtcatcctttcatccatttatccatccatttaccaacttaaaatattcattgattacctactacatatgacactttacttgaccaaaattggcaaaacacatagcttaaagttgtctttcttcctagttaggtggaatgatgcctggtatatcgtatcattagaaatggctgaatgaatgagctcactgtttattaggaggaatgagacacagaccaaaaataactcaagcataagagagaatgtagttagtgtcctaaaagagatccagagtgctgtgtgagttcaaaggtgagaaagagcccttctgactgaagaaatcaggaaagacttcatagaagcagtggtgatatatgagctgacttctaaaggacaagtaagattataatagcagatatagtaggggaagggaattaccgagggggtggcatcaataaagttttgggggtaaggaagtatgagttctgggtatgaaaatatgtctaacttggtcagagcataaattacgtattctggaaggtagactgtgtttgagaacaaatgctagaataccttaaaagctaatttgttaggttctgcagagtcagtgataggacccaagcagacaagtaattaggaagactaatttggcaaagatattataaaatgttggggctgaacaattattacatataataagagaattaacaaggtgcctgagtgaaatgtaataaacagaaaacaacaaattttgtatgtcaaccaaacctagcagtcaaaaggattaataacaataagtcatgtaggatactatgaattcataacacaaagaaatgctaggggaaatatttgcaatgcttatcacatccaaaagttcctttccctaatatacaaagatctgctagaagtcaacaagctaaagatcaacagctcaatagaaatatggccaaacggctggacgtggtggctcatgcctgtaatcccagcattttgggagactgaggcaggattgcttgagcccaggaattcaagaccagcctggtcaacgtagcgagattctgtgtctatatttttaaaaatttattaaaaaaagaaatacgggcaaatgagctacctagtctcagaaaagaaaatatatatgatgtgcaactatattaaaagattttcaatttcactaataatttttttttttgagacagagtcttgctctgtcgcccaggctggagtgcagtggcaccatcttggctcactgcaagctctgcctcccgagttcaccattctcctgcctcagcctcccaagtagctgggattacaggcgcacaccaccacacctggctaatgttttgtatttttagtagaggcggggtttcaccgtgttagccaggatggcctcgatctcttgacctcgtgatcagcccaccttggcctctcaaagtgctgtgattacaggcgtgagccaccgcgcctggccaaatttcactaataattttaaaaagtaaattatatatacatgggatatcatgttcacttagattggcgatgagcagaaagtttgataactgtgtcataaacacttggtaactgtgttagtgagtgtgtggggagataggtatccttatatgctgctaataggagtgtaggctgtaaaattctcatggtagctagtttagcaatatctataaaaattacaaatatgcataactttcagtgagtcagaaattttacttttaagaatttatcttacatgtataatcacaacacgtgtgaaatatcgtacacataatagatattggttgcaatcttttcatagttgtgaaagatgaggaaaaacaatcttaaaagtagtttggttaaataaatcatgtcactcatatacagtgaaatatcatccccattttaaaaagatgatggtggtggtgctatacataccgatacagaaagctttctaaaacctttcattaaatgaaaaatgaataaatcattgcagaacagtgtatatatatctaaaatatctatggaagaaaccagcaacagccactgctcctggagaattatggtcccacaccactgatcattctttcagtagggtgaccatcatccaaatttgcttgggactgagggggttccttttggtttgaaaaccaggacagtcctaggaaaagtgagacaagttggtcacatgtccccaagatgatcttctttcacttatgaacttgctactttcccagtcagaatataaactctgaagggggagacttcctgttttcttcatgactatatctcttgcgcactgtggggtggaggctgtagaagaggagagaagtagagaaacagatcacattgtgtcttgaagtgtttcagcaaatatgggcaacacccttcttttactagcttggaaccctacctctgagtgcatttccctttttattatttatttcctgtcagttataagagaggcctacccctttgtgagcagtctaggactttgtacacttgttaagtagggagaaggcaggggaggtggctggtttaaggggaacttgagggaagtagggaagactcctcttgggacctttggagtaggtgacacatgagcccagccccagctcacctgccaatccagctgaggagctcacctgccaatccagctgaggctgggcagaggtgggtgagaagagggaaaattgcagggacctccagttgggccaggccagaagctgctgtagctttaaccagacagctcagacctgtctggaggctgccagtgacaggttaggtttagggcagagaagaagcaagaccatggtggggaagatgtggcctgtgttgtggacactctgtgcaggtgagtaggccccttttctctccagtgcccaggggtgggtgagacatggggacctagggctgaaggagaggctctgtcagagccttcccaggaagggcctccagcaacacagctgcgttcctgctgggccagaattacacattccggaccagtgcccagaatcagaatggtttttatttacatattagtaaataacattctagcccactgctgaaatgaagaattcaaagtactctcaagaccatattttcttatcccaaattagattataggatcagacacaggatttgacaatgtggacaaagtatttgaaatcggagttgtcctagaaaatccaggatgtgtggatctagatatgttcattatctagtatattaacgtttgtgttaaaaccagagaaagagacaggaaactgaggcagaagagacaatgcaacttatcccgtatcattcacagagcaagagaagattcaaaccctaaaaacaaacaacaaactagatgggtcttttccaaaggccaaagctccttgccacttctgggaccctggtcattgaaaattctgggactctgagcatttccctctgggagggaaacctcccagaacaaaatcagacattcatgagtatatggttgaatccacatcaagtgcttaatagcacagtgttctgtggggacctatggagtgtctaagggttagaatgaaagtcttggcattaaggtaccaaccattttgctgggcattggaaggaaatagaatggagagaaggaagttgagagacgcagggtttggcaaagtttaggaatatctttggtttagtgtatttggccatcaccttgcaattcagacactgttgagggcttccaggatccagctgcaacggggaggagaagagctataccaggaaactcaggagcaccaagcctggggaagtggaaaccagga

SEQ ID NO: 4040 - DNA, 6000 bp, Homo sapiens
ggagtgcagtcgcgtcgatctctgctcactgcaacctctgcctcccgggttcaagtgattctcctgcctcaggctcccgagtagatgggactacaggcgtgcgccaccacacccagctaatttttgtatttttggtagagacagggtttcaccatgttggccaggatggtcttgatctcttgacctcatgatccgcccaccttggcctcccagaatgctgggattacaggcatgagccacctcacccagccacaatgaggtatctttataccatggtttcttatctttctcactagtggcagtctgggatggacaactctgttgtgggtgacgcctcgagtatattgcaggatatttaacagaatccctggttctgcccacagaagctagtagcaccacccgccccgcccccccgtccccccgccattttgacaatcaaaaatgtctccaaacattgccaaatgtcccctgtgggacaaaatcattaccgattgagaaccactgatttatacctattagataagcaaaaattgtaaagtttgattataactgtaatcaaggatgcagtgcagaaagaatgttttcatatattgctagtaaaaatgtaagttattaatgtaaaacaattgagcaatatctattaaaattaaaaacacatatactctttaaaccagaaatactactcctcagaataaatccttttaaactgaaatttaaaatacataaacatatattgtacaaggatgttaactgcagcattgttggcagtggccaaaaactagaaacagaatgaataaccataagtagggggtgaatagcacacccatgcaataggatattatgtaggcattagaaagaattagaggtataccttaacacatggaatgttcttcatgagttattccttagagagaaaaccaagagccaaagtgtataacatagttgtataatactgtgtaatcttactttttgcaaaacacatcccttcatgcttttttatattactatataaaaagtctctcaatattctatttacccctactgaatggaagaaaatatatttgcaaatcatatctgacaaaggtctagtacctagaatttataaagaactcttctaactcaacaacaaaaagacaaacaactgaatcaaagaggggcaaaggacttgaataggcatttctccaaagaagttatatgattggccaacaaatacatgagaagatgctcaacatcagtcattagagaagtacatcaaaaccacaatgagataccacttcacacccaccaggatggctactataaaaaggaaaataagtgttggcaaggatgtggacaaattggaacctttgtacattacttatgagaatgtgaaatcatgcagcctgtggaaaacagtttggcagtttcttagataaacacagaattaccaaatgacacaacaattctactcctaggtatataccccaaagaaataaaaataaatattcaaatacacacttgcatacaaatgttcatagcagcactattcacaatagacaaaagtaaaaataatccaaatgttatcaattgatggataaacaaaatgttgtatatacacatattacttagccataaaaaggaacgaagtactgatacatgctacaatgtggatgaatctttaaaacattaaactaagtgaaagaagctagacacaaaaggtcacaaattgtatgtaacctccagaatagacaaatccataggcagaaagcatattagtgtttgccagggactaaggggaggagggaacagggagtgactgcttaatgggtatcagtttcctgtagggtggtgaaaatgtcttggaattagacagaagtgatggtttcacaatattatgaatgtagtaatgccactgggttgtacacttaattaatggttaattttatgttatgtgaatattgcctcgatttaaaaaatatattctatttacctttgtgttagattcctattgctgcacaacaaatgaacaaaaatttagcggctttaaaatattaccacatcagcttagctcacagttctgtagatccaggtgggcttgagtggattctctgcttacggtttcgcagaccaaaattaagatggtgacccggctgggctcttctcggaagaatcccacttccaagctcatttaggtttttagcagaattcagttccttatgattctgggactgatatcctgattctctgctggctgtcagccaggagccagtttcagttgctataggatgcccacatttcttggtatgtagccccctccaacagcagcacgtcaaattcttctcatccttcaaatctctctgacttcctcttctgctcttagcagacggaaaatctctgcttttaaagggctgttgtgattagattgggcccacctggaaaatctcacatctgtcataaaacgtaacataataacaggagtattgcctcatcaaattcataggtttcacctcacactcaaatgggtgggggttatacaagggcaagcgtcactggggatcattcttagaattctgcctatcgcaatgacctcttagacaaaaataataagaaaacatctacccaattcaaggacaattactgtttatacccaacctcattgcctatgtgatttataccaaggaaaagttacagaagcagtgatttacagattaacgtggttcaggtacccaagcctcagggaagggatggaaagctgtttttgttattgttgttttgttttttgagacgagtactcgcgagtctcgctctccgctcactgcaacctccgcctcctgggttcaagtggctctcctgcctctgcctcccaagtagctgggactacaggcgtgcatgccactatgcccggctaatttttgcatttttagtagagacgtgttttcgccatgttggcctggctggtctgagactcctgacctcaagtgatccgcccgtctcggcctcccaaagtgctgggattacaggagtgagccaccgtgaccagccagaaagctatttttaataagtaggcttctctttccgaggcctctctggcttgctttctctttctttcttctcttctactaaagcactgaatgtaaatacaaagcgattgtcaagaagaccacctgttttctctctgtagtcctgataagaagggttggagtttaggggactagacaattgaataatatcgattagcagtcctcaaacattttggtcttaggacccttgttagaggtgccccaaaaatctgttgggttttgtgggttatacttattgaaaattgccatatggtaataaattaaacctggaaagtcttacaaacacaagaatatacaagcacgtattctctcatcctataaagcgatgatgtcatcagacattatatagcctctggagtggaaaaggaaataaagacttagcatggttatgaaaatagatttgagctcgtggaacctctgaaagggtcccaaggacccccagggcttcctcgaccacactttgagactcattgagatatgtaaatactgccagttgtatttcttcacagattaatcaactcacagatttgggtgcattcatttgtgcagtcttagaaacaaatctttccctttaccagtatcttattccatctggtagactcatttctgctgctgatgcttgaaaaaagtgtcatttgctaccacaggaggaaaacggtgctagatggatcataacatacagaaaagcaagatagttccaaaatgtttccaagagcttctggcaggatctgtcattctacaaatactgcacaggaaaaattgctttaaatgctgcatctttgcagtagaaagattaggattgagccaggctgtgagtcaggcagaaaaaggcacacagagggggatgaaagaaagcactggagagtcttgtcatgctttgcccttgaaaactatgccaagacctcttttgtgtttttaaatgaagaaatccatcatgttttgtgattgctgtaatgactcaggatcttccaccttccttttaactataaaccgtagcgtagttaggtgtttgttttctttgtatcatgcttgcaaaaagtgacgaaataaagttaaaaccctttaactgggactccattacggttctgctgttcagtgaccagcttgttcattattctcacaatattatctactttcttcatttcagtctgtctcttagatcctgggcttctgatgtctttccatggcggatgaatacaatttaaaacacgaaagctgctggaggaaaggtttaacgttccccctccccaaggtgaaatctttgcctggcctcagtcactaagtctctcaggagcggaaactgaatggacattccggagacggtgaataagaatgataaacggtggttggggagaacagcgcgtttcttccagcggaggactaggcccacaggacgcattcccaacagatgagcggagccgacagcaagtgtgccacgaacgccagctggccgcctcactagagagagctccgccgcaagccgccgcttttggagtggagttccacatgtcctccgcgcttgagccctgggacgtcagaggcctggcgtgctgccaccgccccagttcacgtcgtgtgacccacgaccaatggaagagcaggcaagtattcccggcgtccgctgtgattggttcccggagtggaggcggtggcagagggtgggccttaggacgggtctcccttaaactgggcgatcaggcagcgaccctagaggcgtctgtagggtaaagctgggggttctgtagccggaggcggcggcgagtccagaacgtcctggccttacagggagaaggcgtcactcgcggttacaagtgcctgaccctcactccagttggcggaggaggagaaggaaggggccgggccgggtcccctcccctcgcgccccggatggatgtgcccggcccggtgtctcggcgggcggcggcggcggcggccactgtgctcctgcggaccgctcgggtccgtcgcgaatgctggttcttgccgaccgcgctgctctgcgcctacggcttcttcgccagcctcaggccgtccgagcccttcctgaccccgtacctgctggggccggacaagaacctgaccgagagggaggtacgcgcggcggacgcggggcgcgggaagggcgggcgaccggcctgcgggtgggcagcggaggaagagaggaccgagaaaagcgctcgagccattctcggcagagatttctgattttgccagttggaggtcggcttcgtgctcttctttgtgttcatgattttctgttttcttcggctctgtaggacgagtctcctgcgaagggctcagaacacgcgtccagaggccccgtgccttgtgcgtcaggcagtatgctgatcgtgttgtaatgtggcttagcgtgactgcccagactggtccagcagttcctgctgggggcgagggggcaatattttgacaaagaagtgaaaacagcaaagtgtactttggacacggcttagtaaatattcattgactgaaagtaggcaaccactgcttttctgaaaggatcttccctctacctccttcacctgcttcctgtccataccttactttgtttgcatttggcagaatgggtgggcttaatcaagtaaggacaggacagaagtacagaacatcttaatttgtcttgatttttaattgggtgaggttgtgtccaaggatatcctgcccctctctaccttaagaccaacctccagggataaaggcagatggtgaaacataattgacttttaattatagtgtttcttgtattgcgaattgttgcttcacagatgttagttttgcttctcagatacaaggtgatgtctttgaaggccttctgtgatgttcagggtaattgagagcacgtagtccatcatcaagagtttcttgctgattgattttttccctagatgagggcttacaaataaagtacttcagaagcgcatag

SEQ ID NO: 4041 - DNA, 6000 bp, Homo sapiens
attctgctgagaaatcttgtgatagccttattgcaattcttgtctgtgatatgcttcttttctcttgctgattttaggatcctgtctttgtctttgatttttgatagtttgattattatgtcttggtgtagtcttttttggattgaacctgactggagatttttaagcttcctgtacctgaatattaatattttatttcagatttgggaaattttcagctagcaatctttaaatatgctttctgacccccttttcctctattttctccttcttaaactactgtaatgtgaacattagctctcttttttaatttttaatttaatttttgtttttattttttgagatgcagtctcactctgtcacccaggctggagtgcagtggcatgatctcagctcactgcaacctttgccttctaggttgaagagattctgctgcctcagtctccccagtagctgggattacaggcatgtgccacaatccctggctaatttttttgtatttttagtagagactgggtttcaccatgttggtcaggctggtcttgactcctgacctcaggtgatccactcaccttggcctcccaaagcgctgggattatggcatgagccactgagtctggctgaatgttagctctcttgatgctgtcccataaatcttgtaggctttcatcatttcttttcattcttttttctcctctcactgtatattttcaaaaacctgtcttcagttcacagattctttcttctgcttgatcaagtctgctactggtgatttctactgcatttctcacttcattcattatatttttcagctccaatttcttttatgatttcaatctttctgttacatttcttatgttgtgcatttattgtttctctgatttcaccaaattgtttctctgtgtttgcttcaaagtaactgagcttctttaaaaacaattatcttgaatccattgtcaggccatttgtagtactccatttcttttgggtcagctactgggaaattattgtgtttcttaggtggtgatattttaatttgggttttcatgtttcttgctgccttacactgctgtctgagcatctggtggatctgccccaatttcaggctgtatgggctgactttggtggagaaataccttcttatgtggaataatgcgaggatgctggctgggtgggatgcaaaagttctgacttcagtaggggcaaagctgtgtggtctccatgcagatctgtcagctgaggttggtgttagtgaatactacagggatccttagaggccaacactgtgggtatctacagtggcaatgaggctgttgaggttttcaattgtgacaagtcctccatatctctttttttccccacctgggaagtcatgactgaggacatccctcttggaattaggtctaacttgcaggcctgctcctggtggtggtgacactggtgtctgatgaacagtgcccatggagtggccaagagccaaggcctgaagcatgggcatgcatggagggaccacagcaccagattcaattgtagcaatggtaccagtgcccaaggcacaggcatacttactatcacattgataatggtgtgtaaaatgcaggtacttataaagcagctaaggagccagggactttactgcatgcatacgcagagctacagtggctccaggatccagggtgtgggctagctctccttggtggctgagctggtgactagagcatggacaggcacagagaaaccttgactctaggacccagggtgttcactagctcactatagtggtggctctggtgttggaggtgtgggtgtgtgtagtacagcctcagagacagggtctggagcgcaggtgtgcacattactacagcagctctggagttgagaatatgggttacctttctacagtggctgaactagtgtctggagcaaagactttcacagagagaacttggcttggggtcccagggtgagatctagttcacaacagcagtgactccagtgtctgagacatgaggaggtgcactgcagccacagagccacagtccagagtgtgaatatctgtagagcagccacaacttttggggatcaggaacacacatagacttgtgagaggtggtaaccctggccccagtcctggggcagtgcaacaatagctgcttcttggtgagggggtgtgaggggtagtgcaactgtgtttccctttttagcatcctgctatgggaatggctgttggataaaagatgccagtgtcctctgtggagcaggacactgggggcctcagtggctctgtgtcacatgactgacacagatagcctacaaatttctttattcgtagctatctcctggtgtctcatatatgccagtctcaccggtgattcttctacatggatattctttcttttctccattgtgttgttccaaattctttaacaggctcttgagccccatcccccaactccccacccttgtgagggctattttggtttgtgtataactgtctatgtttgtttttttgttggggcataaggctgacatctcctactccaccatcttgctaatgtcacctgcataggaatctttttatgctttccttatattcactaaaatttaacaatatcaaacttaaaaacatatgatcaattgaacttattaatatcaaacttattataaataagaaactaccaggctgggcatggtggctcatgcctgtaatcccaacattttgggaggctgaggtgaaaggatcacttgagcccaggaattcaagaccagcctgggaaatatagagagaccctatctctagagatttttttttttaattagccagtagtgatggcacacatctatagtcccagctactcaggaggctgaggtgggagaattgcttgagcccaggaggtcaaggctggagcaagcagtaatcatgccactgcactccagcctgggccgcagagtgagaccctgtctcaaaaaaagaacctactagtctacataccacacttcctcatccccatctgagactatatatattttttctaacatgaggcaatgccaaaaagaggggctggtgagtgaaagtaagaacagaaagacatggaggcaagtcttatagaataatagccaacacttaaacttacacttaacagcgtgataggtattgttccaaacacattaaattcatttaatggtccttacatgtctatgtatttggtgattattatccttattattcacattgctgagtgtattattctgttctcatgatgctgatagagacatacccgagactggataacttattaaaaaaaaaaaggtttaatggactcacagttccacgtggatggggagtcctcacaatcatggtagaaagcaaaagacacgtcttacatggcagcagggaagagagagaaatgagaaccaaacaaaaggggtttccccttataaaaccatcagctctcatgcgacttattcactaccatgagaacagtatgggggaaaccacccccatgattcaatgatctaccaggtgcctcccacaacctgtgggaattatgggagctacaattccagatgagatttgggtggggacacagccaaaccacatcactgaggaaactgagttatagggagattagtaacgcccaacacagctggtaggtggtggagccaggcagtctgactctagggtctggactctgaactgcatcatgctgccaagaagttcctcattttttcctctctctaagtttcccttattcccctacagtcattccttcaacagcatttccttcaccatcttttctacttctactatataattaattttttcttcttggtcccaaattccaacgtgcaaatgcagccttatataccctaattcatctttacctttagactttcttccaatgtttctacttcattccattttaaatttatccatgagatgcctatttacaagctgtaaccatcatgaagtgaatgaagaataatacctactactgtacaatagaattccaagagtataaataggagttatggctttctgacttgaaactaaatacttgatacttgattttgctgtctgagatcaatctgaaaagtaataataatcactaacatttgttgagcatcaattgtgggccaagtgtcatttcaatcactctgtacatattaactcatttcatcctacaacaacccggtgaggcaagttctgttattctgttttacagttgaggaaacagaggcatagagagcttaagtagtttgcccagtagatagccagaagaggagccaggatgggtctcgggcagtttaacagcacagctgaagtcttaaccactatgccaacagctttttggtcctacacatcccatgggaagaggaaaataaaaaggtatctatttgtatacctttttatttctgatataagaagcagaattcctttcacatgacctatgtctatttaatacgtcattttgaaacttaccaataaaatttcccaagcgccagaaaactgttagtggctttttccatttctctctatttttttttgtgctactaattttgcttctttccctcagaaggctgccggaatagtaaacattcactgacatgtcataattactggaaaatgggcactggaaaatcacattgtaattaattcaaagcatgttttccaaatgtactactttaaattggagcttatatcataatccaaggaaacctttgtgtgtgtactgttcccacattgctcagcctgggatatccaggagtaattcaccttgcgcctgcctccagaccatcttccatggaagggggtgaccccttgcctcttggcaaccactatttctaagctgccaacattactcttgcattatcaacattctaacttcatgggaagggctgtggtgagtttctggaatgtgaataggaagttgtttttctaaacagcctgacactgaggggaggcagtgagactgtaagcagtctgggttgggcagaaggcagaaaaccagcagagtcacagaggagatggtgagtttatttttttctgcatgggaagtggttgaagtgagttggagtggtatggagtaaagtcaggcaggtaaaggttcagaaagtgaggaacagcgatagccatggagttttatgttgaattgcctattagattttgtgagtacttttaaacttgctgtccactttgaccctcccaacacccttgtgagttgaggttgctatttctattttacaaataaagccatcgtggtttacagaggctgtgttttatctaagcttcactgttaggctacatgatgttgggatctggggcctgtcctctggctccgcagctgctgttcctcctactagaatttataggggctctctgagaatagatcatggtaaacctgtcaccccattttccaagactgtacttctctctgggataaatgatggaataaatggaagactgggtaggtgccctgggacaagcttacaattgaatagtttctcatccccatccctcccatttctttctgtgagcctatgaatcttctgggactgatctggaatatccacatagtttccttttctgccctaagactcaatcttgttaatgactcagtttcttcttctataaaatggatatagtaataatactctatagtttcatcatgaggattaaataagattttgctgaaaagcatccagatctgagcctgacacatagtaagtgattagtaaatgttagccattattgttacaataaaaagaaaattcttaggaatagtggggtttaggattcagggaagatccaaggatagctaggcattttgaactcagcaatgttatatgctcatggataagatgcacgtggttaggctacttctaattcagggaagatccaaggatagctaggcattttgaactcagcaatgttatatgcacctagataaaatgcacatggttaagctacttccaattttcctcagactttccaagagt

SEQ ID NO: 4042 - DNA, 6000 bp, Homo sapiens
aggctgtgggaagagccctacagattggaggagaaattcagaagttcagtttgggatatgtaaaatatgagaggcttattgaacaactaaatttgtttggggatggagatgttgagtaggcatttggctacaggagaatggttctggttgtacagaatttagaattcgttcgcatttaaatggtattcaaagtcaagagtgtgaattggaccaccaagttagtgaggttagacacagaagagcaaagcggtgatctctggagtactccaagggtttggaggttggggagatgagggagaatcaacacatgatacagaagaaatagccagtgaagtaggaggaaaaccaggagctccctggtgaagtaagatgaggatggagaataggctgtttgtgttagtgaagtgtaggaccttggtgagagcagtctcagggaattggtgtggctgaaagcctgattggacaagcttcaagacagaattacagcctgagcaacatagtgagatcctgtctctacaaaaataaaaaataaaaaaattagtcgagggttggggcatgtgcctgtagtcttagctacatgggaggctgagggagaaggggcactagaccctaggattccttgagtgcaatgagctatgatcgcaccactgcactctagcctgagtgacagagcagcattcccatctcttagagaaagagagagagagattgagagaattagaggagaggacttagaaaaaagtaagtctagatacttctttcagggtatagtgggagcactggcactttcacaagtctccctggctccacgtttttccccattttaccatgtcttccaagttcctgccataagttcagcttaatgatcaagagcatggatttggaactgattggcctctgttcaaattcccaaccatgtctcttactagttatgtgactaaggcaactttctttttttaaactttttttaaattatactttaatttctgggatacatgagcagaacgtgcaggtttgttacataggtatacatgtgccatggtggtttgctgcattcatcaacctgtcatctacattaggtatttctcctaatgctgttcctcccctagccccacatcccctgacatgccccagtgtgtgatgttcccctccctgtgtccatgtgttctcattgttcaactcccacttatgagtgagaatgggtaatgtttggttttctgttccagtgttagtttgctgagaatgacggtttccagcttcatccatgtccctgcaaaggacatgaactcatccttttttatggctgtatagtattccatgatgtatatgtgccacatcatctttatccagtttatcattggtgggcatttgggttggttccaactctttgctgttgtgaatagtgcctcaataaacataagtgtgcatgtgtctttatcgtagaatgatttataatcctttgggtatatacccagtaatgggattgctgggtcaaatggtttttctagttatagatccttgagaaatcgccacattgtcttccacaatgattgaactaatttacacttccaccaacactgtaaaaagcattcttatttctccacatcctctccagcatctgttgtttcctgactttttaataatcgccattctaactggcatgagatggcatctcattgtggttttgatttgcatttctctaatgaccagtgatgatgagctttttttcatatgtttgttgactgcataaacttcttcttttgagaagcatctgttcatatccttcactcactttttgatggtgttgtttgttttttcttgtaaatttgtttaagtttcttgtagattttggatattagccctttgtcaggtgaatagattgcaaaaattttctcccattctgtaggtttcctgttcactttgatgatagtttttttttttctactgtgcagaagctctttagtttaattagatcccatttgtcaattttggcttttgttgctgttgcttttggtgttttagtcatgaagtctttgcccatacctacgtcctgaatggtattgcctaggttttctcctagaatttttatggttttaggtcttccatttaagtctttaatccatcttgagttaatttttatataaggtgtaaggaagggatccagtttcagttttctgcatatggctagccagttttcccaacatcatttattaaatggggaatcctttcccaattgcttctttttgtcagctttgtcaaagatcagatggttgtagatgtgtggtgttatttctgatgcctctgttctgttccgttggtccatatatctgtttttgtaccagcaccatgctgttttggttactatagccttgtagtatagtttgaagtcaggtagcatgatgcctccagctttgttctttttgcttaggattgtcttggctatacaagctcttttttggttccatatgaaatttaaagtagtttttttctaattctgtgaaaaaagtcagtagtagcttgatggggatagcactgaatctataaattaccttgggcagtatggtcattttcatgatattgattcttcctacccatgagcatggaatgtttttccattcatttgtgtcctctcttatttccttgagcagtggtttgtagttctccttgaataggtccttcacattccttgtaagttggattcctaggtattttattctctttgtagcaatcgtgaatgggagttcactcatgatttggctctctgtttgtctattattgctgtataggaattcttgtgattttttcacattgattttgtaacctgagactttgctgaagttgctgatcagtttaaggagattttgggctgagacaatgggattttctaaatatacaatcatgtcatctgcaaacagacacaatttgacttcctctcttctatttgaatacactttatttctttctcttgcctgattgccctggccagaacttccaatactatgttgaacaggagtggtgagagaggcatacttgtcttgtgccagtttttaaagggaacgctttcagtttttgcccattcagtatgctattggctgtgggtttgtcataaatagctcttattattttgagatacgttccatcaatacctagtttattgagagtttttagcatgaaggggtgttgaattttatccaaggccttttctgcatctattgagataatcacgtggtttttgtgattggttctgtttacgtaatggattctgtttattgatttgtgtatgttgaaccagccttgcattccagggatgaagccaacttgattgtggttgataagctttttgatgtgctgctggattcagtttgccgtattttattgagtattttcgcaatgatgttcatcagggatattggcctgaaattttctttttttgttgtgtctctgccaggttttagtatcaggatgatgctggcctcataaaatgagtgagggaggagttcctctttttctattctctggaatagtttcagaaggaatggtaccagcacctctttgtacctctggtagaatttggctgtgaatccatctggtcctgggctttttttagttggtaggctattaattgctgccttaatttcagaacttgttattagtctattcagggatttgacttcttcctggtttagtcttgggagggtgtatgtgtccaggaatttatccatttcttctagattttctagtttatttgtgtaaagatgtttatagtaatctctgatggtagtttgtatttctacgggatcagtggtaatatcccctttaccattttttattgtgtctattgattcttctttcttattagtctagctagtggtccatctattttgttaatcttttcaaaatgcagctcctggatttattgattttttgaaggctttttcgtgtctctacctcctatggttctgctctgatcttagttatttcttgtctttcgctagtttttgaatttgtttcttaacctctttgagactctttagaatggggataataatcatatctatagcagagagctgttataaagattaaacaatataataaatatggggcgctgagcttcagagtttttgttgttgttattattattttcctaaaaatgcaaatctgatttgcatttgactcattgactcacatcagtgggtcttcctttttattgtccttcatcatatgggtcctaatttcacatgcagtcttataaaaccatctcattttatagtccaagaatattaaaggtacttgtaggctcccaaacctacacggtgaaaagctagagagcatgggctctcttcaggggttaacttcaggaagtgccactaacaaggacgtccactaggtggtgagcaaggaaagacggaggtgaaggaaccgaaacgagtcaagtccactgcttagctctactgaagttttgcaaacatcataaatatgtctgaaatgcagttttgatttgtagtatttgcaatttccaagggccatttaccacaggtagccaagagttagtttagcatttatgaaaaagataggggagggtggtggaaaagaaggaggaggaggagagagagaaggaggaagaggagaacaagaaccaaacaaaaacaagaacaagaacaagtagaagaagaggagcaggaggaaaaagaagaggaagaagaacagcaacaacaatgagtgaaggaggaggagggtaaggaaagatgcataggagaatggaaggaaggatagaaaggagggaaggaagagagaatctagtcacattactttctgatcagcagttcatttttgtctcagtgggaggcaatagaggccagtctaggaaaggggtggggaaagaggaaagagaagtgcaggaggaaggggagggaaaaggggaggaggaggaggatgtgagactgggttagagaaatgaaagaaagcaaggctttctgttgacattcagtgcagtctacctgcagcacagcacactccctttgggcaaggacctgagacccttgtgctaagtcaagaggctcaatgggctgcagaagaactagagaaggaccaagcaaagccatggtgagcctttcagcctaaaagacgtttagatgctcagatagaaactcttggggttgtagaggcaggtggcaaggataggaatcaccccatttcaattctggttttaaataatatagaaactaaacattttctcagaccctcaaaaaaagtgatcctgaaatctttcttctcagatatgctgatttcctcttcttgactttgtctctggggagactcttgaagaaatactattgaaatcagatcttttgcaataaacactgtgtctacctgagaagtgatatgctttggaagatagaatttttttaaaattatactttaagttctagggtacatgtgcacaacatacaggtttgtcacacatgtatacatgtgccatgttggtgtgctgcacccattaactcgtcatttacattaagtatattttaaggtgtgcaggaaatttgtgactttgtcatttcagttgctcaaaaaggtatttctttttattaaaaaaagaaatacttttctttcctggtgtctggctatctaattttttttttttttaggtatttgaggcattgacccattatgatcaagagtgaggctataacattaaatataagcatcaatagttaattaagcagcaacaatactttaaaaaatatacatagtaaatattaaatagttttatctaatagctcagcagaaaagcaggtataaaaattaccaaaccatagaaaaaattcagggcagtaccgattagcaacttgagactaaagcgtaaaaataaaatagaacaaaacaaaactgtgcatcagttctgatgtaaatttgaagtaatttttcatctatgtctgagaaacctgttacctcagacagggttagtagacatatgtgttttattctgattattaagaa

SEQ ID NO: 4043 - DNA, 6000 bp, Homo sapiens
gtaagggaacagagtgcctcaggaaggcaggaggacaccactgcccctgcttcccggtcacattcaccaaatataacttcactcctcgatagatgcttttgccacgtgtggttgtggccagtgctgctttccactaaacccaataatctcctgtccacagggtggccttggttaaaattctaacatttgtcttggggtccccaatctcttctttctggctatctctctgtctcccactccctttgccataaaagtgagaatgagtgggcctgggcacacagcaaaactggttaaagtctttgatgcctgattaaagggtgtggaggagaggacaagagacttccaggaagagacaataaagccaggaagggtgacacctcagagattaaatagcactggtggcagacaccggggtgtgcctgagtttgcaccgtcttctttcctcttttcattcccatctatgtagcggatgcttcccccatgcgagaaactgccaagagggtccatgtgaggcgaggcttgaaaaccggcaatccggtaacagctagctacatcttcagagcttgggagattcagtggagccttgaagcacctctaatcagcctgtttcttgggggtatattttggattatttgaagagggagatgatattcataatattcaacatgcccaactattcaaatcttacccaatttcctcttcaactccccctgatttgcccccaccctcaaaaaacaagcaattgcctcttatgaaatcctgataggaaaaagcaggtgaagaagctatagtctggttgtaatcccactcccacgcagcgctggcccagggcctctccacgagaggaaagctgggtctgtctatggccccttcagcagcccaggtagccagaggggagcccatcagctcccagtatccatgtacctgatttgcagtgacaacctcgggggcagggacacagaaaatactgtgggagaatgcaggtaattgtaaggatgaatggattttgaataacatacctctggttaaaacaagtacatatattatatacatataaattatatacatacatgtacatattgtaaaccaaaaagtaactgaagcatatctcaacagattagaggtttattttgtcccaggtaaaagaaacacaaatcactgtaggatctgtgacctgcgctttttccaaagagagttttgggaacttccatctttagaggggaaagagcaagcaggaggggaagaaaataaacgaaagatgggttggcaatgagacaagtgtttacattgtggcaaggctctgtaacactcagtgagtctacactttacatgtaaaaagaagggactagagggaaattatgcatggatctcatgctcagtacatctacattttatataagataaagtaagcatgtgaaattacaggtatttgggaacaaaaggaaggcagtttttgcatgactcatttcccaagcttaactttccctttggcatagtgaatttgaggtctcaagattctattcttctttcacagtattttacatatatttatatataatatatataaaaatatctatatttatatataaaatataaaaatatctatatttatatataaaatataaaaatatctatatatataaaatatataaatatatataaataatatatatattccacatatataatatattgtaattatatatatatactctacatatattatatattatatatagtctacatttaagttactgttactcacctatctcttccactcctcatttctcttatccttcgaatattgggatctctccctgaagctttctcaatttagaaataatcagtttagaatttagaataatcagtttgccctttgaccttagagaaaatttgcttttgaatcaggaacttctgggaactgtggcttagggatcaactttacctaggcatggctccacctgccttgcttgttttttcctttgtccactttctccctgcctatgcaccggggatccagggtctgttctcactgcatcctctccctactgctcactgtccctggggtcccttccagcccccatgtctcagaacccaggacacagttatctcagtggagagctgtgatggtcaaggatgtctcaggaagaagagggcaagaagagtacaggaaacttgggtagaacaaggaatctcggggcataacaacaaaagaaatcatggtttggagtagcaggtaagggagtgggctctggatatcaactgcctggtttcaacccttagctctgtgcttttgaatgagataaaatccccagattctcaatttcctcatctgtaaaatggggataataggagtacctatttcataggctgttgtacggattgaataatcaataggtgaacatacaaaatgctcagaatatggcctggcacatagtaagcactcaataaatgttagagattataattgggggtccaggacatatatatgtaagtaaaatagaaacttcatcaccactggggctatttttagatatctttgaactaattttaaaaaggggaagagataaactataaacttagttatgaaaaattcgcaataataaagttagttatctagggatgttaacgactaatttctattagcaatataattattaggtactttattgatatcgaagataaattgttttttaagatttggctactctatacatttgaccatgctttttaaaaatagcagattatgtattcatactttattaaaaataaaatacatacagataatgtattaacccaacttgacattctgccctaaaatctaaataaacactatatgagtgattactcttctgaatttattgaagcaacaaccacattgagctaagtaaagtgggataaagaattggaataatgtcagtatctggatcatgtaagagagtggtaaggtggagggaataaattctatgctttttgataggggttgaattaaattcgttaattaagttatttttttctaatcagttgtcttttttggaatttttcttctcttttcttgttttttttttgggtcttgacatctttatgaacacagaaagaccagtgctaacaagtaaagagaaaaacgaggcttttaccactactcgttcaggtctgctgacagtacatttttagatagacctcctattttgaaaggctgtagatatagaatattagcttgacttgagctctgaaaacctacagaatatggaaattaaaatgatccccatttactgttaccatcatttagatagggtaagatgcagagatggggaatgtatacaatcacccagaagaaatgtcaaaatgaagagcaggaatataggataccacatacatctccttctgttgcatttggaaacaaatttcttttcttttctttttctttttttctttttttttgagatggagtcttgctctgtcgcccaggctggagtgcaatggtgtgatttcagctcactgcaacctctgcctcctgggttcaagcgattctcttgcatcaggctccccagtagctgggattacaggcatgcgccactacaccccggctaatttttgtatttttagtagagacagggtttcaccatattggccacgctggtctggaactcctgacctcaggtgatccacccacctcagcctcccaaagtgctgggattacaggcatgagccatcatgcctggcctagagacaagtttctttaaactgtattcttgttactataaaggtgaaaaaaagggaaattgaaaaaaactttaaaatcctgaaaataataatgaaggatataaaaattatcccaaatcctgccatccagagttagtcactgttaacattgtggaagaatttttattctttgcacattaacatttcaaaaattttaaacaaaattttgaccaattaaatatatatatatagttttccgttttattttttttcttttcttttctttttttttttttttttttaagacagagtttcactcgtttcccaggctggagtgcactggcgtgatcttggctcactgcaacctccacttcccgggttcaagcgattctcctgcctcagcctcccgagtagctgggattacaggcatgcgccaccatgcccagctaattttgtatttttagtagagatggcgtttctccatgttggtcaggctggtcttgaactcccggcctcaggtgatccgcctgcctcggcctcccaaagtggtgggattacaggcgtgagccactgtgcctggcctcctttttatttttttcactgaacaaaccatgaaactttcccagatgtaaatatctatttcccatttttctttttttaaaataaggcattattttaaccatttgagtgttagatattatttttagataatattttaatttaggcataactgccgtgcaaaatctgaagattaatatctaccttgtgagtcattcctctgtgagacagtgcatgttaaatatgttgaattggcaggtgaaaaaggaagaaaaaatgagtagtgattggttatccacagctatgaatgagaaattgaaggtagtagactatggatgacaaacctattcttggtttccttctgtttctgaaattctaattactaccacaactacatgagagacactactaacaagcaaagttttacaactttttaaagacatagactttatgttattataattaaaaatcatgcatttttgtcatattaataaaattgcatatacgatataaaggcatggacaaaggtgaagtagcttcaagagacagagtttctgacatcattgtaattttaagcatcgtggatattcccgggaaagtttttggatgccattggggatttcctctttactggatgtggacaatatcctcctattattcacaggaagcaatccctcctataaaagggcctcagccgaagtagtgttcagctgttcttggctgacttcacatcaaaactcctatactgacctgagacagaggcagcagtgatacccacctgagagatcctgtgtttgaacaactgcttcccaaaacggtaagtgcagaacgctttataagggcagcctcgggccatgaaacacagatatgcaaaaggccttctaataaaaaccacatctgtacaagctcttattgtattgtagctaaaacctgtcttttctctttgacctaaataatgaaagtcttaaaatttgtttatttatttgattaaactctgaaataaagattattgcactagtgtcctttgcccaaaatcttaggatgctgccttaaacatcatggtagaataatgtaactagctacccacgatttccttctttaattcattttgtgttttatctccccaggaaagtatttcaagcctaaacctttgggtgaaaagaactcttgaagtcatgattgcttcacagtttctctcagctctcactttgggtaagtcagtgccattagaccaagatttctcattctcgcactatagatatttcagactgaaatatccttgcttgtctggggctgtcctgcacaggatatctggcagcatccttgacctctacctgcaatgtgttcttccctgggcttggggtcatttactttacctcttggtgtctccctttccttaagtgtaaagtgtggatcataatgacctatttcccagatgcattgtgaggattcaatagcatggttcatggaaagtacctcatacagtgcttcttggtgcatactaagtgctcaataaagcttagttattctgattattattctactacaaaatgggtatactataatgttgtgagtgagtgtggataaggtacctagtgggtggcagtcacaaaagagataaacaataagtcgctgtttcttcatacgtacttcttacttttgaaaagatgagaaaagtctgggccatgtcacaaacattgccaaaaataagacaataaaaagcacagttgtcagagttaa

SEQ ID NO: 4044 - DNA, 6000 bp, Homo sapiens
agcaaataatgatgaaaaataaacttttccctttgtttttaatttcaggaaaaaatgatgaggaccaaaatcaatgaataaggaaaacagctcagaaaaaagatgtttccaaattggtaattaagtatttgttccttgggaagagacctccatgtgagcttgatgggaaaatgggaaaaacgtcaaaagcatgatctgatcagatcccaaagtggattattattttaaaaaccagatggcatcactctggggaggcaagttcaggaaggtcatgttagcaaaggacataacaataacagcaaaatcaaaattccgcaaatgcaggaggaaaatggggactgggaaagctttcataacagtgattaggcagttgaccatgttcgcaacacctccccgtctataccagggaacacaaaaattgactgggctaagcctggactttcaagggaaatatgaaaaactgagagcaaaacaaaagacatggttaaaaggcaaccagaacattgtgagccttcaaagcagcagtgcccctcagcagggaccctgaggcatttgcctttaggaaggccagttttcttaaggaatcttaagaaactcttgaaagatcatgaattttaaccattttaagtataaaacaaatatgcgatgcataatcagtttagacatgggtcccaattttataaagtcaggcatacaaggataacgtgtcccagctccggataggtcagaaatcattagaaatcactgtgtccccatcctaactttttcagaatgatctgtcatagccctcacacacaggcccgatgtgtctgacctacaaccacatctacaacccaagtgcctcaaccattgttaacgtgtcatctcagtaggtcccattacaaatgccacctcccctgtgcagcccatcccgctccacaggaagtctccccactctagacttctgcatcacgatgttacagccagaagctccgtgagggtgagggtctgtgtcttacacctacctgtatgctctacacctgagctcactgcaacctctgcctcccaggttcaagcaattctcctgtctcagcctcccgcgtagctgggactacaggcgcacgcccggctaatttttgtattgttagtagagatggggtttcaccatattagcccggctggtcttgaactcctgacctcaggtgatccacccacctcagcctcctaaagtgctgggattacaggcatgagtcaccgcgcccggccaagggtcagtgtttaataaggaataacttgaatggtttactaaaccaacagggaaacagacaaaagctgtgataatttcagggattcttgggatggggaatggtgccatgagctgcctgcctagtcccagaccactggtcctcatcactttcttccctcatcctcattttcaggctaagttaccattttattcaccatgcttttgtggtaagcctccacatcgttactgaaataagagtatacataaactagttccatttggggccatctgtgtgtgtgtataggggaggagggcataccccagagactccttgaagcccccggcagaggtttcctctccagctgggggagccctgcaagcacccggggtcctgggtgtcctgagcaacctgccagcccgtgccactggttgttttgttatcactctctagggacctgttgctttctatttctgtgtgactcgttcattcatccaggcattcattgacaatttattgagtacttatatctgccagacaccagagacaaaatggtgagcaaagcagtcactgccctaccttcgtggaggtgacagtttctcatggaagacgtgcagaagaaaattaatagccagccaacttaaacccagtgctgaaagaaaggaaataaacaccatcttgaagaattgtgcgcagcatcccttaacaaggccacctccctagcgccccctgctgcctccatcgtgcccggaggcccccaagcccgagtcttccaagcctcctcctccatcagtcacagcgctgcagctggcctgcctcgcttcccgtgaatcgtcctggtgcatctgagctggagactccttggctccaggctccagaaaggaaatggagagggaaactagtctaacggagaatctggaggggacagtgtttcctcagagggaaaggggcctccacgtccaggagaattccaggaggtggggactgcagggagtggggacgctggggctgagcgggtgctgaaaggcaggaaggtgaaaagggcaaggctgaagctgcccagatgttcagtgttgttcacggggctgggagttttccgttgcttcctgtgagcctttttatcttttctctgcttggaggagaagaagtctatttcatgaagggatgcagtttcataaagtcagctgttaaaattccagggtgtgcatgggttttccttcacgaaggcctttatttaatgggaatataggaagcgagctcatttcctaggccgttaattcacggaagaagtgactggagtcttttctttcatgtcttctgggcaactactcagccctgtggtggacttggcttatgcaagacggtcgaaaaccttggaatcaggagactcggttttctttctggttctgccattggttggctgtgcgaccgtgggcaagtgtctctccttccctgggccatagtcttctctgctataaagacccttgcagctctcgtgttctgtgaacacttccctgtgattctctgtgaggggggatgttgagaggggaaggaggcagagctggagcagctgagccacaggggaggtggagggggacaggaaggcaggcagaagctgggtgctccatcagtcctcactgatcacgtcagactccaggaccgagagccacaatgcttcaggaaagctcaatgaacccaacagccacattttccttccctaagcatagacaatggcatttgccaataaccaaaaagaatgcagagactaactggtggtagcttttgcctggcattcaaaaactgggccagagcaagtggaaaatgccagagattgttaaacttttcaccctgaccagcaccccacgcagctcagcagtgactgctgacagcacggagtgacctgcagcgcaggggaggagaagaaaaagagagggatagtgtatgagcaagaaagacagattcattcaagggcagtgggaattgaccacagggattatagtccacgtgatcctgggttctaggaggcagggctatattgtggggggaaaaaatcagttcaagggaagtcgggagacctgatttctaatactatatttttcctttacaagctgagtaattctgagcaagtcacaaggtagtaactgaggctgtaagattacttagtttctccttattaggaactctttttctctgtggagttagcagcacaagggcaatcccgtttcttttaacaggaagaaaacattcctaagagtaaagccaaacagattcaagcctaggtcttgctgactatatgattggttttttgaaaaatcatttcagcgatgtttactatctgattcagaaaatgagactagtaccctttggtcagctgtaaacaaacacccatttgtaaatgtctcaagttcaggcttaactgcagaaccaatcaaataagaatagaatctttagagcaaactgtgtttctccactctggaggtgagtctgccagggcagtttggaaatatttacttcacaagtattgacactgttgttggtattaacaacataaagttgctcaaaggcaatcattatttcaagtggcttaaagttacttctgacagttttggtatatttattggctattgccatttgctttttgttttttctctttgggtttattaatgtaaagcagggattattaacctacagtccagaaagcctgtgaatttgaatgaggaaaaaattacatttttgtttttaccaccttctaactaaatttaacattttattccattgcgaatagagccataaactcaaagtggtaataacagtacctgtgattttgtcattaccaatagaaatcacagacattttatactatattacagttgttgcagatacgttgtaagtgaaatatttatactcaaaactactttgaaattagacctcctgctggatcttgtttttaacatattaataaaacatgtttaaaattttgatattttgataatcatatttcattatcatttgtttcctttgtaatctatattttatatatttgaaaacatctttctgagaagagttccccagatttcaccaatgaggttcttggcatgcacacacacagagtaagaactgatttagaggctaacattgacattggtgcctgagatgcaagactgaaattagaaagttctcccaaagatacacagttgttttaaagctaggggtgaggggggaaatctgccgcttctataggaatgctctccctggagcctggtagggtgctgtccttgtgttctggctggctgttatttttctctgtccctgctacgtcttaaaggacttgtttggatctccagttcctagcatagtgcctggcacagtgcaggttctcaatgagtttgcagagtgaatggaaatataaactagaaatatatccttgttgaaatcagcacaccagtagtcctggtgtaagtgtgtgtacgtgtgtgtgtgtgtgtgtgtgtgtgtaaaaccaggtggagatataggaactattattggggtatgggtgcataaattgggatgttctttttaaaaagaaactccaaacagacttctggaaggttattttctaagaatcttgctggcagcgtgaaggcaacccccctgtgcacagccccacccagcctcacgtggccacctctgtcttcccccatgaagggctggctccccagtatatataaacctctctggagctcgggcatgagccagcaaggccacccatccaggcacctctcagcacagcagagctttccagaggaagcctcaccaagcctctgcaatgaggttcttctgtgcacgttgctgcagctttgggcctgagatgccagctgtccagctgctgcttctggcctgcctggtgtgggatgtgggggccaggacagctcagctcaggaaggccaatgaccagagtggccgatgccagtataccttcagtgtggccagtcccaatgaatccagctgcccagagcagagccaggccatgtcagtcatccataacttacagagagacagcagcacccaacgcttagacctggaggccaccaaagctcgactcagctccctggagagcctcctccaccaattgaccttggaccaggctgccaggccccaggagacccaggaggggctgcagagggagctgggcaccctgaggcgggagcgggaccagctggaaacccaaaccagagagttggagactgcctacagcaacctcctccgagacaagtcagttctggaggaagagaagaagcgactaaggcaagaaaatgagaatctggccaggaggttggaaagcagcagccaggaggtagcaaggctgagaaggggccagtgtccccagacccgagacactgctcgggctgtgccaccaggctccagagaaggtaagaatgcagagtggggggactctgagttcagcaggtgatatggctcgtagtgacctgctacaggcgctccaggcctccctgcctgccctttctcctagagactgcacagctagcacaagacagatgaattaaggaaagcacagcgatcaccttcaagtattactagtaatttagctcctgagagcttcatttagattagtggttcagagttcttgtgcccctccatgtcagttttcacagtccatagcaaaaggagaaataaaaggaccgggtgagatgtgtctgcatatgagcagtagaaagttgtcaattgtcccttttgaaaaactatccttttttgaacctttgctcagattgttatt

SEQ ID NO: 4045 - DNA, 6000 bp, Homo sapiens
ttaactacatgatatctgtatacttcttctccaaactaattgagttacatgcttacaagagtcaatttgcatttgtactccaaagtatttatgcctattatacttatagaatatatttaaatatgtaaactaatgaaatacaaatagaaagttattttctataaaaactaaattgataaacatgaacaacaaacaaaaattactatagaactaggcacaggtaagacaaacctgtaaaactttggagaaaaaattgtacaaaaatctagactgactgggcattcaaattgcttgaaaggtgtctttaacttcttattccactttgaagaaaatgaaactgtaaactgtaaacaatgcaacttgtaacaaagacaaagcaggtgttccaaccagcaaattcatgctcagataaaaggtcttgggcctactaccaagactggtgagtgaacatatacatttgagtcaaaataaaatgactaaagtatatatttgccatttttaaatatgtaccactgtaactgactttttaaattaactggtccagtggtcccaattttaggggaagagagtgcctctaccattgttttaattgaaaaactgatatacatggtaaagatattccaatagtacaaaacactacacatcaagaaagtttcccttctgtattagtcttctagggctgctataatgaaataccatggactaggtggcttaactacagaaatttattttctcacagtcctagaggctaaaagtccaggatcaaggagtcatcagggttggcttatggtgtggcctctctttctggactgcaaatggccatcttctgtgttctcatatggcctcttctctgtgcccatgcactcagacactagccctacaggattagggttttgcctttttgatttcatttaaccttaattattgtcctaaaggccctatctccaaatctagtcacactggaagttaagacttcaacatatgaattttgaggggacataattcagtccataacactttccatgccagattcacagtcctcctggtgtgtgtgtgtgtgtgtgtgtgtgtgtgtgtgtgatgctcaaatggaagtagagtctacacactattttgcaccttacttttctcaccttatagcatcatagaggtattccatgtcagcacatatagatctatctagttcattttaatggctgcatactattctattgaatggctagactatgactcatttcagcaatttcctattgctgaacatttagagttttttttttcactctgttacaaaaatcctgtaacagatatttttatagaatacttttatatacaacctgtatacccatgggataaattttagaagtaaaattattagatcaaaaagaacttcatataaaattttgatacatataattaccatgaaatttttaaaaatgcaccaatttttatactcttactgtttaagaatgcttgttcctcccacgctgctcccataccacacatacacacacccaatattgtagtatcaaattttttttatttttgctattgagctaacacaaaagatcaaactgtcaaatcaggctcaaatcagagattttactcagtatcaagctttactaatagtttcaaggataccagtaatccccaggtcctttcttcttgctttggatgcatcctggcccaggacagtagatgtggtttctaaatcaagtgtacagtcaccccacttacacagaaggagccaaatcagttacaaaacacttccattttatgctacgttacataacttccgcggtattttccagttaatcatacccctgaaatccgcattgattcttttttgttttgtgagagggagtctcattctgttgaccaggatggagggcggtggcgcgatctctgctcactgcaacctccgcatctccagtgcaagctattcttctgcctcagcctcctgagtagctggtgttacaagtgtacaccaccacactcagctaatttttgtagttttggtagagacggggttttgccatgttggccaggctggtaactcctgacctcaagtgatccacctgcctcagcctcccaaagtgctggaattaccacatcgattcttaatgtgtttaccataaacaatcccagccctgggacatcctgttagaggaattccgtaaatatggactctcttgctagcaaatgccattagtttgtttgccaggaggtctgtaattagtatatactttatattttataaaaatcacatgcttttttgcttgctttaaccttgctttcctgagagtatttccctacgaagggagagactggattgcagatcttctgctcaactccttctttctcagtcactgatagatgaaaaatggtatttccttgttcacttttacattttaagtaatgttgaacatttagcaacaaaatattgaaagctagaagggagatgaatcaagatgcaattgccttagcagacttgaaaagtaggaatcccaagcaggccatgaagcaacctgatacacacagtgaaaccctgtataaggctcaggaattggaaacaccacgtaaagctgaagagagcatgatgtgagctataaatacaggcggaatggtataaagtctgtttaagaatgaatcagatgctgagattccctttgctatcccatcaaaaacccagagatttagtcctgaaagacagcaaaacgctgattctctagctaggaggacagcaggccctcttaaggatgaaggtgtcatgttgaaaaaggggaaaagaaaattagaggactaacatctgaataactgaagctcactaaaaagaaaatggaggaaataagtaactcaagttgcttggagttctgactctaagctcagtgctattataatcttttaggcttactggtatatttgattcatgttaactgtaaaatgacattttctaagtttcacaaatattggggttagtcaaagggactttgttcaggtgattaagggtggggcttgcattacccctctcctaagcgatcattccaaaatgactggcaggactaaagaattatgtttaaaaaacaaaaaaacccaaagaatggattatctgtaaaagctatgcaatgacgtgcctgttagagctcactgaccacaccttaagttgtctaagagatgaggctataactagctaaactctaattggctaaggcaccaaagccagaaaatagcccataacatgcaaatatacagacataaaatcaactgtaagtgctgggcacagctgctcatgcctgtaatcccagctacttgggaggcagaggcaggaagatcactttagctcaggagttcagagctgctgtgcgctatgattgtgtcactgcactccagcctgggggaagaagtgagacttcatctcaaaaaaaaaaaaaagatcagctgtagaagaaaaaataatgtcagggttacctgtggagtctgggggtagacccactatcacacctagacagggatacaaaccatgagaggcttctcttctaagtgggccgtttcagtccaagttgctgacttggacagcaacttggactgaataaacacaggcaactgagtttagcattaagctttcagaaccttcaactgacaactcaacggctgtttctaaatctcagaacatttaaatcagaatctaggtagcacgtgggcacctacgtagttttaaaagctttccaagtgattcaactccaagtgaatcagagtggagcatcgttgccttagtcatggcatctttcaaattcgttagtacatttttacataaaaataaacatcaaacaaaagaagaacaactttttggtaagagggtgtctattctttcctttcctttagtgtccgcagatctttcctcctgctgttttcttgtctactcttgttcttgaacaccccctcttatttttatgtctttagaaagtgcctggcacagtatttcagacagttaaaatactgtatcaacaaaggacccatagatactgtattaattttaaaagatgtgtagtgaatatgattcaatgagtaaaataatccagctggggcgtgggaggaacggataataaaacaaataagagaacggaaaaacaaaattaggaattgtttctggtagacagctactgcgggcgtggagatctaaacatgataccaaattgggcggagggggagggagtgaggaaggaatgggcagagtggcggaatggcctggcgagggcgatttcctgaaggctttcaggttacaactaagggataccgggaaaagaacaccgagccctcgtcccgtatctatctaaactagccgtgttaactttaagtcaatctcctctctgaaccagatattcctcctatctaaagggaggagcctggccttaacatctctttccaagtctagctctaattctgtaaacaggggatcaaacagatctcctttcttcagaaaaggccccagacgaacccgaagcaggtcctcgagctgcgagccactctccacttgccactcaacgtagtcagccagagggacggatgtgccaccaagcaccaccttctttctaacgcctcatcaccccagccacgcactccggcgcggcgcccagtcccgagcggttctcggaagtttcccactcctcccctaatcgccctccacgcacgccggatcacgaccggaacgtggacaaccagtggttgttcctcccctaaagcacagcataaatttggagagatgcatctaaactgcgtgtgggttcgggctcttttaggtgaatagggctcggcggatcgacttcctcgattatctccgtgccctggacccgccccctccgcctggcgccaggccgccgagcgccgatcggctcgatgagcggaggcgctgctgcggcgctgcggccgacgccgggtccgcaccaactgtctccccctcccagcttcttacctcggcttcctactccttcccccgcccgcccagcaccgccagcccgggagagctgccgggagttccccgggagcctcaggtactggcgctggcctgttcgcagcgggaggggctggtgtgaggaggaaggaaacgaagaagacgcccctgccttgccgccccccgacgtcctagtcgggctggtcggcgggcctcggggatctaggaagggaccccggagtgggaaaaggttggggccgggggtgccgtgaggaaggaagacgaggacaggggtatgcggacgaggagcagttgagggagagaagaattggaattgaggggtactctggggtgatgggaagagaacagtaccatggatggggaaggtttgttaagagtgggatgtagtgaggaattccagggggtacaatggggcaggaagggccagcgttaggagcagatatatcgtgggacgtggcctggtgtgacagattgggtgtggggggtgaacggagctgcctgaaattgtgtatttaaagggcccgggggaaagagcgccaaccctgctgtgtttataatgaccggaaggtgggggtgaatcgttacacttgacaggttttgcaaataatatctccggtctgtgtccatccaagtcactttatttctgtgaaactgcatcaagcaagaaggctgatgacagacaaggaagacgaatcagaaagagaatggaggctgggaaaaggagagcctttgcccagattcaaagctattgactagataacgtactacttacaaaaacgcacacatagacatttaagtatatgctgatgtataagaagcatacggtgatgtgactcatttgagtgaattgtatagtggtggtctatcctcaatgtggaagtacatgatggctctcttatttacatgtatacctagtcacaaacagctgaattcacatgtctttttttgtaggagaaatcttaggcagactatatcctagtctactttctgagcatgatttatttctactagttgtttgatacacatatcagtta

SEQ ID NO: 4046 - DNA, 6000 bp, Homo sapiens
cactgtagcctgtgtgcttgctccacagtgacaccgagggtcacctggcagccggtcatggtggaggggaaatgaggagtttttaatgtaaaattccacaggtgtagggagttgtaggtgggagacataagcaatcctttgggggaggcagtagagactccagattggttccagtcacaggctgataggcattccctggaagtcttggggcagattcctccatactaatttttagtttcctgttttgttgattctaaccttatgcctgtattcttagttctagtggactgggaccctaaggcacttgagacatagtgaggggggtggggccattcatttcatttaacaaatatttattgaacattgatggtgtaccaagcacagggctgtgctaaggagatgggacatgtattcatattctatgtcattctagaactgctgttggtttcatttcaacaaaaattttttagtaccttagataaaacatctggaacttgaaacaaaattggcaaattcatattcttcttggatgaagtcagaaaagtcgcagaggtatgaggatatctaagtaattaaaacaagagaacgttagaaccgcagtcccatgtttgaagagccaggcccttggttgtttctgagagaatacaagggacaccacagggagctatcttccactccagttctggagcactcaggccattggggagctcccaaaagatggatttgccctcctatgtcactttggcttttctgtcccttttgttttgcactaaccaattttggattgtcagacactgtacaaacaaggcaggataaagattgttcacaacagtagatgtgtaatgagcgaaatgaatcccaggtttcctctttgaaagggtctgcactcaagtttttgatgtttaacctgcacctgtcccctttcgtacctgggctgacttcttggagtttgtgtccttgcaccctgaaacaatccacctgtttcctcccacagaatgtcttctcccttcacccattcttttcctttggaacattttttctttctagttagcagttgaagcagtgatgttgcaagaacaccagttccttttacagggtgacctgcctgcgctctgtctcacttggcactgtggttcatttcattacagtgtaaggggccaaggcctgcaggggcctgataatcataaactgtgtgtgttgcaccattcatgcccctggcatccaagaaatagaaactcagaatgctggcagttttgccgggaacacacctcctctctaatgagggaagatttcattgtccattgtttatttaaaacaaaggcatgtgaaaggagtttgatgctcatgagacatttcttgcttcatttctcctcacacttccctgggccctgtaagaccagagatggtgggtctgacatgagtgccctcggggtctttgtctttgatatgggaataggctctcttggacttgtcacccaaatgctgaccagcagagaccaggaggccagtttagaactccttcagcatacaataatcttatataaacatgaccttagtgtgacttgaagggctttggagactgacgatgagtgtggctttgaaattgtcaggcctacctgagagagtccttgaaggaagtgggtcagtacaggcacttcttattacagcccagcctcacctcctccaaccctgtaggtgtgtttccattgcgcacacttggaattactctgagcatatttggctaaatgttcctttatcttttttcagactgttctgcattagaactctttgctcaagggtatgtaatgcttaaggcacattgagaactttctcccaaagtctcagtaaggggctttgccaaaaataaacagcttggaacccggagctttggcccacatgaggagcttttaatccttaagatcttttgatacttaaaccatcctttcaaaagacttttcattcccgtcttgtcctcctgagagctcagggcacctcaaaggtgctgttcggtcacctttgttgtgaggtaggtatattacatttttctaaacaagaattaagattgctaccccaatcctcccagaatagcgatgagtagagcttcactgcctgcctaaggtaatttctccttgtgcctagcttaggtttggctggctggaggaaaaactgcccactccctttccagttggctgtcaacagactgtctgctctgaccctccaggacctggctatgaaagtgaacaggtgctgccgatgcccagttgtattctaggcctacccttctccctgatctccaccctctgccaaaggcttgtgtaattagagaccaagggagctgggggcaagagagccatgcacaaggatactttgctcttcgctgctggggcaggtctaatgggcatgggggtagtatgggatggtgggatattaccctattagatcaaacactagcaatttcacataaaacatccagatttctagtactgttagaagacccagtggatctggcctctggactcacatgcctgcaggtaacactgctggcgtgggggtgggctgaagcggggaggtgatttcccattcattgcagtcctgtttggccagctttactcattatgcccctcatctgactgtcatgggcctgtgagtttgtgtcccaccctcaattaaaatatgctagactgtccttactcgtgctgatccatgcagtgttaacaactcttaataagcactctatcacttagtacttttgtttcttaaataggcctttgagtttattgaacctctgataatctgctttcgttatattcaaaattatgtaaaaataacacaactgaataacgagcacttgaaagcacttgtgaattttgttctgaaaatactaaaaccgtctacctatttactgagaatgagatttttttttaatgtacagtagacaaagcaaaggtacatgttactaaagtggggatgtggagacagtgatgggaatttgcttatgaagtcacttatccatgggcaggagggtacatggtagttatcaacaggaggagaaactctttttggggagtctggcttttctaacgagctgtttcgaatgccaaggagtcattcctttttagtctgtcgtgtgcctttggaatggcctctatgcctgccctttctctttctctctgccctctttctggtttctctcattcaccccaacactacctcacacctacccttctgtccatgtccccttcccagagtggggtttatcactacacttaggaaccatttcatcaaaaatggagaagggacacggtaacccaattatttcaagagacagttgaaatgctccctagatatgtaattcctgcaattttgaaaaatagatttatgtgtcatatagtagtttgtttggaaggagtaggactaacaggaatgtaggagggtgcctcaaagttacatacagagttactattctataaagatgggaacttactgttctagacttttgatggtaaaaatgtgaaaatttcagactacagcagtggagaaaatgtggggtgagaaagaggatggaagtgttttgagagacagtgtctaggggaaaaattatcttatactgttgagtggtagtggtggagagggaaaaattttgagatctcatctcctctagccaggcctatactcagtgatcatttttttctgagaaacccggattatttctatttttaaagcacttgacttgagtttctcaatggatcaaatgtgccctctgataattgtccccatcccttaagaagaaatcatcttctgtgagatgtttcgtaaaacttttgccctcggtggctgagaggttaccttctgggaaggctgagcactaatggcttgtttacaaggctggcctcactaagccaaggaatcttgtcaaattttggaacagaagcctagagggaaatagagaacattttacagaatatatcacacttaaacattgctatcattacgatggccaaagtcagctaatagcagccatatagtgaacactttacaaaccatttttatatttaactctttaaccatcctataaagtagccaagtgcaaataatgtcatctccattttactgatgaagaaatcaaagctcaggtagtgtgatttgccttgagtcactgagctagtaaatgggtcatgttttctgacttttatttccactgtatcctgtgttttactacatccctttgtttctttattacttccttctgtttatatatcctttaatatttccatgaactcagtttaattagcaatcttgtcctcacttcttttaggaggtaaagaggaaaaaaaccaagctttgaagctatagacaactggatattgatctctgttcatctacttcccaggtgcctgtctttggacaaatacaacttatctgagccttagatttgtcctctttgaggggggagatgatataatcagtgtaaaggtcaatgcaccaaaaaagagagtttcatgagagcagcaatttttgtgtgtttcattcacggctgtatcatgagcaccccaagcatggcttgttacatgcaggcattcaatcagtatctgtggaatgaacgcatggatgcacgggaagtcccagctgagggcctgacttaataaaggagcgcaacaaaagcggccattatctctcacctactggcccagcctctttccttgtcctctcttgccttacccagtccttcagatggcacatcccatctttcaataggggattgctggggatttgccttcctaggctcagagcattcgggtttgggccagtctccaggagaggagaccggaggtccttcgagcagccaggagggggcagcagtcacgtcgcgatggttccagccggggaagggtgccctcgctaaggagattgcggcggacccggaagtgcttggccacagtcgcagccccggcgccccgaagcgggaaaaaggctgggtgccgccgtcccccagctgcgcaaccctaggaactctcgggtaggtgggttccgtgtaacggtcagtgtttccggggctccttttcctctgctgcctcccgcagacccaaggctgagtgaggggcggcggcggaagtgggaggcccacccaaaaagccaaatggggtgccagaagagtgaaggcgcaccctggggtcaccctaccctaccccgtcccctcccagccccactctgcgggcgggcgctgcccttttgggcgtcgcagaccctccaaccccggcggcggccttaagattcccgggctgggatccctgctgcagagggggtaacggtgtctggcttgccaagcaatatttgttgtggtctatcatggaagaaataaagtcgggcaatatgaattttttttttctcaaatttgccggatggctgtggtgtttctgactcttagttttctcattgtgaaaaaggaatgattatcttcttcgatcctctcaagagtttccttgttttgagtagattgatagctctttaaaggatgctaagctcagctaatggaagaagagtctagtttctttgaggctttgattttggttaaactatagagctcatacctttctgtatggtgcagcttactattgtctttggattggtaacttaaaaaatacaaataacatgcctttgagaaccaataaaaactatggatattatccctataaatttacacaaatccagatataagcatgcaatgtgatatacctaagggatatgtgaaccactgagttaagaactgctttagagggagatacaatgtgagacacaggctttgggataagactttggtttgaatcctggctctgctctgttaccttagggcaaagttacttaagcatcttgaatctcagcttttttaccaaagcaggactaatactaacttacaaggtggtgaggattaagtgaaagaagatacataaggcacttagcacatagtaggtactcaataagcgatagctaacagatgtctat

SEQ ID NO: 4047 - DNA, 6000 bp, Homo sapiens
gaataaagaaaaattagaaattttcttcattcatcccctcagactcacacatctatcactttcacctatattttcttctctgtatcttatacaacgttgaacttccttctgcatactgcaagtatctgtttgcctaagctacaaaacatgtcagagaatggtggtcccacagggtcctgagctctctttctagaataaaataaccaagagaaccactgagagcctaaatctattgctacccaactgctgagttatttacttttgtgatttctagaggcagagacccactgaacttgtcccaagtgacaacatactgaaatgttaaaatagcataagggagtgggtaaatagagggagaggttgaacaaaggattgctaatttcaatggaaagaaagttaaaatttccaaaatctgtaaaagagagaggaaagaggtgatggcagataagaagacaacttgaaaaagaaaacttgcttgtactttcttctcctataaagtctgaagccgtgtaaaaaattttaaagaggcagaatatacattaagaattgccacaagtgtatagtttaattcttgcctatatatgcatcaatgtaaccattactcactttatttccagcactgcaggaagcatgttcgtgaacgttctcagtcaaaaccctccactccccagagataattatattctgacttccatcaccaaagattaatgttacttgctcttgaactttgtaaatataggatcttagagtatacactcttttgtgtcttgatcctttcactcatcattttgtctctgagatttatccatgtagttgtatgttttattgcggtgcaccactctattacatgactacatggcatttattcattctgttcttgatagatatttgggatgtttctggggttttttggctattataagtaaacttgttataaatgtttttgtgcttgtcttttggtggatgtatgcaatcatttcctctgggaaaacaccaaggactatacattacttaatttgctttgactactacactggagaaaatctcatgaagatgactctgaagcctattatcttgccaaaataattgaataaggtgatagtggcaaaggctatcgctactgagtgccaactaaatgcctaaaatgtgtcacattgtttacatacataatctcatttcctcctcacaaccacccccaaaactatgtattattcctgttttgcaaataagaatattgaatttaagactttgtattaggaaatagctcttgctttcctgagtgtatgtgtatgtatatgtgtagatgttgggggagatgtaaataaatgcccagggaatggagctaaaagaagggaagtgatggaagttctcactgcataggtgcagctgcagattagcttggagagatgggacaatctgaagaataaagagtgttgcacttcaggtggacagaatgttatgggaggagtgaaaataggaaatagattttaatttgattgagagatgtgtgtgtctgtgtgcacatgtgtggtgggaggatagagatatagtgcagtgagcaaactatctaaaaaacagtgtgagattagaagagttttaaaatttctaaaccatgggttttcagctttatcatgtagaaaaagaaaaactagaatgacataatgaaagttagatttcatgaagatcaacctggtagttgtgtacagaatgcgttgctaggaggaaaaggaatcaaaatctattttaatagtcaaggaaagaggccattggtgcttaaatacaggaaggtgtatctcaggagaaaagtgaagattggagataacagcgcttgctgttttacagtgttttaaagaatagaaattttctgagaatgaataaatgccatgtagtcatgtaatggactagtacacagcaatacaatattgaactacatggataaatctcacagacataatgatgagtgaaaatattaagacacaaaaaagcatatactctaagattctatatttataaaattcaagagcaagtaacattactctttggtgatgaaagtcagaaacattttctgtgaccagcaggggtgagcggagatgattggccccttttgttgatggggaactaaagacaagaatggtccaagcttatctccaaataagaatattatgaagttaagtcttgaatccagttctattatttcactatatcattatgcctctacacaaaggtgatgattgagatgcataacattttcccccatctcctctaaatgtaaaacatcatgcattagagatggcctggtttccatgtacttcaacctttacccacatctctaggtatttaattccctaagaaagggccatgtgacattatttccatttttacaggaatcaagtactctggaataatatattctcttttaaaaaattctactgtttcttttgtttggttttgtttagagaggtctagaaagacttgagataccaactaccaactatgcccaactcaatatacattttaagaagactagatattgacttattggaaaatcaaccctaaatggtttacttgggctttctaacatgactcaagaatcttcagaaaattagaaagaaagatttcaaagtgacagtagattatatgctactcaaaagcaggagtagtatttttctggctgtgcttagcctaatgcttatgatacagtaggtacacaaacatttgctgaattaattactgtggtccataaagcccagtgattatccatgggtgcaccctagtgtaccataaccatatagtggaaagagcagtgggcaaagaaatcttgttcatggtcttagctccatagaagatagatcactctttaatgggtctcaatttccttatctgttaagtgagagattggatgaatacatgatcaggtacttacatgccatttctcacattctagtatcaagggtgtgttcctgacatccactataattattcaatggcaaataaccttgcataagtaagtttaatactagatttttgtttatgctagggataacagaatgaaagagatatcatggggtttttgtctcactcagtatctcttaggggagcaatgacgatcaggatgagttttcaaaagtcgttagctggtacatcttttttacagtagtttacagtagtttgcaatgctgcatggtaagataacttggggttaattcccagataagttacatataaaaactcaactaataaagtgtctttgttcttcttttctttgcatatgtggtaaatgatctttcactacttaaacattaccttaaatatggcttattttctctattcaattagataaactttgtaaaatatatggcaaaagcttttttgtcttttaaagaacatattttcacatatgccaataaactgacaccaggtagaatgaaaatgtaattgtttcttaagtaggggtcctcttttagaacagtagtgcattaaatttctagagtgagaactacaaataacacagtcttcacagcacctagtattgaagttagcattgacccaataacaatggagggacacacttttgaaataagttattggttatcatgtgagagaaagttcagttaaatgtcagatttcagaatacacaatgtcacttttctaccactgtttattgcatattgtcatcatttttaaaaggcaacattgttgagcactactgggaacagatcttacatgggttttggtggtggtggtggtggtgttattcttcagaatacttacgcagggtgctgaacatcttccctgttgtactcttgactggattgggattgacttagctcatacccaaggatattcttttattacttttccatctgttaagaatgcttaggaactttggtttttctcacaatttctttccagctttgtcctatttactagattgtctaaaattaaagtttcaagatttatttgagctaaccctactttttttctatcagctataatattccccaaatcatctttttattggttactacagataaaatttgtgatagaaatgaaatgaagcagagagaagttgcgagtaaaagtttcgatctcctgcttaactgtgcaccttactctgttgtgcatatctatccatccatctaaaccagtataacaaatattttctttaaatattttgcaaagttagtgctaagtaaaaatatgcacatgtgcattcccagctcccgtttatcctatgtacaaatccaactagtgggggacggggcggggtggaagcaagattcggacaagctataatacatccacaaaaccactgggggaattttcatctcccctcaccgcgcagctttgcagaagcgccctttaaggtgtatgtctgtgtgtgcctctctcaagccttctggatgatgatgcgagagggaagattttacattgcaaagatcaatgtattaaaaatgccgtgcaggtagttcatagccaagagccttgctcgtgttggaggatgcaacggaggagagaggcaggagcaccggcagccagctgggggctgacctgattccctagaatcctcagctcccttcctctttcctttcgacgtccttccttccctttttctcctctcccccctcccccgctttcccttctccagataagcagctccgggaaacaaagaatccggggctctccagacatcagagcttaaacccaggactctgcaagcggcatctcattccggggtccagggctctcccggctctccatcccctccctaacctcccccgcctcccgcgctcgctccctcgctccctccccgctcgcttcctcccccaccatcgcagcgctaggaggaaggcggccggggctcaagatggctttagccgggctctgcgccctgctcgcctgctgctgggggccggcggcggtgctggccacggccgccggcgacgtggatccatccaaggagctggagtgcaagctcaaaagcatcacggtgtcggcactgcccttcctgcgcgagaacgacctgagcatcatgcacagcccctcggcctcggagcccaagctcctcttctcggtgcgcaacgacttcccgggagaaatggtcgtggtggacgacctggagaacacggagctgccctacttcgtgctgggtgagtcccgggggaggtcgaggcggccggaggcgctggaccggcgcccccaccccccactccagctcgctctacacacccactcgccgacgacctcccctcccccactcctacctcccggatccgccccactcccggaccattctccacacccacttgcatactagcgcctctgtgcacctgacttctccccaaatccgacctggatgctgagcctcctctcagctgccctgcctcaaagaaacaggttgcatgagtctctctgaaacctctcccagccttgacctcccagctttgattcaggagcacatccacacagcactttttgtctgctaccagttcaactcccataatcccttctccccactccctagccacatgctcagctctttgcttcactcactctggatacccacacccacctacagcacttcctgggggctttagaaacaggtatcctgtcatcaccttgccagctatgtgcaagccagattctagtcttcattcatggagagccctttatctgtcaccaggctactgacaccctcccttccaaacactcaagtttcttatcccccagctgttcattctgggaagtcctacctccatgcttagatgtcacaaccccctaattcaaccacatccacacatccatgtcacgtcacagttggttaaagatattatacaactgtagtctgttagtattggtctcttctttgttcccagggccaccttagataggcgtaggcattcctgcacacagaatgacctttctaggcaaggggctcttccttcctttgtttgtttacatctctctctttttggtactcccactgtaattttcttaggt

SEQ ID NO: 4048 - DNA, 6000 bp, Homo sapiens
ccagtatgctattcaaacagtatcattttctgtcctttaatgggaaaagactggatgcactgcgctaggatcaccctctctctctccctgtctgtcccctcttccctctccaccccttccctccccgccatacctcttccataacactgaactataaagggacaaaatacagtcctcagggtcacacaagccaccagaaataggaaatgtatctttttttttttttgagacggagtctcgctctgttgcccaggctggagtgcagtggtgcaatctcggctcactgcaacctttgcctcctgggttcaagcagttctctgcctcagcctgctgagtagctgggattacaggcacctgccaccatgcctggctaattttttgtatttttagtagagatggggttcaccatcttggccaggctggtcttgaactcctgacctcgtgatccacccacttcagcctcccaaagtgctgggattacaggcgtgagccactgcgcccagcccagaaatgtatctttagtggaaaaaacccagaaagatgataaagtatatcgaaaccatcgctggccaggatcacttcgccatgtgctgtttcctcttccatgtttttcttttgaaaatccagcacaggatgctggagccagagtcagcagctagtgaaagagtcaggatcttggcttcagaaacataatccctcctgaactttaaacctaaatatttcattgtccactgtacatttctagacagataacctgcagacacttctagctcaatacctctgaagctgaacttggcccacccacctttacacaaaatctgtttccttttttgtattccctcagttggatgtcagccccattcaccagtcactttgattagagtcctgggagtcatcacttttccctgtaaacgtaactcatatcctccctctcacctggactgttgcaagagtctcctcactggtctctctgcctccatcctcttcccatttctttttcttttcttttttttttttttttttttgagacagagtctcgctctgtcgcccaggctggagtgcagtggtgtgatcttagctcactgcaagctccacctcccagattcacaccattctcctgcctcagcatcccgagtagctggaactacaggtgcctgctaccacgcccggctaatttttttatttttttatttttagtagagatggggtttcaccgtgttagccaggatggtctcgatctcctgatctcgtgatctgcccaccttggcctcccaaagtgctggaattacaggcgtgagccaccgcgccaggcccatcctcttcccatttcaattcaccttccaccttgtccataaagtgactcttctcaattgcaaatcttaccattttccttccttacaatgtttcaatagcttcttttgtcaataagataaaatataagttctcttatatggtataaaaggcttttcatttcttgggctgcctacctctccggcctcctcttttgacagtttgtcaaaccactgattgacctgctatcttttgtactgtttcctctggctggaaggcccagctctcaaagtccgcctgaggatcacctactcatcccagtatggcccaaactggatcccctctgactccactcaggtaatgttactcactcccttctttgtgttctcacagtaccatatagatcagtgattctcaaccaggagcaattttgtttgatgccatggggaaaacacttggcaatatctgaagataattttggtcaccacaactagggatgaagtgctacaggcatctggtagaggccagggattttgctaacgatgctgcgatgctaatgatgctgttacaatgtacaagacagccctccacaacaaagaatcatccagtccaaaatgtcagtagtgctgaggttgaaaaacctggaggtacaacactttatcacacttgtctgtttacacatctgtctctccctgttatactatacgctcctcaagggcatgcaccatgtcttacctttaaatcctcagtggtgagcagtgcaatacatgtagtaggtgctcactaagtatctatggagtgaattgattagatagaagttaagttaagtctcatcttgtccctgcacctaacaggccaacacctgcatttcaaagcaaagagggtaggaacataagatgcttggggtcaaaacagttaggggatgtggatcaaccaaagcagctgcaacttccgatcagctgctaagcctattaaggttgaactctccatctttctcaagtcttctatcccttcatggtccccactccataatcccatgagactaccacattattttgattttctccctcagaaatatttcctgaatccaagccatacccactgccaaagctgcagatcaggctctcagttgcatcactttcctagaccactattgtgccctcctatttagtctctctgccacctacaaattgagaaagtcaaatttagtaagtccttatagtttccagctctaaaacaacaggatttgtaacatcatgtagtgccaatcaattccagcctttccattaaataatccaaatgaatcagtattcatgcattcacttattcatatggatataatacttcaaaacactaactgggaataagtgtaatactttagaaagccttgcactctttcataatctttcaccttggaaacataaaagtaaacagctttaattgatcctccctttcttctagtaacccagttcccacagatgtcagtttcttaacaaatccaaacaaggagtaaagtattgagagtttcagaatgtgtgcatatcatattttcagcaaagggatgagcaacactttcaattaaaaaggaatctaaaagaaaacagcagcatccttgtaaaagtagatgaggacagccagctggacttagctgctaactcagcactcccttccccaactcctccaccttccagccatgctgcattgacctttttatcatggaatggtatgcagcttctctgattttgtcattgtcactcataatcccagcagacttgtgttataagcagctgcttatattgctgttatgtatagatatagaaatgtaacttgtcagtggtcaaagaagccaaggaaactgagcaaaggtgactgagaacaagtgctcagcatgggctccaacacccagtagggccttttctcattgatttttctcctacaaggaatttctctcttattgaaagacagtacagtttggggaatatcatttgaccagatatcctgctccattcttggaatgaaaaacaggtgcaattttagtataagagtctagctagggatgcggatgaaattaatttataacaggaccaggctgaggaaaaacaccaataaatgctacaaatagtttgtcactttttctaacagggaaatctctaaaggatgataaagatgctagctgtgtttaatagcaaatgttaatttgggggaatatgaaataatcatgatatctttctctctttgagccaaacgcagctttggaatttttctcactgtagtgttgtaggcagaaactatcaactgaggcaggcccttgcgaggaaatatttatcctccttagcccatgcaatgatcaggtttagacagtaaaaaatctatttaagtgactggattgctcatcttttatttactttactcccagtggcctaacctggaacatatagaagaaagtagtggaatggtttttccagacgcacttcagttacttcaggtcctcagtgtttaataaggttttgggagagaaaaaaagctattgctgtgtgaattcaataaatatttaaaaaatttaaaaaatcagtgagcattatttctgccatcatgtgatctgaactatctgagtagtatcataaatcttgggtgatgggttaccttgaccaacctccctttcagtaagaaacaaattattaacagaaagtgaaagagaaataaacctattcaatgtttcaagtccctcagaagagggtgaggcagctccccagatcgttgctagatccagcctggccaatgaaccctgaaaaagcccaactcctgctttcatcatggaagcacgggacaaagtgtctcttcctaaaaacagaagttagaccagaccccttcctgcctatgattcttcaagaagcattgcatcatcaacatcaggcataagcattaataaagaccctaaataataacagagacgaaacacatcgcaaagagagttttcttttatcccctttaaaatgtaaatactcccaggaggaatcagccaacatcattaggggttaatgcatatgtagaataactagggccaggatataaaataagaaatacgtagggaggagagaaaggcatccttgagacgactccaagaaggaaagttggggatgaggcgaaatttctgattttaccttaaagtgaccctaattcgatgaccttttgtggtttttttcttttttcttttttcttttttacttggccctgcccaagcaggacctaaaaacaaacagacaaaaaaggttactaacaactgttcctctccacgaaaatctgcagtaaaaggtaaaagatgtattcgttttgaagagaaaccagagcttgcgatgagcttctgtatctccgtcagccctctagcatgacattaggaaccctccaggagatgagtcttcacagcccgggttggcacctgcagacacgcacttttcaacgcccgcaccctgcccggggccggctctcccacccaggcctctctctgcttcagcgccgccccggccgtgggagtcggcgggcgcagtccacagctccaccaagacacagctgtcggggttccgggtgcgccccgcccgcggccccggtgtcccgcccctcgccctcagcccccacccgacggtctttagggtcccccgggcacgccacgcggacccgcagcgactccacagggactgcgctcccgtgcccctagcgctcccgcgctgctgctccagccgcccggcagctctgaggatggagaggagggcgcggagctcctccagggagtcccgcgggcgaggcggcaggactccgcacaaggagaacaagagggcaaaggccgagaggagcggcggaggccgcgggcgccaggaggctgggcccgagccgtcgggctccggacgggcggggaccccgggggagccccgagcgcccgccgccacggtggtggacgtggatgaggtccgaggctccggcgaggagggcaccgaggtggtggcgctgttggagagcgagcggcccgaggaaggtacggattcagcaccactatctgctacttttccaggtggtaactaaggggcgtcagataaggtggaaagggtcatccccacgagacccactgaagccagagcagattgctggatgctcaggttcccaggaacggaagggcgtaagttaggaacccagcaacctgctatggtgagcaaagaacatcagaagaaatacaaatatcactatatactggtctcggggccagccttggatgggactggggagcgagtgtggtacaggttggggacgaagcaacttggcaaaggagccatggacttggtttttgtggccatggaggggcatacgggcacctaatttaagtaaagacatgcacgagctggtggctgtaggctgtaggcttattcttcttccagcgtccccacccctcggtcttacctaaaagcattttaaacttctgggaagatgatcattctttctgaaaagcagtcgcagcagagccaagtgaggaagagccacacctgagtttaaatcacagctcaaccacttgctagccatgtgatcataggaaggaccttaaccatctctcctataacagtacctgcctcagagggtagtggtaaggatacaatgagaaaaggcatccaaagcactttgcacaaagtctggaacaaaaacttactcaattccagctgcaagcta

SEQ ID NO: 4049 - DNA, 6000 bp, Homo sapiens
tttaaaatagaattaccatatccagcagttccacttctgggtatatatccaaaataatggaaagcagggtctcaaagagatatttgtacaccagcgttcatagcagcattattcattatagccaaaagatgaaagaaagccaagtgtcgtccactgatggatgaatggacaagcacaatgtggtatatatacaatggaatattaggcttacaaaggaaggaaattctgcaatatgtagaatgaatgaatgaaccttgaagatatcatgctaactgaaagaagcaaatcataaaaagacagatcctgtatgattccacttatgtgaggtacccagagtagtaaaattcatagagacacacagtagaatggtggttgccagagattgttgggggagaatggggagttgtttaatgggtatagagtttcagttctgcaagatgaaaagagttctggacattggttgcacaacaaggcaaatatatttaacactactgaattgtacacttaaatatggttaagatggtaaattttatgttatgtgtattttaccacaattaaatttttttttttttttgagatggagtctcgctctgtcgccaggctggagggcagtggcgtgatcttggctcactgcaacccctgcctcctgggttcaagtgattctcctgcctcggcctcccaagtagctgggactacaggcacgcaccaccaagcccagctaatttttgtatttttagtagagatggggtttcaccatgttggccaggatggtctcgatctcttgaccttgtgatctgcccgccttggcctcccaaagtgctgggattacaggtgtgagccaccatgtccggcctcataaatttaaaaaataaaaaatttaaaaaataaaaaattattcccatatatgatccagttgttccttataacaggctagtgaaggagcaggctgaatgtcattatttcagagtaggggagatccccttgtaggggtgtcatggcattcccgcagcttccaggggcagggggtggctacccactgcaatccctctcaggtctatcctggcatccccagtgatatggttggctcctttctgatcctcagctcatttggctgcctgtgccttattctctgtgttgccatctccttatttctgcagaagatgcattgcaggacccagtgtgctcccttcctcattcactctcctaactttggagactcactcaggaaccagaggttctcctggctgcccactcagaactctacagaaagctcagagttggcatgtcaacctcccccagaaaaatgaacagaagttaagtccaattaagagtttcggtttgaggaattctgacaaatgatactctcatgtaacacacactccgtcaagatacagagcatttctagtacccaagaaagtttcccttcccagtcaaactctgtcccccaagacaaccactgttttgattttttattccctgagaaatttaaattattcttttgggttgggggtggggtaggggtgggggtgtgggaagagatgggtttttgctgagtattcttcccaacctattgtttatgccaggacgtgggtcctattaaatgaaaaaaaaaaaaaagaaagaaagaaagaacctcctttgtttctccttgcattttagccatagcttccctttccttgtgggcagtggaggccaaggtctagtttgagagagggtaaaggagggtgacacattaaagaaaggaacacctacacacacacacacacatacacacattttatatcttgacactccactatctccattgttggtgctttttctaatcccctaattatgggaacccaagcctctgtcctctatcttctattactacttataaaactctggcctgtcatatgtggtccaattaagaaattcatggaacagataataagaggccgtgtcaggcacttaggtgataataacattaacatagtatcctgtccctccaggagtttactgtttggtggggataaatgacatgctaacagctaatttacattcaccctaaatcaaatcctcctcttgtgttctctttcttgatggttggaaccaacactacccatttacaaccccagaagccttcctccctcttctttcatcaattcccccataccctgaaccaatcagtcaccaagtatactaactttgcctctaaagtatgtctcaaatgcatcactcttctccaccttagttgtcacaagcccagctcaggataccctcatccctcctctggaccataacctcctagccactgaagcatctgtctcaaatgccaatctgaccctgtcaattccctcagtccccatggggaactgtccataggaagcgtccactattctgaacattacaaacaagggccctgataatctgaccctgtccacctccaggcttagctcctgctgcccccatccttttccttctactccagcaacatggcccccttctcctggctgcttctagtcactgcttaggaaccccctgccccagccccgaaaacacacaaatatactggtatcttgtcgctgtgtttctatggcaacctgtgcccttctctcactgtgtgtctctcccaccagtctgtctctcccaccagtctgacagttccttgaaggcaagaaccaagccttgttcatgcctgtgtctcagtgcttagcacacagtaggagcacaacatgtgtcaggcactgttttaagcacttttcacacatcacctcatgacactctataaggaagctgttattacggtgtctatttcacagttgaggatagtgagagatgaagcggcttgcctgagatgcaacagtcaggaagcagcagaactcaagcaatcagactccaaggatggtcttcaacaccatgctcacctacccctcaatttacatgtgcttgttgaatgaatgaacgatgacacgttttcacctccccagctaagtaaattaaacagttctctcccaataaacattagcaatcactagtattggacactgcttcctttccccacatctgccttccatcattcgctcctccagggattttggctttcacccctctcttctctcccctcctgaaacccattcagcccctcatcatgtctaggtgtttagtcttgttttccttttgaaacatctgtcagattcactccttctctgttctcaatcgctgtcatcctggtctggacctcatcccttcaggccacatgactttagcagcgtccttactggttttcctgacttcagtaacttagtcctttgggatcttgaggtttacacacatttttatttaaccatcacaacaacccatgaactagctattattatttatgttttatagatgaggaactgaatgatagagccaaggtttaaacggggtttgtgttgctccaaggactgtgccagctccagactggtgaccttgggcaagtcacttaacctccgagtctcagatttctcatttataaaatgggcatgatagcagtaattatcacattgtaagagcaactgagataacacttaacatcctgcctgacacacacacacagtaagtgctcaatgattttcagcaatcaaagtccacaatccccatccacaaatttcatagcatatctagcatatgagttggttaatggttctgggcaaaatgttttctcgaatagctcttgaaccacagtgagaggaagttgtcatacctggccccttctttattcctcgaaggtgtgctctcctgggaagcaccatatgctgtatgaaaaattactttacatggttatttgcagaatgtacagcaacagaaagtacaccccatctggtggaaagtgcacagaatctgcagttctgccctgtccaggctgtgtgactacaggaagtcttcaagcctctctgaacttattttcttatctacaaaatgagaaaaatggatggtgtggtggctcacgcccataatcccaccactttgggaggcagaggcaggaggatcatgtgagctcaggtgttcaaggccagcctaggaaatatactgagagccccatctctataaaaaatttaaaaattagccgggcgtggtggcgctcacctgtagtcccagctactcgggaggctgaggccggaggatcgcttgagcccaggaggtcaagggtgcagtgagctgtgattgtgccactacactccagccagggtgacagagagagaccctgccccccaaaaagggggaggggggaataatactttcccccaaaggatactgagatgatgcatacacaacctttagcacactgtccaacacaaagcaagacctacttaaaggatctgtgtaacattataatcagatactatgcttcattttaagtcgaggaccagatagatttataaattacatactgtcaaaattaagtattaaaagtagaggaaaggtaagaggattttgcaaatcaggtacaactacagcttatcctgaaaagccgactgcctagttctgagggaacaagccactcctcaccctcaagcttgaggagagggctgtagaagcccgcccacctccaccgccccgagggctccgcctccagggccgagggacgcaggcgtaagccccgcccactggggggggggggagagagagagagagagagagagagagagagagagagagaggagagagaggagagagaggagagagaggagagagaggagagagaggagagagaggagagagagagagagagagagatatatgccctggtcacgtgagcggggtgcggaagtcgtgtttcaggcggcgttcgtgattggccgcggccgagggtcccgggggtggggtcaggccctccgacgcttcgggaggagccgggactggaggctgccgagggggccggcgcccgagtccgggattcggccagtggtgctgagcgagtgctggaccagcggccgtcctgtgcacctggcctgtgcgcgtgcccgctgctcggcttcacccagactaaggcgcgggcagctgcgggaacaggcggggtgggcggagggagaccgggaggcacgggcgccctgtgcgcggaggaggtgaaggcggccggggccgggacgccatgtccatggaggaccccttctttgtggtgaaagggtgagtgtcggccgagcgctccaccggaggaagaggtggcggtgctgcctgcccgcacctcctaggtcttctcgcagtggggggaggggaggcaagttggagctggggagggggaacagtggagacggcttagtcttgagggccatgaccaagcgtcaagagacgttccctccatccctacctggaccgtgaagccactgtccccagccaagcccctggtggtggggggccctttttggcctgtgtgctgcggtacaatttatttgggggccgaggggctcagcagctctgcaggtggggaaggagacacgcgggtcctggcgcacactggccgtctagtcgagcatgggatcttgcttcgaaggagcgaaaacagcatctgggcaggaaaagggaaatggccctcctgagctttgtagttcgcgttgacgggggtgagctccattgtccattgagtttggagcgcttgtccgcagactggcgagaccacaacaagcccagaggcgtctgagcacgtttgctgggagggaggcgggggcgggggccgttctgggaggctggggagcagggcaccggaagacaattcaatgggggagtttttactgagtaatgtgaggagaggaaagcagtcgttcatactcagtgatgatttggaaggaaaacaaaatgaaacaagccaaaccaaactttcctcagctttctattagcaaccggaattttctcacagtgctaaaggaaatgagtgttgcttgttaactccttgatttcatccaggttgtttgacaggtttctcctatttcttctgcctttcagaatagaaaggactgccttctgttcccttacaagcta

SEQ ID NO: 4050 - DNA, 6000 bp, Homo sapiens
aattctgcatgctatcaaagaataggaaaagcaatttgaagaatgacaaaatcaccactcccaaattccatactagtttcaggagtaattagaactgtagtactaaagaattcaaatcatttaggggcaactgctgttctatgaccagttttgcacagctggtcccagcttcctaggactatttctgagccataatattaaaatggagcccctccctgtgtttttgaatccatatggttctacccagggctcctatccctccctaacttctgacacatccaagcaggaaagtgagcatgcatatttacataagctacaaggctgtgcaaacagattgttaactggttaaagggcattttagaaatggctgttatttcttaccatttttaatgggttttatacataaaaaatctttatatctttaaaagttctatccttattcttctgatgtgctttccaccagtctttttccctctgtacaacactagactctctcaattaactcgtacatcctttttatcactaagtgtataggttttaaaataacgtaagtgaatttttcctagtgttcataaagtgccaattagctgagaatttccattattttcattacggggttaaatacgttttgttctgttttgttttgtttttgtttttgttttttttttgagacagggttttgctcttgtcacccagactagagtgcaatgacatgatcttggctcactgcaacctccgcctcctgggttcaagcgattctcctgcctcagcctcccaagtagctgggattacagaagcctgccaccacacccggctaatttttgtatttttagtacagacagggtttcatgatgttggccaggctagtttcgaactcctgacttcaggtgatccgcccacctcggcctcccaaagtgctgggattacaggtgtgagccactgcacccagcaaaaaaaaaaagtgttcttttttgaaatgcattttgcgaatatatttttcttttatttccatgggctccacctttgataagttttagagcttttaggtcacactagattttctacttaaggttgctgagatcagtgaaaaatagactcaatcattggctagaaattgagtttcaacaagggaaaaaaagatacttattatttagcagttcgaaaaagaattatgttctggcttcccattataatctttaaatatgcagcgttaacttgaaaacaaacaaatatgctagaaaatgttaaacattaaaagccagtacttcttctttagtatgttcttaatgatagttcatagtcaattttgacttcttataaagggttggaacatcaggaaggtaaagaaaactgtgttattgttaataatccacttcaaattattgacttgactatatttccatataactgaatgtcactgtttttctattttatttgttcttagttttcaaataccatatgattggtgttgacctttagtttgtaatgttctctatgcaagagccaagaccaactcacatgtattgatttagctaacttcattaccaaggctgccaaagaggatccaggatgaaaccaatgttggattgcagatctgtccaaagaaaggataatattaaatattgtacagaagtgacctcatgtgttttcatagcatctatgtaagtagataaaaggactatattattcccactttttagataaggaaactgaaggaatacaaaaacaagtatattcaacatttactgagcatctacagcaggagaggcacagtgctaggtgtttcagaatatccttatgctataatttgagtgtgtccctcagaatatctgtgttggaaatgtggtccctggtatggtgatctggggagatggggcctttaagaggtgattaagagggattaatgctgctctctccggtctgggttacttcttgctagagtgggttcttattctctcaggactggattagtcaccgccagaatgggttgttatgcagagaggctgcccctcgtgtttcacctctttcacacgtgcctgcttttccaccatgtcatgatgcagcacgaggcactcgtcagaagccaaccagatgccggtgccgggtttttggatttcccagtccagaatcgtaagaaataaattacttttctttataaattacccactttcaggtattccattatagcaacagagaacggactaagacaacctacaaataagctaaagtcaatacttttcatgtggttaaaatgtagtgggtatgcagactatgaaaaacacaataacaaagacacagaataccatggaggcacagagagaggataacttctgctaactagaaggttctggaagggttttgtggaaatggaatctgagcccagccttaacaggtgttgagtgttgtacaaagatgatggggtagcataggagatggtgtgagcaaaggcatggaaaggatacagaataggaattatttagttatcacataggatttgagggcagggcagactagaaggaagaaagaaggtattcagagggtttgcagatgttcttgaataccaattctgacagccatgtatagaggagagtagggcagcagggagataatcggtaacttcaacattaatgctgccaaagaggactaggatggaaccaatgtaggattggagatccatgcaaaaaaataaaggatattaaatattgtacagaaatgacttcatgtgttttcacagcatccacgttagtagataaaagcaaggatccccaagcctggggcagtggactggtaccagtcagttgcctctcaggagcagcaggcgagcaagcattaccacctgagctccacctcctgtcagatcaactgcgtcagagtctcataggagcatgaaccctattgtgcactgcacatgcgagggatctaggttgcacgctccttatgagaatctaatacctgaagatctgagatggaacggtgtctcccccaccctgtggaaaaattgccttccacaaaagtggtccctggtgccaaaaaagttggggactactggataaaaggaccatattattcccactttatagataagaaaactgcaggaataaggaagcaagtatatttaacatttattgagacactgcaatagtttaggagagaggtaatggaagcttgaatggagcaaaagtgggaatagaaagaaaggtaataatctgaaagatagaagaggtaaaatctatataatttggtaattaattgcacgtggaccccgaaggctaaagatgagttgacaatgattccgatgcattaatttgaatcagaaaacatcttacgtttgagctacccttgggctagacattaggacatttctattagggaggtggaaatgtgggtctaatgatcaggacagatattgatttagaaatcaaccacagagatatgttggctgaatccttatgagaagaaatcaccaaggaataattagagtacagagagaaaaaggacaaaaagaaaaccttaagggaacacctgtattttaatataaagtagcgagagaatgaaggaaaacgggtcagccagagaagaggtaagaggttaagaggtaagaggtaaggtgataaaagtcaaggaagaaacgtttccagaaagaccgccgaatactgcttaaaggacacgtaagtaatttactgtggtcacagagatcacatcgaagctcctaaactccgcacctattgaatgaccacactagaaaaacaatgtggtttttcaagaggaaccgatgtgtcattttaccaatagttaacctgggactcggtcatcaaaattcattgcaagttccaatctccttcattaaaccttctttgcagcccacacagctctccttacattgagcttttgaggtaactattattaatcatgtacgaggacccacgtgctccttcatccttgtagtactgcgcggtggttaaatgcaagggcttccgaatcagaggctggatggattctaatacagcagtgtgacgagctcttgttaaccaacttttctaagcctctgttttctcgtctgcaaaagggggatggtggtacttactctatcagagttgagaagagtgcatgagatgattgcgagtaaaaaccttagcgcaatgccttcaaaggctcaattcattttgctgttactgtgttttggaatttccctgagggtagacgactactccaacactattccctaacgcagcagcactgacatggggacagtgcgcctcattcagccagctctctgggaaacaactttctgaggaagagagataaacagctgacgggtttcccgggactccgcagcccaccgagacagggttgactgtagggcgccgaggaaagggggaggtgggatcccagcaaccactggcgacctcggaggaccgcaagtcccagggtgcagcgcgcctaccccgggtagaagcgagagacacggctccgagtcggctcgcgggagagccggggaagaagcagtgcacactgggactggtagtcctcagggggcaactccgcgggtcggaggcgggtcgaagcgagagatcccttcccagtcccgccttttgtccacgtctcacttctcctggccaatgccctctccagtcgccggagacagcccctctcccatgaggtctccattggtcctgaggctctacggcttcggccctacccggaagtaacgttggggaggcggtttcctagactacgacaccggaaagctgggggaggcgctccgggatactgagggcggagggcggtggcagcgctggcgctggggaccggcttggtggcttcgggaaacagtttggcgccggcggccgtccgtgttactccgcatcccgccccgtctcggcacggctagcagccccctggccaccagcgtccagcaatgtgtctcaccggccgggcgtagcagctgcgcgtgcgcggaaccgcggggccatgagcgaagccggcggccggggctgtgggtccccggttccccagcgagcgcgatggagactagtggcggcgacggccgcgttctgcctggtgtcggccacctccgtgtggacggcgggggccgagcccatgagtagggaggagaaacagaagcttgggtaagggtgctggcagcctggggtgggtttctcggtgaggctgacaacaggaggggtgcctgtcattgcgacccggtcgcgtagtggcctctcctgtcgcgattggaacggctcttcccgcgcgagaaccctagaggggtggacagggtccggggaggtgggaaccgccgcccgcgacctgacctcgggggagctgacggggtgtcgccctggccgccggtgacatgtgcaggctccttgaagccaggcgcggtgtgtcaacgcggctgccatgtcagtggcccaagaagggggctacagcccgcatcgctgcgcgctggagttctgcggttggctgcctgtcgaccgaagcatggttagctttctcgcgcaagtgagcttccaactgggaaaatgttgctgatctcacagtagttaaggaaatgatgtttacacctgttacggaaaagggggcgttcattggaacttgaactttacacattttactatttccttgcagtgttttcttgcactgtattttcataatagaatgtttggggggaaattattcaaaagtctcaagtatacctattcagtagtttttatccgtcttggaagtgtgttaaaattatcaattctatttacaccatttaattcagagtaatacatacacgaggtcctacacatgaataagaaaaaagcgaagaaccagtaggaaatgggagaaaggcatgaacggttaagccagaagaggaaatggaagtggtaaataaacatgaaaagttactcaacctccataaacgtaggagatgcagattaaaacgaggagctagctggtttttgcccatcagattagtaaatataatacaaaacacaaggatacggttctggt

SEQ ID NO: 4051 - DNA, 6000 bp, Homo sapiens
tactaaaaatacaaaaattagccaagtgtggtggcacacgcctgtaatcccagctactcgggtggctgacgaaggagaatcacttgaaactgggaggtggaagttgcagtgagccaagatcacgccactgcactccagcctgggcaacagagcgagactgtctcaaaaaacaaacaaaaagagagatttatgataaaaatatgcatttcagtatgtaagtctcagacatgattataccagaagatatactaaccagatgctaatacctatacataaagtcatagtgaatgtaacaattacaaatgcccatagactggtatattggtgactcaaatgccatgaacacaatttcattttttgatatggtgaaccattggccaagtttagaacaaagcaaagtacaagcttccctcactgtacactgtagttacatttctagataattcagtgcacgttaaaactgaacaaaatatactttatgttccaacaatgttttaaatttacttaattataaaaaagtgtttcacctacacagatagccaatgaaacactcagaagtcctgcagaacacagagctagtctttgctgtttacaaagactgtcccacacactactggactactacctaccctggccctaaaatgcccttaaaaatcattctgttaactagaaacatcctcacaaacttctagaacacctcgtagaaatcagtactacccctaccactgcccccttgagaaccacagctctaagagtattattcctgactgaaacagctgtgcctcagaaaaaccaaggaatacacaagcataataaagtatttgccaaatcactgctgattgtaaatgctcattgttaatagtttgcatgaattaaaacagataaaggtgtctataattagttctgaaagagacacttaaatttagctttgttttcaagtcaaaagaaattcttaaacaacatgcctatctgctgcacaagaaaactgaaggagaaaaataaggcaggcaaacactgacacttgtggtcattctgagattgcttatttgcaatcaggctaattcttgctttgtgagttcaaggaaagtaaagctggttcataaatcatccactgactttagaggaaaattacaagcttttaataaacatttgacttctcttcaaaaaggggaaactacctatactaatattaaataaccaaaaacaagccatttgtccaaatcccttatgtaatgaaaaagactgcatctgattataaataaaaacagtcaagagaaataaactccaagcaaacatcatgcaaaattgtctagtcatctcaataaaactaaaattggtctctaaataattgtgtcaagtgacagttttcagagtggtatggtggaaattatacctgatctaaaacattaagatttttgtccaacatgggaaaaaatagctggtatttctggtaagtcctagctgaaattaattccttgaattcagggaccaaccactcataataaagcacaaacaggaaaggagaccaatataagaagaccagattcatgtctcccttctaatgttactcaaggattttgctcattcccattagatgaaaatcatccaccctggttgaagtgctctccccctacctttctcttttaatctttttaccaaggacatattgttgaatgtacatacatagataaacagatgatgtaactccatgagttactatttagtagccacttgaacagcagatttacatctgattcaacatgtaataatcattcaaaaccattaactacatgaatacaaaaataattattcctatacccagtaaaaactgacaattaggaggcattacaattcctgtctttaaattctgactccttgaagtctatactagacatgcccaggaaaatgctaaaaccggcctggacagctctggccatgatgcacatagtaacggccacctattttgccatcacggatgtgttgtaggattaaaaatagacttatgcaagtgacaattacaagccatttataactataaaacttaacaaaatagctgccagtttgctgaatctgaaaaagaaacctgtcacatttactgaattagtttaaccatagaattcagatgttaaaagaaactagactaaaggaagaacttctacaagctctcctgtcataagatttttacagtttctcttgactggaaacatgtaggttgctacaaaaagttactaaaggaacttttatctcacatctgccctgttttcctgaactttacgtaaagttcttaactagcttaacttaaatttaacaaacaggttggctgggcactgtggctcacgtctgtaatcctagcactttgggaggccaaggcaggtggatcacctgaggtcaggagtttgagactggcctgggcaacatagtaaaacctcacttctagtaaaaatacaacaattagccgggtgtggtggcacacgcctgtaatcccaggtactcggcaggctgaagcacgagaatctcttgaacctgggaagcagaggttgcagtgagacaagatcgtgccactgtaccccagcctgggcaatagagcaaaactctgtctccaaaaaaaaaaaaaaacagacagacagaaagaaagaggttgcagctgtacttttaaagtatgaagtaaattccagttaagtacataggcaccttttgttagtaatatttggaagtttcttgctgtttaaatacttgtcccataacaagcagttcggggcgggggggtcccactggaaattcagggactcaatccgatactggagggacccactaatgaatacgttacccatataactctcttaataatcaaaatctataataatccagggagacattaaaaaaatccaatcaaaagaactggcaaaagaataataattatttagtcctttcctggagaaaggggtagggaatgtctctaaatcaactttgtatcccctatacttaataagctatgcctaaatgcacatgttggtacacagtagttaatcaatatgtacctgttgaaaaagtgaaaatataaacattcatttattattctattaatgattcctgggtatgctgcgccagtgttcagaaaaaaaaaaaatcccacaatttctctagcagtgccatgtaataaaaagtttaagaacagagaataatgatagtactagatagatttaaaaagaaaacaaaaacacagaggataagaatttagataatcttgcttcaattcccagcttggcctctattcttatcagtatttatctgacatttggactattttacaactccaggcactggttctgcatcttttaagtgggtattacaataataaaattattagaaaagagccatttgcataacagctcaagtaagcttagcacgcaatctgattttcagtaaatactccataaatggtcattgtggctagcttcatagtcaaatcctatgtaaagaatcactgataaataaatactgatctacaaaaacacatctgtacttctggaaaataagttattttaagtaagttcttaagcattactctgttaactagtaaactaattttaaaaacaaaacggtagtgagtgagaattgcagtatgggtggatatagactacaaggaagttgggttttagtcctctccttcaaacttaactaggaaaagtcaaagctcagtctaggctttaggtttcctatttataaaattcttttttttctttaacgatccttctaacatttctaatacagtggggttcttaaaactacaaagcacatttcatcagcaaagctcaaaaatatgtggacaaaattttttttaatatcagagaaaacaaattcatattcatttgaaatagcatatattaatggtggaggcagtgagatgaagaatatgtatataactgttaacctttagcttaagctccaaaactataactttctaggactgaattactgtccctagagtcacagaggaaaaactgataataaaggctttttactacaacaaaaaatttaaaaaaaccttccctactgctctgcagtaagaaaagaaggtgccagccccagaaactaaccatattagaaaaatctcagtgagtgtgtagtgttaataaaatctgcctcatggcaagttattaaatctttctgaaacattagaataagtaaacataattagtaaaatctcattacccccagatcctgtacaagtgtgctatatctattacatcattttactgaattctacgatacatgtaattttaaagggaaggaaaaataaataaaaaataaatgacaacattaaaaagtgatttaaaataaagttttctgccatcaagaacaccaaaaaccacataagagcaaaaaagaagtgggctgtatcacatcatgcattagtaaagtaatccaagacagcttatttatacaaaccccagaaaacggggggggggatctaaattacaaagatacatggtttcaatagaaaccataggtcttaactacatattagtaaaaaatcaagagcaatttgaaagcagagaaaaaaaacttcaagaagagaatgcactgaaggggttaaattacaccaacttacacacaaaagcttatactgcttacaccctacaaaagcatgtaagaaacatgaaaaccaacatctaacacagaaaacacttagaaagcctgtacttaagaataaagttaaaaaaggaagtaagctggaaaaaataaaatcataaccatttcataatcatcacattttcaaattattcactcatcactacacttgcattcaacatatataatttatcacataaaagcaaaatctctaagcttctccctaccttaggtttttagtcaaaatgaatgcaaacaatcacgtgggattcagccaagcagtgacgttaaattctgctctgtcagagagagcatctgtcaagcccacatttaaactgctgcctgcctgtgcagcagctgaggaaccgtggatttcatattatagactaaaaccccattaaaactgctcaaaatccttcctgcagctgccaggcaacaacgaaagaagagaggtaaatcctattcttttccaatacaactgaagcactacattttagctctggctgctttacattgcagctcagtgttattagtagaaatatggatactgagacgagaacacagcactgcattgtccagccaggaaaatagcagatgtaaaaagcttcaatgcatcaactgtcgggaagagtcaacagtgctacaagcagaacgggcaactacagctcttttgtttaacgaaagagagaaaatgaaagaaagggaaaatttcagaagactaggacccatatgaacaaggagggtaactcgaagacaagcagacagatggacactttggatactgtgaaaagcaatcgcaggaggcagactgttgggggatgtgcgcatgttcgatagcatcttttttgctgaagtgatggcgtgccaaaagtattttcagtgggcataatcctcttcacataaatggcctgaccaaggaaggtatgtcaatatcttgtgtatgatagtcatttaaatgtgttacctttttatagccctggaggcactaatacctgataagcaagttcatacagctcactgcccttgaaactatgaaaaggtttcttaatatctgattttaaaatttgtcattgtttagaagacaagctgtcactgctttatgcagctaaatatgtagcttggagtaattctgggtaatagacatcagagggaaaaggcaaataagaagaagatgtgtttaaaggattccttaagaaattaaacttaaaaaaaaatctgtagccctttacaaaaaacacagcaatattctatcaaattaggtcaaactgaatccttatctagtaaattaaatgctctcttaaaaatggctatcaaaagacacaatgcagtgaaatttcattaaatagtagcaaggaaaaccttaagagt

SEQ ID NO: 4052 - DNA, 6000 bp, Homo sapiens
tccctgatgcctgagaaatcctgctgtggccagagaggtaagaggtactcaggtatctgaggatggtgcccatactattttaaggacatcgtcaggcacctgacctgccatctgtggctagagggcaatgtcctataagaggtgggtcaagcgctcctttgtacccccacattactgcccctttgagagtgttaacacatatctgtattctatcacttgagctttgttctctgtttaggttggatgatcttttagtgtgtctaagacatggttgctaatgcaaaaattaggaagtcaatcatctcataggagcttgaggttatgagacactggacagataagcttcagtggggattagaggaaaagcaggggcatatagttgatgccagggagagtagacaccatttgggagtgatgacagcactcatcccctatccaggagcaccaacggtagggacagggagtgaggaagaacccagacccacagctgtggcacggatgccaagacctcgcctcataaagtcaaactgattttagggttgttggataaaagcaggtatgaactagagggtatgggttttggcctgagttctagagctccaaacttggaggcaggatgaaggctaagtcctgagaggaagcagtggaaggctccagagcttccttaggcctcctctgctggggagagtgcactgctgatgttacctggtctccaccctctcactgagccccgagccaggggctcccggctccctcctggctcacattctgactctgatgtcactgagctccctgccttcctttcccattcgcttgtcctgggatcaagacaaactgaactgttgactctttctctacatgtctctccctgaacttccccagtcccatctctttgctctccctacactgcccctgcccccgcccccaccccccaccagaatgccctcctcaccatcaccctgctcttgaattgtgcctcaaattttgcccacccttcctggcagtatttgtttcccatggctgctgtcacaaattaccataaacctggtggcttcaaacaacacgaatgtattatctgacagctctgtaggccataagtctgacggaggtgttctcttgaactaaaatcagggtgtctacagggctgcattccttctagaagctctagggaagaatgcattggctggccttgaccagcttctgcagcacccacagtccttgcctggtggccccctgcctgcatctttgaagccagcagcatagcatctctctgaccctacttccatgtccatctccttctctaaccacagccagaaaaggttcctctgttaaggagccatctaattagattgggcccacctgaataatccaagccactctccccaaccaagggccttaatttatatttgcaaagtgccttttactgtgtaagacagtattcacaagttccagggattaggatgtggacatttgggggtgcgacattgttctgcccaccactctggcccagcccaagtagccctcactgccctcaaagccccctctccaccattctgggctcccctggcccttggtctaggtttcccaagtgcctctgcagccttcccccagcacagctcttaccaccctgaattgtcattgcttgttgatttgtggttttcttgcaataaacttcaagttctgtgggaacagggacagggtttgtcttgtttactgagatatccccagcacctagcacagtgctcaaaaaatttttgaagggaaaaagcatttctgatacgggagatagaaattatttaggcagatagcaaggacaaaaaagtccttggcagaacttcccttctaataagaagcagccctagaaatcatttcttttctaacacagagcagcctcaaagattgggctgcaaacatatataaggaagctggaagcttgcacggaggaatgctggcagctgcactcatagaaaagggctaccggggggccaggcatgttcaccatgggactccaccttcccttttttgttagcacatgtacagtaagaaagaactgggcaacatggagaagctcaggcagagaaaccacctgcataataaagattgggctgggagctgccagagatttgtgccctatgcagatggcacacctggtgctaactttttttgagatgccctgtatagatgagatactgcctccccactagctcatctataaaaccccctgcatttcaccttaaattggcaactcatttttccaggacccctctctgtagcagagagctattgtctttctttcacctattaaatttccactcttaacctcactctttgtgtgtctacctccttgatcttcatggccaggagacaacaaacctcaagtgtcaccacagacaacaaggctgcttcacttctacaacacatcactttctatgttacattctgaccatgtgattggtctgctattaggttgtgcattacttgaaagcagagttgcatgtgatttgtctgttgtatccctggggtacctagcatctgtgagccctggagtttggctcacagatagtgcttggcacatgtttatggaattaaatttaatgaataggttcagactcacttcactggcatggctcataaacacagggcacatggaggatgtatgggaatgaggtgccctgggtcaggtaggactatttgggaaaagcttctgcaaggcaaatgcttgggcaaagatttgaataagatgaaagataacgactggcagtgctgggggtgataatgtcctatggaggactgcaatgagcaaagtcagatatagggacagccggtggggggagtaaccagtgatgagatggggtggggaagtgcagaaatggtaaccacttggcttggttgccaagtggaggggtctgaattggatgcaacagggtgcttgctaccagggattgagcaatgagcgatgtgctgaaaacagaattggaggaagacaggatggacctaggagcacacaggaagggagtgcatttcagggagcagaatgctagccgaggaaagatacaggcagggtgatgatagctacctcctggggacacctggatagacaagatgtggaaatatgagagaggagtcaaagatagtttgatgccacaatctaggacctgcagaaatgcagaatgacagtggaaggcctcccttctgtttgatgaggaagatggtgagctcagcattgggtatctttagtgttgtgtgtcagagggtcatccattggaggtgacagactcagccccatgcttttgtccccatgaaagtcccaccttcatatggaacgtatatggggggaagaagtgtctttttccagtacttgaactatcccttctgcccccacgaggtaggcattctgtctctgcctgagcttgctcaccaaagcagccattctgacctccacaatgagctaacattgccatttatagagcctccctctttgtgtcagatgctgttctaggtgctttgcatatgtaaactcattatatccctacaaccaccttgaaaatttggtaatattaatcccattttatgggcatggaaaccgagacttctgaaaggattccaaagacttccaaagatccaaaggcggtgtcctaaaggaaaccacccaaattcacacaactaggaagggaggaaccaggattcctgccctggtcactctagctccaaagcccctgacctttgcatcacactgcaggcctcctgcccctgccccctgccaactagatttaatttaattctatagaattcagtttagcaaacacttcctgagcacctaccaaacacaggtcactctgccaggtggcaaggatataaagaggaataagacataagcataggagagaggaacacaaactcagtggcctccagataagtgcccacctcagttcacagggcctgcgaggggcttgattccacctggacccagcccctatgctaatccagccaccaacctcaagtttgggccatattgatacccctcccacccacccctaaggaatcccaacatatcaaagctgaaggggatcttagaatccaaccgaatcattttacagataagggaagtaagggaagctgaggcccagagaagggaggtatcttttccaggctaacacagctgcttagggggagcgccagggccaaagccccggtgtcctcactccgggtctggtgccctgaattcatatgactcccctttccttcacagctggcaagaagttcacatctgccacatagcagccagggaccctcacccctgcatcctggccatgcacactttgccccattttgccaggcccagcaccagcatggggtagggggatcaggctgaggacgctgttgtgcacactcttcacaggcccagcccacaccacccatcgccaaccctagatttctccttctcagaggtgtgtgtaggggtagagacgttgccgcgcagaaagtcttctgcagcaaagacgtggatccctaaataacatttccagattttgaatgaggacaaagcccttcaatctcgtatcgtttttgttgacgttactagcttacagtgtataaagcgctttctttctaaaacagcaagatgaaacaagctgagttttataatacaaggaagggagaagcaccgcagtgggagttctcaggccacacaaaggcaagacccttccccaggagtttggaaggctgacgttcccttttctggtttggtcgggtttgagaaatgcccgcctctcccttgcgcaagagtctccccgcccaggtgaaggcgggtcttgttgccatggcgacagcgcggtcgggttaaggggctgctctggcaaccaatagaagctaggagagggcggggacaactgggtcttttgcggctgcagcgggcttgtaggttcgtggacgcggcattgggggaggggacgggggtcgcggggctattgggggtcccagtccggcttaagacctctgggcgtggtgggcaccggccttcgccgtcggagcaggggtcccagactcgcacccaaaagttcccgtcgggcccgagcggggaggagctgcggggcgggcagaggcggagatggcggagggcggtgggacgtgatgcgcgggtcagagccgggccttgagaaggaactggaggcccctggcagcggtgtcccctcgaggacccctctgccgggctcaccaggtggctggcggagagccggagagttgggcgggagggaagcagggtttggcgaccaggtttagcaggccttggaatcctggagcccagcccccaaccccattcccacttggccggatggttaagggcctagcgtgctggctgcggtgtggccaccttccccttctccgactccgtatctctttttccaggtgtccggctttgctggcccagcaagcctgataagcatgaagctcttatctttggtggctgtggtcgggtgtttgctggtgcccccagctgaagccaacaaggtgagggaggtgagcctgcagcacctggtcacgaccacagtgcacggccaccctgtctacagggctgactcagaggtagccagctgctccttaagcctgcctctcactcacctatgggccatacttcttttagtggtcttccttcaggttcaaggctgctggcctccctaaggatagtgcgggtgaggagtgaggaagggtggggcacagagcactggctcactctgatcagacagatcagtggtggacttccagcaaggaagtttggagaagttatctaagttctccataccttcctttgctttggaccaaagtatgttttgtttcagatatttttggatttgggagtatttgcacataaaaaatgagctatcttggggaggggacctaagtctaaacctgaagttcgtttatgtttcatatatgctgtatatacatagcccgaaggtaattttatacaatattttcaataattgtgtgcatgaaacaaag

SEQ ID NO: 4053 - DNA, 6000 bp, Homo sapiens
gttggggctggggatccccctggatctccactctgtcctgtccgagaaaggggaagctgccctatgagtcttttttctgggggattccagaggttgaacgtctgttctgaggctcctcagaacctcgagggaggggacgagagagatgaccccttgcccaaccactggctgaaaaatcttgaaattccctgactttgaccagggaattcccagttgtgctaagccctgcctggtggaatgtccctggaggaagtaaccaggacacgcatacgtttttaatgtacgtataaagaatcgtaaagtgaacacccatctgccaaccactcattttaagaactaggatatggcacatacttttgaagcccttatgcgtccctccccaatcacaaccccttcctctccacaaaggtaaatacaatcctcaattttgtgtttgttattctcttggttctcttcataatgttactacgtatttatgaattcctaatacatcattcagttttggatctttttgtaaaccttacttaagtgcatgcattttgctttttccccttcaatgttaaggttgtaaattcatccctattgataattgtagttcattcattttcactgccatgaaatgatgaaatgatgaaaacaccattcattccctttcctgctgatagacatttagatctctgccactaccaattgtgctgatttgaatattcatgagtctcacttctgatgctcatgttcaagagcttctctacccaggagtgcaactgttgggtcgacaagaatgacatccccacctttgctagttgtaccacttacactcccatcaacaactatgacagttgctgatgctccacatcctggttttggcagatcctggagaccagagatcctggatacttaacctcacctgatctcagcttcttcctgactcagcttccaaatgttactcttggcaggggctctcaggctatttgggttttcctgttctttccaaatcaagttagtgcaattctctaaacctttattaagcaccaactctgccaggcatagtattgaggggatactgaggcaaataagacattctttttcttctcaaggcacccacaagatgcttggggagccagggcatgggcacagataacttgaactccaacctcgctgctcacaaggagtcattccctcctccttcctactcagcaagggcccttgcatgctatggaaaacacaatgcaaagctgtctcctgagctcccccgctccaacacccaaccatctattgggcagctccatccggctgtcttcagggatgttaaattcaaatgagtagaggccaaggatgctggtgaccatctcacaatgcacagacagcccccgacaaggaattatcaggctgaaatggccataatgctgaggctgagaaaccctcggtggtctaaagtcacccctccctagatctcctgctctcacatccctgtctcatcaatggcatctcattcacccagtccctccagcagggagatgggagtcacctagatttctcctccctcacaagccgtagtcaatcaactcagtcctggccatccagccttccaaaactcctgccaacaccttctcctccccatcctcctggtgcccttgctcagggccttcatttcttttgttgactataaaaaatagccccctaagctgtctcccttccagtgtgatctcttgccacactgcctccaaacccttctcattttctatattcaacttaattctacaggataaaggcttttttttttttttgagacagagtcttgctctgttgccaaggctggagtgcagtgcagttcagtggtgtgatcttggcacactgcaatctctgcctcctaggttcaagtgattcttttgcctcagcctcccaaatagctgggattacagatgtgtgccaccacgcccagctcattttttgtatttttagtagagatggggttttgccatgttgcccaggctggtcttgaactcctgacctcaagtgatctgcccgcctcagcctcctaaaatgctgggattacacgtgtgagtctccataaccggccaaggctgactgactctttagcacaacacacaaagtccttactacctgtctccaacctttcttttcagccttggaaggggctcaatgcttcacgcagactagtcttctctctgttccacacacacctttcatgtttatgtcccaatgtctttgtttatgctgtgtcctatagctggatgcccttacaccctttctgacagttgaattccacttacccttcaaggcccaacttagatgttctttcttgtgtgaagacttccccaatccctcctgatgacacaatttccatttttaatcacagtctgacttgaatgaggctcggggtatatgtgtgcttgtgtatgtgtgtgtgttcaccagcatgtgtttgtcttcactgatagactgagaatgtcctgaggtcaggaaccgagtccttatcatctttgtgtcactgaatgtcaaagccacttgtgattatagtgggtagaatgaattataatgggtagaacacatcccaaaaaagatgtgttcaattcataacttctggtacctgtgaatgtgacctcatttggaaatagggtatttgcaggcataatcaagctaaaatgaggtcatactaaattagggtggagggatacttgaacacaaacaagagacacaggcagaatgctgtgtgacaagagaggcaaatcttggagtaatgcagctgtatgccaaggagctctgggaagaagcaaggaaggattctcctctggagcctttggagagaggctggctgtgctcacatcttcatggcagacttctaaccttcagaactgtgagagagtaaacttctgttgtttaaagccatccagtttgtggcacttcatcacgggagccccgggaaatggatgcactgatccagcaccaagtacagtagctggcacttagaaagtatcccataaatgtacagtgtctgatctcaaggaactttctgggcattgacatatatgtcattcacttttccttacttctagggttgtctgcatacaaactttccatgtctttgggcttttatatctgtagagaggctgttagattttgggcttttagaaacaggactgttcctgccttcgtgaagtgtccctggcatgaccaggcttcagatgacttcataggagtatttctcttcctgtgttgaggtgtcagcactgaccagccatgggaagaacattcagtaggtccctagggagacagcagcttccctgacagtgtcaggccccgggtcagaggatccagggacctagactattggggtcccctctttctcttttcctgtaagcagcatacagctccagggcctgccttggcctctgttcagaactccctggagccttgtcgatattcatctgtgcactccaatgtcactagcagggaactcatatgatttccacaacctggaaggaagcagagcaaggtatcgtaacatccactccacagataaggaaactgaaggagtttgtcccaagtcacacagttcacaaatgtcagaatcagagctcaagtgtgcaagttaccagtccagttctcatgtcctggacctcgtcccacccttgccaagaaggaaggctccctggaggagggggtacttcgggagggggaatctcaacaggctggctgtgtctgtgtttccaggcttctgcccggcagctagcttgccctttgccgtgagatctcagagctggaaggcctgacatgagcaccaaagagaggctgaggctgggcagcgaggcccaggagcatgagggcagttctggctctggctcaggctcccttttgatattctcatcctggcgctggggctgtgcctccttcctctcagggcaggaacagcaactgtgcgctgaccctgcagttcagatccatcagggaagataagattccccatgctcaacgcctgaccctctcttagcccaagcccacctgaggctggttcctggatagaaagcacctggccccgcaccagcccagatgggcacctaaagggagccaggtggtgtcaggggtgcctgagctgtctcacggtgctccaaaattcgagtcctagatatctgtgtttaatctttccttggggaagaaaaactgagcttcctctgcccttattatacaccctgccactctagcccaaagtccagtatcagggagcaaggacagtgcctttgacatatttgtgctttcacaaatgtttgctgaattgagtctaagattctccctttgggtggggctgggtctaccaggggcatgttttgtgtgcagctcagaaagcaatgcctcattcatctcagcgaggcctactgggacggtgggcccgggtgggttccgaagccagggagtggggagggcgctccctgcgaaggggccccgaaggcgcgggcgctctagacccgagatcacagtacctgcgctaacttttccgctcggcttcttgctcttgagcgtctccgggctaagtcgggttcccggcaggggtccccgcccccagcccagctcctcggcaccccgggccgcggcacagcgcggggaggcgtcccagcgccaagctggtcggactggttctgagcaggaagtctcccgccctcgccccgggcagccgaccagccccacgccggccccgggcgtccgtcgttcggtcccgcgatccgtccgacggtccacccagtgcttgcggcctcgcggccgggccggcctgggctgcaatcaatgcggctttgtctgggacgcccacatcccagaggccattcccgggtcggcaaatcggagcgcggccggggcgcgcgggggtgagataagcggccatgtgatcccacctgggctggaaggggaggggcgccaggtgaggcggcggccggcggggcgcgggcggccacgcggggctcctgcagcatggctgtcagcaggaaggactggtccgcgctgtccaggtgagcgccggagggagccgggaggggcggggggtcggcggggagcctttgggtctcctctcctcggggcaccggcctcctccccgcctgggaccctgacactgaggctggatcctggtcttgctgcgactcgcgggagacaggattggggccaaactcgggacccctgaggttacagggtgggtcttctcccctcggggcctgaggccccacacagggtgcttaggggaaggctggtcctcagtctggacgcccgctgggatatggccccccctgtggaaggtggaagcaggaaggaacgttttgggggattgtggaggtgttcaggagtaacctccaagcctcattcctgagagaagcctctctcactgcccccgtgtgtctctggcggagaggacccctgggaggtgtcccacagcccctcttgggagggggagcagggagagccgtcttggaggggtcagtgaagaggactggagggaagcagacccgtctcccactaaggacgctcagaatctcagcatggcattttggggtggcatctgggctgggaaccttaagatagttgccatccccatctgtgctgctgcaatctttacttgtacactggtctcctaaagggtcggggatgaggcatcctacccctgcctgctggacatcccatcagggtccgagaggcctggggaaggcgggtgttcagaaggcagcacccctcatggagattggtgacctctagcgacttctcttggagcgaccctgcacctctgccaagaaggccccctgtgagcattttcacctcattcctccactgggcgcccccgtcccccatcttgtccctaaggaaactgaggctcctgcggtagcccagagctggagcctgctcttttgatccctttctagccaggtagatattagcctcttagctcctcccaggtgggcatttgggtcttggcctttcctgagccagggctatctctgc

SEQ ID NO: 4054 - DNA, 6000 bp, Homo sapiens
ggctcagcgaaacttacctgggacataaaactgtgactggtacttcattgcagaaggaagaagggtctgctctggtgttgtaggttgatatttcctttgagaaggaaaaacaatcattgttactatatgaaaagacaaggtcctcatgacattctttagttcctgggatctgataaaattctgtgattattatttgcatcctagtgactttcttccacatgccagatatggtcttgaaaactttaaaaagcttcccctctaggagtataatgttatagatccagtagtcctctgtctgccccattctgttgtatttaaacattttatctgagctcagagttatttgtttttattttgttcattgcatagagaagaaataattatagtccacttaatcagctttttcgaagagttggccttcactgccggttggaagactagggtttttcttttttattaaaacctaagatatcatgtagattatatgatatatgatagttatatttatctttattttgcttatgtttgatttctttccccacatctgatcagttcatgtcttctgtattgaaagcattctgaggtcaggctcagtggctcacgcttgtaatcccagcactttaggaggccgagacgggaggatcgcttgagtctgggaattcaaaaccagcctgggcaacatagagagaccctatctctacacagaattaaaaaattaatggggcatggtggtgcacacctgtagttccagttactagggaggctgaggcaggaagatcacttgagcctcaaggctgcagtgagccctgattgtgccactgcacttcaaactgggtgacagagcaagacccccatctcaaaataaataaataaataaataaataaataaataaataaataaagtaaaataaagaaaagaatttaaaaaaagtatattatgggatatctaaaagttgactgtagaatgaaatatgttattattatttttttgagatggagtttcactcttgttgtccaggctggagtgcagtggcacaatctcagctctctgcagcctctgcctcccgggcacaaggattctcctgcctcagcctcccgagtagttgggattacaggcgcctgtcaccatgcctggctaatttttgtatttctagtagagacgaggtttcaccatattggccaggctgatctcgaactcctgacctcaggtgatctgcttgcttcagcctcccaaagtgctgggattacaggcgtgagccactacacctggccagacatatattattgaagagtaagtagtataatggttataaacactgagcagggccttagcaaaataggtagctactatcatgtggcttagggaaatgaaaatagctcagtggagctagagtataggtagtatagggtaatttaaataaaagttaaagtatatttaagcttggtatgtctacaaaattagattaaaagaagaaaaccaagacctttagtgataggaattgcatgtaattttttttttttttttttttgagacggagtttcactcttgttgcccaggctggagtacagtggcatgatctcggctcactgcaacctccgccttctggtttcaagcgattctcctgcctcagcctcctgagtagctgggattacaggcacccaccaccacacctggctaatttttgtatttttagtagaggtggggtttcaccatgttggccaggatggtctcaaactcctggcctcgcgatctgcccgcctcagcttcccaaagggctagacttataggcgtgagccactttgcccagctgtaagttttaaagaaccatttactcagttacaaccagtaaagcaggcgtgtttcagaggagagtttagtcattgtttgcttaattgtcaggaacaatacaaactgctctggaagaataatacgggtatgtgcagggggtgggagggcaagaacaacagctttctgaaggggtgtttgtttctgtgtgtatcaagagaaagcaggaaatgggagctggctaggtcagcggtgatgaagactctctctcctgtcccagctcatttctgtttgctctaactatgacagcagggcttggaacaagtttgcagggatgaaggcctgaccagaacatcagggaaacaatccaagtgtgaggtagtgcaagtgctagtagacctatgatcaaggatggacaaaaagggaattctttaagcagaaggtgggtggcaggcaggaaaagtacaggggctttcagtccccagggaaagctgtgacaggggcacgatgcagcagctccctgctctcttctctctcctccctagaaaaaaacagaaaatgaagccaccaggaagcacactattcagcagaaagtggtaaaacaatgtaattgagggagttgtagactttcttcctgaaaaacgctcagtgttagatagctctcccccaccttttgtgggttcaaaatgaccttgtgtggaagcagagggattgccctgatggccctgcatgtgcatgcaattgagtgatgctggtctaagatactagaggctcatctttctacaatgatgaacagttgaaaagcaaagtatctaataataggctgggtgtggagggggtggatgtcttttccattctttcctcttccagctcctgaagcctgggggaataagcaagagggatgttgagctcttgattaggtttgtaacccagacactactggtcctgatgaattaaaagaacattaaggctgtagccagcgacaccacatttttcatttaaccaaattgattacagctctgactctcctaatagcctgggaaggcaggctggcttcctctgacgtgcttaggagaagaagctggggcaccagattgacacaaggctttgatcagaacagtaggcagctgagtctgctgccgtggaaaagttgaagcgcatcaggccagttcgcttggcttgattctgtgcgagggggctgcagccctctttctggctggagtcctgcagatactggttgttggcatggggagcaggaaggaatgaatagagtagagccagcccctttggggaagcaacaagtcctggaacacacctggctaagggtgggggtggtgggtaacctctttgaatgtaaaggtctcattagtccattgtaacttggctccccatttcctccactgcccttgttctggctgctccacaggtgaagggggagggcctctgtgcctcaggggctgtgagcacagcttcagcctgattgaggactccccagaggtcttcccccacctttttcgtaacatccactgagtcggcagccacttgccgccttgctctgaggcaagccaaactggggatagtctccaactggggatggtctgccagtaacacctggtattattggcacagtgatctgaaaagtgccctccactgcctcttctctccccaaagcctgaatcccacttgttctttgcatctcctcatattgcattcattccacctctcactcactcacctagtacgtattgaagactgacctcaggccatgtacggttttgtacccaaaagcgaggcaggatgctacagtcctattataaaagttaactccaggccaagcgcagtggctcatgcttgtaatcccagcactttgagaggctgaagtgggtggatcccttgaggtcaggagttcgagactagcctggccaacatggcaaaaccccatctctactaagaatacaaaaattagccgggtgtggtggcgcacgtctgtaatcccagctgctcgggaggctgaggcgggagaatcccttcaacccaggaggcagaggtggcagtgagccaagatcgcgccactgcacactgcactgcaggttgggtaacagagtgagacttgtctaaaaaaaaaagaaaaaaaaaagttaactccaaaagagttaaagcggatattcaaattgtgctgtaaggaagttctggtgctgccctggcagctcctgggtaggttaggaagggctctgttttgcccttgccacccttctctttctcccaggctcttccgaaatgccaccacttaactgtctgcagctccttggtccaacgcaccattcagggactgtttccccacctgcaaactgcccacgcaaaatgcccaccttaaagggatgtcttacgtattaagcaaactaacatgtgtgaacaccctgtctttaataaccagtagcgtcctccttttctttctaccgtcttccagctcctctctccttgtcaccctgcagttcttactctcccctccgctgttctatttccataggcctcaggcaccgctgtcttctctcaagcatcctcctctctctcacccaacctttaggctcagaagcccccaccatccaggtggccaatataggtagcggtgacctaagcggagaggggaggaggggaggctaggggctcagggatcccaaaatggccatggggatgggggctcctgagcccaataatttagccttgagctgcagtgggttcgggaagttggagagaaggagctggctagaaaggagaccagccttctggggtggggagtatagagctcctttccagtccgccttcctgctggggaagcagcctccttgaccttgagcaggaggcgggggcgccgagcgcctggggggctgcgcagaaagaacccgtcccggggggcaggcccgccctccgcctcctccgggcctcctccgcctcggtccccgccctcccacgccgcttggtctcctcccctcactgcagcgctcgccgcgcgcgcccatcgatcaggccccctccctctgccgcctcggcgcagactgctaagctcagcaagtcttgcggcaaaggcacttcggagccgagttggggcagcggtggagcggggacttcgcgcccccaggggaacgggcgcccctgcgaaaccgtcgccagccacgcgtccttgccgtccgacgccccctcacattggagaccccggatctctcccgcctccttcgggtcgctctccggtaagtccatacccccgccggtgggggcacggacctccctctccaaagtttctcctttcctgctactgagtcgaggggccacggggtggtctgggtcccgagaggtgagtagggttggggaagtttgaggccaagggggccgggagtctgccccgtcctttgggggagtttggaagcgtccggatggaaggttcgtctcggggagtcggacccgaggggcgaggagccggctcctctgagggactggggctgggctgggggcagatttcctcccgcgggttgctgcagagaggggcgggccacgcgtcccctgcaccggccggctctgcgcccccgtccctctctcctttccctgggacgaacccactcgcgtctagcccagcccccgccagccctagcggtctccaaggaaggttcttttgccccagtctcaagcttcggggacccctggcaccgccgtcgtgggaagtggggcggggggtggggtctgggcgctgggagccggagaccctgggtcagggagaggttggggagacagactgcaggggccatctggaagcaacgggcacgaggagctggggcaggggcccaagaaggggctggaggcgcccctcccctctctccaaatctcatgactcagcacgacctaggacgccccgtccctgcttcagctctgtccccaagggctaggctcgcagcctggcgggtgctgacagcccgactcccttttctggactcttccatgtacctttcccatttggggtgcccccttcccctgcctatgctccttcccccacctctggggcacagggcttttatttttcaactaaaaagtggagctttatcgtttcacatcccactaagccaggccccctcatcctgtctcctcccttttcatccccacattccacaggtgcctccaggacacccccagcccatggctcgtggggtgtctcctggcagggcagt

SEQ ID NO: 4055 - DNA, 6000 bp, Homo sapiens
agactcctaaagactttccttcccctttgcatttcagacagaaaaggatatcatcttgcgggaggacttagaggaactgcaggcccgctatcccaatcgctttaagctctggttcactctggatcatcccccaaaaggtatccttcccatttctggacatcccactatcccctcatcgtcaaaatcaaagccttgcccctttgtgaattctggcttcattgaaatcaaccttgcctcacactgccaactcggaagtctgagtgcacagacacagtgatctcctggtccctttcctttgggttcctgtttaccaggtgggtgacagggatggcggtgctgctaaggctcagcttgaggcaggctgagtatacccattcccagctgctgctaccacttgacactttctccagagcctttcagggccctccccagtctcatggcaccacacccccttgccagcatgtatctggagtattaagtactttcttctccccatacttcagattgggcctacagcaagggctttgtgactgccgacatgatccgggaacacctgcccgctccaggggatgatgtgctggtactgctttgtgggccacccccaatggtgcagctggcctgccatcccaacttggacaaactgggctactcacaaaagatgcgattcacctactgagcatcctccagcttccctggtgctgttcgctgcagttgttccccatcagtactcaagcactataagccttagattcctttcctcagagtttcaggttttttcagttacatctagagctgaaatctggatagtacctgcaggaacaatattcctgtagccatggaagagggccaaggctcagtcactccttggatggcctcctaaatctccccgtggcaacaggtccaggagaggcccatggagcagtctcttccatggagtaagaaggaagggagcatgtacgcttggtccaagattggctagttccttgatagcatcttactctcaccttctttgtgtctgtgatgaaaggaacagtctgtgcaatgggttttacttaaacttcactgttcaacctatgagcaaatctgtatgtgtgagtataagttgagcatagcatacttccagaggtggtcttatggagatggcaagaaaggaggaaatgatttcttcagatctcaaaggagtctgaaatatcatatttctgtgtgtgtctctctcagcccctgcccaggctagagggaaacagctactgataatcgaaaactgctgtttgtggcaggaacccctggctgtgcaaataaatggggctgaggcccctgtgtgatattgaaagggttgttgtgtctggggtccttgtttccaaatccccgaggacctagggaggaagggtttgccaccatgcaactctcccaggtgttccaaagaacctttgagaagttgtaccatgtgctgaaatgtgagctgccagcagactcagtgatcatctcagcagctgtctcagcagagccagagctccgcttctccctggaggctctcgaggtgggggaaggagaacacacattagaggggacatttttgagcccagctgcccctcacagtgttcccttgataggccactcttccccttcttccttctcttggcctatccttcaccatatttatccttcagggaacctggcacacaaatcaaagtgttgtctttctgtttggaagggaagccttcttctttaaaaagtaacctgacatcaccagccctggccggaattgttgatgcccagatagagttggcctcccccaggctcatctgtcctgagtacccttctcctctgctatgtagcatgacccaatctactccctttcccagggtaggactagggcagcctctccagattcttctttgttactcccattgcaacaaaacaatgtggtgggctcagaatgaaggtcgacattgcttttctgcttttcagcaactgtctattgctgtttctggggcttctgagagaaagatttgtgggaccctcagaattcactcctccccagggcagaaccttcagtaaattctgttggtggtgttccatccaacatttcttgatcagctaatatgtgtatggcactgggctctgtaacacagtctcagccacctcacctccaggaaggaaaatcttgcttaggaacgttgggctcagatagtgaagcaggcttgtaaagagaatttcctgcgtggaagatcaccattccttgtcttgcatgggtttttgtctcatccactcaacatacaaatgtttattaaggatctggcatgtgccaagcactatgcgaggccctgaggataaaagtgtgaccaacactggtcttagacccccaaagaactcacagtctaagacagacaaatgacatttttttttttttttttgagacggaggctcgctccgtcacccaggctggagtacagtggcgcaatctcggctcactgcaagctccgcctcctgggttcacaccattctcctgcctcagcctcccgagtagctgggactacaggcgcccgccaccacgcccggctaactttttgtatttttagtagagatggggtttcaccgtgttagccaggatggtctcgatctcctgacctcgtgatccgcccgcctcagcctcccaaagtgctgggattacaggcgtgagccactgcgcccggccaacaagtgacaaataattataacagtgtgactaataccatagcagaggtacatacaaagtgcagctgggaagaggttgagaaagattcagaaagggaggaaggggggaaagagaggtaacatttttgacagcctgggcaacatagtgagaccctatctctacaaaaataaaaaattaactgggcatggtggcacgaatctgtagcccagctacttgggaggctgagttgagaggatcccgtgaagcccaggagttcgaggctgcagtgagctatgatcttatgatcacaccactgtactccagcctaggtgacagattgagagcctgtccctaaaaatacaaacaaaaatggttttgagttaacagccatgtaccaagtactgtgctaagtactcgatctacatcacataatttaatccttatgataatcatgtgagctgaagattaataatttaccaaaggtcatacagctggtcagtggctgacagagcctaaatgtgaatttaggattgtctgaggccaaagtcaaacctagaagtgggcattgtaaactgctggcatcttgcagcagacaatgagaagggcagtccaacagaaggatcagcatgtgcaacagcctggaggaatgaaagagaagttcacttcagagaactagttcaccaaggcccaacatgccagagggaaaatggagaatgatgaggccttagaagttagagccagctcgcaaagagcctcgaaacactatgctgaagaaacctggactcaatcctgtggacagtgaaaagtttctgagggttttatacaaatggcaacacggtaatagctaacatttataaagcacttaccattggctaggcctcataataagagcctgcatgaattatctcactcaatcctgacaaagacccaatgaaatagtattattttattcccacttttcagatgaggtaattatcatttggaggggttcagtaatgtgctcaagatcatagactggcctgggacagaagcttggctctatgtgactccagagcccatgcttttaactaggaccaagagaattaaccccacgtccctgaagcacctatatcagattacaatgagtcactttctctgcctctagaatggcactagttgcacagtgagctatgatatgattgcaccactgcattccagcctaggtgacagtaagaacctgtccctaaaaaagaaaaattaaaaatttttttgagttaacagccatattgaggtactgtgccaagtactctatctacatcagatagtttaatccttatgataatcctgtgagttaaaggtttgctcacaagaggaagattgacattgcttttctgcttttcagcaactgtgtattgctgtatctggggctccagagcatggggctctagagtcacatagagccaagcttctgtccctggccagtctgtgaccttgagcatattagtgaacccctccaaatgatagttacctcatctgaaaagtgggaataaaataatactatttcattcttgggagaaatgagaaaatggccagaccctgaaatccccttctgtgttgtgtggttcagacaagggctgcactaccctatgttgtctcgcgatctgcactctaggtgcctgtgggagcaggaactggggcacgggttcaccagcaagagtagttagaaacaattctgctctctgataagaaaataacaggaggcagactgaggtctagcccagggcctggcacatggtaggggctcaataaatagtttgtggaagggaaggaaggaccatgcggttgaagaagagattaagaagtgtttcagaggtgaaacgactagccttggggacagaggagatgagataaggtgtatggtagaaaattcagcattccctcccgacgttctgtctcattctctgaaatttcttctccatcacgcacttcaggctgcgataacgaggtggagtgtagaatccgacgaacgtcctctaccccggggcgggtggaggttacctggctgcggcggggaggtgggcaggcggcagggaaggcggggcagcagggcggggcccggggcgggaggtgtggccggcgggcgcgggcctgtgattgggactccgcgagagggcctaggattggagggcccaggcagagcccgcgaggaggtgacgcggctgcggaggtgacgcgggaggtcgcgcgccccttccggcgcggggagggcgctgaagatcggggccgctcggccgcaggccgcctccagcgccgcgggatgtagcgcgggggaccgcggcccccagcagagcccgcctgcccggctgtaagtctcccaggggctgcgcggtgggcagggactcggcgggagcgcggggaccccgggggccccgacccaggcctgcggaggagacagctgttgggggaacccgctccgacttgccagggggctcgggccccagccaaggagccgcctggcctccaggcatccagccggtcaggttgtaaacatttccggcccctcccactgcgcgccgcctccgaggcggcctaggtgcggtgggcgctcgtccccggctgtcccccgactcccggcagtcctgtgagtgctgcgcctttagccccacggggtggagatgcatgggttccccagatcgggaccagagagccagagttaagcctggccccgaggccgccgcgcgtggggagggagggctgcgggcctaggtcgcgaaccgcctctcagcggggaacagccgcattgggttgccaggaagccctaaggttcctccaccaacaatctttggcaggtcaagtcctgacagtgccctcactttgatggggtgggaagggaggttggtgatcgctctgcagggttaaggtaatcctgaaggctgaaatgcggggcagaatcgaaggtactttgggggaaaatgaaatttcattaccttaggtatctaggattgatgtattctatcttctgtttgagaattttggtcttcaagccttcgatttttaagaaaatagataagtgttttttttccctcagtttctggtgctctttgggagaatgggaaactgacaaggccaatttcagtttacaccgtttcagatgtcaaaggagcgctaggaggccatggtactttactagattaaccatagtacttccctcaagtgattcagaagacgggctagaaaatacagcggagaatacataggctgccatctacaaaacaaatgattgtaatggctggttcttttctgaaatgaagtaatagtggggtcggttcactgcttttctcttttcc

SEQ ID NO: 4056 - DNA, 6000 bp, Homo sapiens
tttacattggaatgtgggaggctattcattcaatacatatttattgaatactatgtggtgggtgcagtttgggagatgcagggatgcacaagacaaagtccttgttctctgaggctagaatgaaaagcaagggctgactgtgagagaattcagagtttccttaggagattggactttaagagttagagaaagtcatgcattaattcatctgccaaaaattttgtgagcacaagtgccaggcattgttctaggctctgagaatacagatgtttaaaaaccaaagtcaaaaaatgccatgtcctacatgttagttgattttaagcaggagaagcagatgtttgctttggaaacatcaccctggctgggttacttgagaaaagattggaaggggaataagattagaggtagctcagtccctttcctcccgcttcttgaagattcacagcctttgctgagcttcacttccgtccttgaggacttcctcttttgtcaggagccctcttttccttttatgcctctactgtacctatcttggaaacctgacctcatgttctacacctgggcttccaagtgctgcagaagaaaatgatgaaaacattcggatgtttttattcatagccacaacatattagagtatccaatgccagctgtatcttcaactctgctgacaattctctctctctctcctctctctggagctaccactctcattccttattcctttctattttaaccttaaccactttttttttttgagatggagtttcactcttgttgcccagcctggagtacaatggcgcgatctcggctcaccgcaacctctgcctccctggttcaagcgattctcctgccttagcttcccgagtagctggtattacaggcatgcgccaccacgcccagctatttttgtatctttagtagagacggggtttctccatgttggtcaggctagtctggaactcccgaccttaggtgatgcgtccacctcggcctcccaaagttctgggattataggcgtgagccaccgtgcccagcaaccttaaccactttctttaagcctttaacctcatcttgagcctttctctctcagcagattgcttagagactacaaggcagcaactagtcctctcaacatctagtctcaagttctagtctctttaccagtctacagatgcctctgcttttgtacagccttcctctcaaagatatcagaggcagctccaccccatatacctgggtcccaactccctcctattcatgatctcgctctccttggtcttactcttcagcatatgaaaatgcttaagcctttcttatcctaaaaagaaaaaacaaaagtctcccctttgatcctgcattcccctctacccactgccttatatttctccttgtcttaaattgccaagcttctagaaaaagcatgtgtcttttattccagatccaggttcattcattcacttagtgaccaataatttattgagcaccagctttgaatcagggaatgaattaggcctagaatccactggaggcattttctagcctaccctcctggaggttcctgctgcactggttatccagtcattctcttctgagattctcccaccctagtttctgacactctgtggcctccagtttttctcttacctctctggttgtttcttctttcctccttatgcccatctggacgacctcatacaggcttataacttcactgactacccataacctacagaatccaaagctgctatcacttgttcacaccccaatatgagtttagtttcataagtttgctgtctactagacatccccatctagacattccacagatacctcaaacccaacatgttcaaaattaagctcaagatccctctgccaacacctgggccctgtctttctaattgtccctaacttagggaatggtaccacctgccaacaatttctaaggcttcaaatggggagtaattccagagtcctcctcttccctaatttcctacattttatatatttatcaaatactattgatttctctttataagtatcttttgtatctgctccgtttttttcatccccactgccacagctctggcacagttttgagattccctgatttcccacctggaacgtagccatggtttctctgttgagctcccaggctgcactcctgacttgtgttactaggtcctggcagaaagcaaatggcacactgcacttgaggggtaatttgaggagaggttaaaaaataaggggacaatttataaagggtcggcggagtacaggaaaaccacaagaaatagtgtacaatctactagggccagtagcaaatcaatgtttccacccccaggcccgaaaagtcaaaggaggggagtgattacctgaatcaagagagagggagggggctggcactgtggctcacgcctgtaatcccagcactttgggaggctgaggagggtggatcatgaggtcaggagattgagaccatcctggctaacaaagtgaaaccctgtctctactaaaaatacaaaaaaaatttggccgggcatggtggcatgcgcctgtagtcccagctactcaggaggctgaggcaggagaatcgcttgcacccgggaggcagaggttgcagtaagccactgcactccagcctgggcaatagagtgagactcggtctcaagaaaaagaaaaaaagaaaaacaaaagagagagggaggggagagagaaccacccgtggaagctgtgatctttggttgagggtggcagccagcgcactgtgaccccaaagagaggaatcctgaagaataaatatccagtttcccctgacctccctccttattcaatcttcagccatggcccccattggccaacccagtctaggaagccagagggccaggaagatctggaggggcaaacggaagacatgcagtgcatcttccaaatccttctctataatatgccaggaagtctttttctggtcacactacttcccagttccatttgtgcacagcaggttctctgtcacctacagcacctaaactttttggcatgccctggtttctctttattcaattttttccttaccaaaatgcatgataaagcctgtgatctgatcctccactcagctacctatgcctacttcctgttagttctttccttcagacttttcaccccagcagcatagaaccaccagtggtcgccgggcgcggtggctcacgcctgtaatcccagcactttgggaggccgaggtgggtggaacacaaggtcaggagatcgagaccatcctggctaacacggtgaaaccctgtctctactaaaaatacaaaaaaaaaaaaaaaaaaaaagaaaaaattagctgggcatagtggcgggcgcctgtagtcccagctactccggaggctgggccagaagaatggcgtgaacccgggaggcagagcttgcagcgagccgagatcacgccactgcactccagcctgggcgacagagcaagactccgtctcaaaaaaaaaaaaaaaaaaaagaaccaccagtggcccctgtaacactctgttctctcaggctcctgagcttgacctgatgacagacacagagtaagctgtcataaatatttgtatggtgaagaagtgcacggacacgttttttaacccctgtggctcctgagatcaggagtagcatcatatacattatgacatatgtgcagaccaagctgccttcagttaattatcaagatgtttcacctacattctctcctttgatcattacgaaagcgtgataggtgaggacgctattcttgatattcagagggtgaagtggaatactgaaagtcacaagcattgggtacagaaggcactgtaggatcagaaaggggagtgatccctttcctccccatcataagagtcacagccgacacttctataacaaaagacaagttaaccagagaaaagcataacaaatttatttaatcatggttttacttgagaggctgaggaccaggtgttaatcttcatagtctgtcgagaaagaaagaagaaatgagggcagtggaggaaaacacgattcacgtttttaggaaaatatactttgagattagtgatcgttggtactatgcaaaccaaatgcaaacgaggagctggccaactcatggtttcttttgggtggagcctttaggaaaattcttccagagaccactgctggaagaaaggtatttagagtagaaaatttaaatataacatattgtatgaaaggttttttttttttacttttttttctcactaccctagttgggttggaggatcctctatctcccctccctacttaggttgactgctgtttcctggatcgcagctcggaagatccacctgggcgaatacaaaaacaaacgagactccccttccagaaagggaggaaggaaggagacagaaagacgaatgacactgagcgtgtaaagcccggagacagcctctctctaccccaacctaaccctcaaggtaggggatcccccgaacatcgctaccgtaattatggtagaaattcctgaaacggataactggacctcagcaccgtcatttctagcagaatgattgagctttcctctgacccaaagccaaggggttccagcaggggaaactaacgaccatccgcaaaaaccctcacccaagtggggagtggaaatcctggctcttgggttgcagagcacaacttgacgccagcgcgtttctcttcccccacgcaatggcaagtggggcgggagtcggaggggagaggaggagaggagaagagaagaggagggggaaggggaggggagaggcgaagggcggcccgggttccagcagccgccccgccctccggctcgcggcggattcggcgctgcggctggagccggcggccgggtgcctgcctgtccaggcagggtctggccgagcgtcgcgtcgccgtgcagtgcgccgggtgtccgggagatggcttcccctctctcgcccgctgctgccgctattgtctcacccggggtggcctgactctgcgagctcgcgcacgctctcggcggagagcacccctccccacccccacaagctggtccttgcgccctttgctgcctctccctctgccccttggagcctagggtctgtgcggagcctggagaggggagcggcccgggagcaggcggcgtgcggccggccagctcctctcgcgctggtgcaagaggcgcctggagccgcagagcgagcccgggaggcgcggagcgagcagcccacgtcgccaggcacaagacacgtcggatgttgcagcagagccagcagctagcgcaggtaggacacgcatcctgcgggttgcatcggccccagcgtctgtaaagtgcccccagagtggaggcagccgaggtcagggggctctccctccaacatggcaacagcggaggtgcaacaatggaagcagccgagggttcctggcggcgggctgagcggcggacgccgtgggagcctgagctcctgcccgccgggcagagcaggttgcccctcaccccactccactccactccagcagcttcagggcctctggggctccaggcacccgcgtccccacccccttctcgctaaacacacttcctggctcccagctgcagggcgatctgaaccagtcaatggctttggggtttgtttatttaagataagaaataaaaaaagcaaaacctgtcctgtgatggggttagtgccttctgtggactgggtgagaagtcggcatctagcctggggaatgtgtacgtttcttagtcgggcggagggtagaattggattctcccttataaggatactgcagcaaaaggagactgaaagcttgaaagagggagagggaccctcaggcctgagttcgccggtgctgggagaaggcgctgctctcctggcctatacttgtccctcattttcagctcccgacagcggtgactttgatgttggaggagcaatcgcagcaggaagcacaagcaaggctgccaagctggtgtggggtggagtaggg

SEQ ID NO: 4057 - DNA, 6000 bp, Homo sapiens
ctccatctcagggaaaaaaaagaaaagaaaaagaaatacagggccgggtgtggtggctcatacctgtaattccagcactttgggaggctgaggcgggtggatcacttgaggtcaggagttcgagaccagcctggcctacatagtgaaaccccgtttctactaaaaatgcaaaaattagctggccgtggtggcacgcgcctgtagtcccagctattcgagaggctgaggcaggaaaatcgcttgaaactgggaggtggaggttgtagtgaaccaagatcttgccactgtactccagcatgggtggcagagcgagactccatcttaaaaaaaaaacagagtagaggtgtatcatttatggttgattaaatatggtgtctgtggtgtttgtgcttatgcctataaaaagttgggcaccgggacattggtgaggaatgtaatttttatgatcacattgtttctgggcaaaaacaggttcaacctacatcatttttacctgcagtgccttttccaggaatataacccaagataaatttgaagactccctgcagttccacacagctctgccatctgcaacgtgtgtctctctgcctttgcggttttctgtgttccaagggtgtctgtggatcctgggagctccctgagggcaggggtcagggaagatcccagttctgtggggccgtcttaagaaaaaacccgcaaaattccaaatacaaaattaggtacaacagtgatatttacttacggccagcaagaagataacaatttacatgagccttggacattcagggtccctttctcctgacatttcttcattccatttaccagaaatccttacataaaaatgcttcctgttcgtaaactggcttcccctcttcacctaggacactctacagttcccagctttcatagcccaccctctccccaccatcctgcaagtcgagaagccctaaaacttgagcttcattcccttcacctctgcctctgcctctgccttcacttgttctctaatagcccagagaacaaggctctgcacatggggagcccgggcaggggacggtcagagagcaatgggcacccccaggccagtctgtctcacagtgaggtcatccaaccacctgaatcagaatcccctggatggtttatctgaaatgcagactctgagaactacagaatctgactctggggtaggacctcagcacctgcattggcccacactctccaggtgattccaaggtccactgctctagtgccttactctctgcctagttgggtcactggtgggggacaacagtcctcattgactccccagaccccaccccatatctcccaaggaggctgagcagaggctgcacacaacacacagtgtcgtgtgtgtggagggtccactgagggaccctcagtgacccatgccacatcccaggcctcccttctctgattcggctcatgtgccaggcaccagtaggagccatcctctcctcacagcccccaccacacaaacagcatccccaccagttccatatcctgacccctatatgagagagccacctggaattgagctaaggatcatttctagcagcatgtaatccctgcatccctctcccaagacactctgatgtcacggagttccaggcttcctggtgggaaataatgcatggccaagcccagaaattaaatttggagggtgaaaggtcaataacagggccattaaatcctctgggtaattacctaagagcttccaaaggactgtgaattggggcagcttttcccaggaaagtatgagactcagaatggcagcaatgggagcagggttgggagaaaaatgtcaaccacataccatgcaccagccactgtgctcatgccagccatatagtccctgtaacatctcacagcaacctataagtatgaatccattccattattgctatcttcatcctaaagaagtgctagggagacttggcttggtgtttggactctgtcatttgaggaccctggattcccgtcttagctctgttacatactggttaggtaaacactgaaccttgtttttctcctatcactagagtcctagtattggtcaaatttttgatgagatgatgcataaatgtgctagcaccttgccttgcatgtagtaggtgctcaataaatgttaactgctattacttgaattaatatcgttactcaggaaagaatcagagctggggaagttcaatactttgcctgaagcaagacagagtaaatggacaagtagagttccaaatccaaatctttccagctctaaaagctacactctttctccaatctcattgggttctaagacatttggagtcagctcaagataagccttcccctattttcttctcacagctgatgaaattcccttatgcctcatctagtacatctcacaggctttgccactcaggatcaaccacttagtgaacgttacttgcatttatcccatttattatttcaataatcagttattggacatctactataaaggactggtcttatcttattaaggtgtaagacagtcataggctccagaagcttaccctctggttaggagataagacacttgagtatgcatagttattgggaagctggggtgctgacatgagtgctctctccggtcgtgcagttggtaaaggactcctaaaatgtcctccttttcaccatcatcctgtctacattgacattggcccttagactggaaaggtggctccagtgactcgacaagggactcaaatgctcaggctaaaagcttggagtcaagttttgacccctttcaatcagtcagtcttacagttctgccaagtcttctttacaaaggcccatgcatttactctattctcactgctcccctcctcctagattcctgcaacagctacctcaatagtctcccatcctcctgcctctttcatcccaaatcacctgaggatgggtccacagataaactgctgagcctggcaattcgggcccttcatcagctgctcccaccctgtatactcaatgtggcattgtcgcactgtgaaaatgaggtctcacattctgcctacagattttgggctactgccttaaacgatctgggcctccatcccccggtctgttaaaaggggatattagtcaactcagagtctaagatgacagagatgagaaaaggctggcatctaatagtagctctataattttcctcccttgccccctaccctccagacaacccattctactctgcttgtctccactttcctgcctttgctggtccccatattctcttccagttcaaatcctatccctccaactaggctcagttggagactcagctcctccgttaaaccttttgtgaataatgctagtccattaaggtggtttctttttgtatttctatggcacttccatcgtcttgaaatattaaaattggtttcatatagttccaacctgtcactctgagctccttgaggccattatgctccgtagcaggggtggagagtgggaacatgggggtggtttagtgggaacttaatatgtgctcattcaatatatgaaggtgagaatcccctctgtgcatacagaactcagaccttcaagccaacttcacaaaagccaccaggcatggcagtcaccactggctgtacccttggaaaagacagggccagaagctcaagcactggatgacggcaggcagcccagggaagccactcctcacaggactccacaccttggcctccacctcatccattcccctgttgttggttctgcaggctctggtccagacccatcagtagggtgtggcctgccatggagccgagtttgtgatgtctgttctgagtggtccaggctgaagtccccaccaaggcatgggtgttgggcattgggcctttgccctcctctagtggcagtcacccagcttttctaagccaccaggcagcagcctagcacccacctttggcaccttcttactttcctcccccagtcttcatgatgtccagctggcagagtggggaaccctgaagccaaacccctaactgggcctgccagttcctgactgaaattgacctccttcattgagagccaggacggaatcttccagaatgctagagctgcacggctcaggatgcaatgctggaaaagcatgacaactaaaggggtcttccactccattctttagggtgagaggtgcctgggcccagtgacaaattctcacccaccccactacattccttagtccactgttaacttcgggagggtagcaccatgcaaagcaaaaatgtgatcttaggtgcatgctgtgactgtgagctgcacctgtcctcacaaagctgctgaattccccattcgtctcctggcctttgcaagagggtccgaggcagtatgagagaagccaacccttctcttcccggacccaagggctgtgccccttctctcagccaagccttgtgtctctaggcacaaggacagctcaagcgttagcgtctggccccacccaactccttcctcccgggtgtgtgtgcgttaggtagagggggcctctggccactcaggagttaaaatggcagcgggactggagggggttggcgtggcatgcagactgggaggaggcgaccggagtgggctggggaggttgggagagcggcggagaagcgagtgaggagggcgagcgcgaagccgggaagaggggcgcgcgtggagggggtgccgggcgccgcgagggcctgctccgggcacctgcgaacgcgcggcgctctcaaggagcgcctggctctcgcccgccagcctccggccgcgacgcgcccagggcgcggagagggggtggggacggattgggattctgccatcgccctcaccggctgggccctggagccgctcccaggataactccacgttggggagggcgcccgccgagcctccccggcctgtgcagacggcgcgcgcggcgggagggcgcggaccagcgtccccagcccggccccgggcggaaggcgagcggagcgcggccgcgcgggcagcagacggcagacggtgcccggcgcccacggggtgagtgtgcagcttcggggctgacctgggcagcgccgccgccgccggggaatcgtggacaccgaggtcgctggcgtggccgaggcgtacgcggcgggagcggccggagcagccgcctcagggctcctggctcctgccccggcaccgcagctccgcctgacccgggtgggggccagaggagggccggccgctgccttccgccgagacgcctgcgggggagccggagacttgggagagggaggcggccgaggggcagagggacggagggctggagaatgcccagaagcggccagggagagggcgcctgggccttcgcctggagaggccagaacctcccccaaactgttgctgggtagagtggggccctggagatgtggaggagccgagaggtggcagtgaggttagggagggcgtgacacgggcggactggcaggctggaagcgctccagagcctggggactttctcctccttggagctcgcgagtctgtgcggagggacaaggtggccttgggtctgtctgaagtatctggaaccaggagctaggctcctcccgggccggctggctggggtccgaccgcagcctgggatgggacctttggggtgggggatgggccggcctggggctcagcctggggactcggtcagggggaagcggaaacggaagggtggctctgagcccaccgcaggacccaggagacaggatgggctggccagccacaggtgggccgtctgtcctgctggcaaagggtggcgcaggctctggctgcccagccggcgaggagccgcggggtgagggaactgagctccatctggggccgagcggagaagctaaagaggtgcaggagacccggaacctggggaggggccccgggggtagcactgtgctccctacccttcctcccccacccaaacgaacaggaaggaaaatgtcagctgggctttgtgctctgttcctcaggctgccg

SEQ ID NO: 4058 - DNA, 6000 bp, Homo sapiens
ggctgaggcattagacttgcttgaatctgggaggtggaggttgcagtgagccgagaatacgccactgcactccagcctaggtgacgacagagtgacactctgtctcaaaaaacaaaaaataaacaaaaaaacctgagaaattggccagacctgatggctcacatctgcaatcctggcactttgggaggccaaggcaggaggatcacttgagcccaggagtgtgaaaccagtcctggcaacataatgaggctctgtctgtacaaaaaatgcacacctatagtcccagctattcaggagacttgaggtgggaggatcgcttgggcgtaggaggtcgaggctgcagtgagccatggttgcgccacggctccagccactgcactccagcctgggcaacagagcaagaccctgtctcaaaaacaaaaacaatactgagaaattagtactggcggcactatttattaaactacagactttattcagactccaccagtttttccactaatgtcccttttctgttccaagatccaatcttgttgccttagtatatatacaattaaaaaaaatgtatatcccactgtacaccattttgttgctggctttttccacttagtagtataccataaggccgggcatggtggcttatgcctgtaatcccagcactttgggaggccgaggcgggcagatcatttgaggtcaggagttcgagaccagcctggccaacatggaggaactccatctctactaaaaatacaaaacctagctggacatactcacttgaacccaggaggcagaggttgctgtgagccgagatcggctgctattgtgccaagagcgagactctctctcaaaaaaaaataataaaatatcataaacatttccccaggctgttaaaattattattattgggccaggcgcggtggctcacacctgtaatcccagcactttgggaggccgaggcggtcagatcacgaggtcaggagatcgagaccatcctggctaacaggtgaaaccccatctctactaaaaatacaaaaaaaaaaaaaaaaaaaaaaggttagctgggcgtggtggttggtgcctgtagtcccagttactcaggaggctgaggcaggagaatggcgtgaacccgggaggcggagcttgcagtaagccgagattgtgccactgcattccagcctgggagacagagcgagactacgtctcaaaaaatatatatattattatttttcttgagatggagtctcgctctccatctcaagaaaaattgagtgcaggctagagtgcagtggcactatctttgctcacttcaacctccgattcccaggttcaagcgattctcctgcctcagcctcccaagtagctaggattacaggctcccgccaccacgtctggctaatttttgtatttttagtagaggtggggtttcgccatgttgatcagactggtctcaatctcctgacctcaaatgatccacccacctccgcctcccaaagtgctgggattacagatgtgagccaccatgcctagcttattaaaattattctatgccatcatttttaatggcagtatagtgttctattgagtggatttgccataagttgcttagccaatggcttattattctacatttaaattgtttctaatttttcactattataaagaatgatgaaatgaaaaactcttacatacttctgatatacacatctctgattattttgccaccagagaaattccagaaatggaattgctgtgttcagggggctcatccctccttccaagtccacagccaggatttggccttgctgctggcccttatgcctgaagagactgctcaccctcatcctgaggcagacagcacagacatctcaaagtggaccaccggccctggatgatggagatggcaagagatgggaacagcaagggagctccaggtccttcatgacttctcaggcttccgtgaggccaaccagatgcagctgggtatctggtctctgtggaatgagaaggatgcttgctcttagcccaaggacaatgaggaggggctgtgtgtgggggtggggcagagactgctaatgcattttgccagcatctttggtttctccaatatccagctagactattagcagttccccaaggatggccttgctcctcacatcatcccccatttcctataaatgggaagtggctggggagtaatgtgtgtgtgtgtgtgtgtgtgtgtgtgtgtgtgtgtgtgtgtgtgtgtggtgggggagggaagagagaggaagggaaagggcaatggtggttttcctacagcggacctcatggacaagtgaggcccagagaagttgttatttgcccagaatgccacagcatcctagagggtagtacgggttttctctgaggctctgaagtcactggccaggcttgctgagggattgctgcctctgccttgtttctggggcccagagactgtttttttctgtgtaatcaggggctgtgggtgaagtaactgccctgaggaattgcctccgttatgtttttttttgttttttgttttgttttgttttgttttgatggtgtcttgctctgtcacccaggctggagtgcagtggcatgatctcagctcactgcaacctccgcctcctaggttcaagccattctcctgcctcagcctccctggtagctgggattacaggtgcgcaccaccataaccagctaatttttgtatttttagtagagacagagtttcaccatgttggccaggctggtctcaaactcctgacctcgtgatctgcccaccttggcctcccaaagtgctgggattacaggcgtgagccactgcacctggccaattgcctctgttttgtctgaaaatggtaccagtctcttgggttgtgctaaggattcaatgagttaatacacacaaagtatttagaaacagtgcctggcacaattagtaatggttaactattattattattattattattattttgagacggagtctcgttctgtcgcccaggctggagtgcagtggcaccatctcggctcactgcaagctccgcctcccgggttcgcgccattctcctgtctcagcctccggagtagctgggaccacaggtgcctgccaccacgcctggctacttttttgtgtttttagtagaggcaggggttcatcgtgttagccaggatggtcttgatctcctgacctcgtgatccgcccgcctcggcctcccaaagtgctgggattacaggcgtgagccactgcgcctggccaactattattattataacatgaggctacatcagcagaaagagggggattttcagagcagagagccctactgtaccctgtattgggtggggcctggccagtgcatccacctggtttagttgggaaggggtgattgggtagggcccaggatcaccatgggatccaggctgtgtgctcactcccctgagctctccttcctcatccccctgtcataaggcataaagcacaagggcccctggaaagaagtggtgggaggcaggaggaagaggggggctcttacttgtctgtggtgcgacaactctctcatgttcccagtgttctttcccaagcctgcaaaataccaccgtccactctctcctggctctgtaattttccagctgacctgaaatttcccctgactcctgacctctttcctggaggagaggggacaccagctcagagaccctggactccaccctagtctctctgcttgccacgagagggtatgccaaagactttggaaagccatctccaggagggtccccaggtagaggtgtgtctgctccagggaggcaacgctgagacagttttcaagttaaacttgtttagtgactcagaaggtagattcttgatttttctcttctcaactctctctggcacctgctctctgttccccactaccaccagggcgccactatttcctctcccttctctatctccctttcttctctgcctccttctacctctcagctggaaggtgcccttagaaatcatttggctcaccccctcttacagaggcccagaacatggaagggacttggcccacgttatacggctgttgacacagggccagcattggaacccagtgccccagtgcctggttggctaaggccaaccaggtcttccccttcgaaggcatcttcctgggactttgtagtattcaagtcaacaatccaactaaattggatttctctccacccaataaaactccatggaggaaaaaaagacaaaactgccccccaacccccaaccccagggccagcctgggactccatcaaagacattctggaacaggtatctgttcggaccttgctcaacagctgacaaagagaacatttcattggcaatttatcatccattcttccccgtacacactcttaagaagaaaaaaaattggaatttggttttcagcgcagaaagagggattgagttagctctgtctgcgtcggagaatagcaaagagcagaagggtaattcggagagaatgtgacatctcctttgaagggatggtcctggacaggtagggagcagctctgcctggagatcgggtggccagaatggcacgcctgggtaatggtcgcagcagactggctccgagtaggggaggggaggtgccccgcgaagccgggtagctttcacctaaatgtttggtggcgagcgacagagggggcggtgccctgccctaggtaatgatagggcagtctgggagccacgcgggggctgcccgtcgcggcgcggctacaaagccagcttcgagacctcccgctttcttcccctgggtaccagccccacccctctatcccccctcgcagcaccccccacctccgtcccgcctcgccccgcccccctcctggcagtcccagcgcgcatgctctctccccccgcggagtaacctggagatttaaaagccgccggctggcgcgcgtggggggcaaggaagggggggcggaaccagcctgcacgcgctggctccgggtgacagccgcgcgcctcggccaggtaggagcgcgccccctcctctcccaggggtgagggtcccggcgcgggaaagggagcagcagtgcacggccgagctccgcgctgtcgcgtgttttgcgccccgcgggatggggctgcgccgtggccgtccggggcgctgcgcgccgagccccgcgcgaatcccagaggagggcgcgtcccacacgctctgccggggcgggtgccgagtgcccggcgcctgcacgggtccccgctgagctgtgctttcttccgcggagggcgggcaggcaggaggtgcccgcgctgtcccaggcggggcggcggtgtgggcggggagcggcccctccccggagccccgggccgggccggaccgggccgggccgacggctggcggaccggccgctggctcctgttgcagcctcccgtgtcagacttttctttggaaagttgcgtttattttcttctcttgtctgggcttcaccggaaaggggcaggatgagtcactgcggcgcgcacagtccgggacttgggggagccgggacgggagccgacggccgcggcgccgcggggtgctcaggcccaggccggctttcttgaggaagagtgagttattaagacagggaaaggggactgagccctcttggacttagaactggggcgagctctgggtacagagttgggactggaccgtgtgtgtgtgtgtgtgtgtgtgtgtgtgtgtgtgtgtgttactgtgtccccttttcagcctcagtttccccctctgtggggagagaaaggccgctgttttctcctcgcctcccaggtctcaggtggggaaggacagagttctgcaaacggcaaacaggtgtgatgtggtggtacctaggcatcccgtgcagcttctcagagctctgggcctaggcaggcttgctagaaaagccccagggacctgcatgctttctccctagtgcgggtcaggccttcctgtagtcttccgctccccccaggcactgcagtcctgt

SEQ ID NO: 4059 - DNA, 6000 bp, Homo sapiens
ctctcagttctccctgaattgggggtctacatcccctgcttagaagcagcccctacacccaggttaatatgtgcttggcttaaggtcccggtgtcaggattgcagccaggaggcccatcagtcaacattaaccacctggaactcacctcctccttagctctagccccagtctcagcattcccagggcagtgtgaactgccctgaacaccctcacccaggccaatttctggttctgagcagaatcatttcctctttctagaagctgcaggacccgcccacctaggagttgtatcctcctgggctcccaagccctgacactgcagacctgcttcccccacacccccaaccccaaccctaaaccactcctaaaggagtgccgagttcagatgggcagaacagtccctctgcagcggcagctggcatatgcccacctcggagcccagggtgtgtctgggtaatgaccgaatggggagtgggaggaggtccccacatgacttcttgccctctttgtggagagagggctcggtttgtgctccagggccagggtggagggataggatggggtcctgaagcaggcaccgacctgagccatctcctcagctctgccattatctctctctcggtgactttgggcaggtccctggccccctcatatgtaaaatgagggaggtgaaccagatggaccctaaggccccttccttgtctcccgttctatggtttgtgccacgtcctttcctccggcctcagatgtgcagggatcatggtcaatgctgacctgactgtctccagacaagaactgtccagaccctcgccacctcagagtccaccctaagcttcctcctaacatattgtcccccagctctgtcattgtgtgtattctagaagcctcctctgcctgctcctgccagggtcttgatctcccaaggactggttctcactgggtctggcgtgcccagtgcctagcacagtgctgggcacatgctaggagttccctgtgttgaaagaccaagcactggctggcatcaccctactcaccttgccttccatgtctcctgaccagcctaagatactcacagctggggtacttgagcccctgggcttcccaggggagagaagtgaggattcgcttctccttgggtacctctgcagtcccaccagtcctcaagcactcatgaaactggcagccgcgcagggccaggccagatcctgccactgcagggcagggtggtgaagactttgctgtctttagccttaaggtatttgcttaagtcattgggctgctctgcccaaaacatgtttctgcccacacccttggcacccacacagggcacacgtgcaagaagccagcaggtgcagataagaccagaggctcaaggatagacagaggtggcagaatttgtctcctttttgcaggtctagcctgagtttgctcatctgaaaaatagctgtttcttagcaagatcagctcagaggtgagatgtgtcaggagggaaccttaggaatactttgggtttatctgcataactcagtgttacgtgtgactgttcagtgtgactgtgtgtgtgtgtggtcgcaagctttggatcacaggggaacacagggatgggctttaaggcagagaatcttgggtgcgttcagaagtcaaagaggacttgggaacaagctggaaatcccttctagaaacagtgctttcaggggcagccgccatcctacttcttcctgggagtccttccccacctggggtctatagctcaggtgtccaggctacagctgtgactgagcttcctgccctcctcttgttggaagacttcccggctccttctctgtccgctggagggctgatctgggcacctctcccctgtactcccatagcaccctatgttccatgctacaatggtttcttcgccttcctgtcttcctcaccagattgtgagatattttcatgacagagattgtgtctgatttatttcattttccccaggacaggatcctggcacttgataaggggtttccagtgaatgaataaatgaatgaatgaatgcagcatcccaccctagggctgggggtgaagtaggttgcttccgaaggattctctctcctgctccagagagaggcatagggttgctgttcatcgctttcatcatgaaacacaaatgatttagcaaaactctaggctgagctgctatggctgttaatgtgtccttggctcctttctctgtttctgagtctttgtctccatcatttttctctgtgtttctatttctgtcacctatctctccatatctttgtgttccctccaccaaccctaaatttgtccacactttaattctacccaagatacccctaagatgccttttcagccatcggggcactcccccttctgtcttctgtttccctagcctctgatctggtttcctccttcctgggcctcccaccaatgaccagccccagattctgaggcccctgtccatcttccttggtgacttcagaggaatctctgggttcgtctatccctactgcccctataatgcaagggctacctgcccagaattttgctgagacagtagaaaagttttgaggaggacaaacaacaagtttccaattccagcatgtatcctggaggccccagacgtcttcatccaggttacattaggagttataccagcaagggagcctaatggtatctaaaaggtatggtcttttgtaggatctcatccttagcttcgcaggctcaaaggttaagatgatatcgtagactaagcagaggatttgaagccattttagccaagttagattcctgcctcttccattcagatctttgtgatcttggataagtgatttcacttcagtcaactcagttttctcatcaaaaaatgacagtaacatgcctatatgtttggtataagaattaaaccaaatcacctgtgggaaaaccaagtgttactgtggaaactaggtcagactcaggggatactaactcacattaataaaactcacactggaccaatgggtagcccagaatgtccatgggtcatttaaaagagaagcatgcctgcaaaagcagccctagtcgctccaaccagctgggcagtgcattctctgccctaaaggacatacaaccagaagattccctggtggacatggtgtctcagcaaggggacttagttgtttgatcttgatagccactgtcacctggctatcggaagaacataatgactcatctgctttctaggaatttcctgggcaaagtttagaacaggtcaggctacccatgacactggacaatactgaagatgcatggacaaattctcgccctctggctttgctttgtttaaagactctatcatacaattgttcattcattcctcaaatctatattgagctcctcctaagtgccgggcactgggctaggtgggtagggatacaaaagaggcactgcccccttgccctcctcagggagttcacggtgtttgcagaaagactgacaattccatacataattaccattaattgtggtcagtgttatgagagtgaagcagaggaagccagaggaacgaatgtgcaacatgtcagctaagtccacataggggtctggggaagggctccccgaggcagtgtccatgcacacatccttccctcagccaggtgtcagggcacacttgggtcacttgaattctggctctcttcagccagttgtctggctacaccctgacaactctgagtgacctcgggtgtttccctagtccccacaagcaatgcatctacaaactatcccttgggttgggcttgcagacaattcactctttcattcatttaacaaatatttattgagtccctattaagtactgaagctagctcatttcaccatggggaactttcgccccaacttccagaggtgccttactgaagccccctgcactgattccagcccacttcagagcctctggtttcttttggagagatgggaggacagttgaggacgaggacagtgcagcacttgatgtctcaaagaatgggcacctggtgtcgggtagtgactctccctcccaggaagtaaattaagaaactcccctacccaccctcccagcccctgtccacaattgctttctgaggtccttccgtagcactcaatgggcctgggatgggcagctctgctggcagcagccggagcagtgccatgacccagggagacattaattcctagaagcggcagagggctgtgactggagatttgctagccttcaggtcgcctctcatataattgttctaagtccagtttcttgagctcttttatcagattctaaacccctgtgttctctttgcacactacctgaggggccaggaataatttcccccattgcactgatggatagaccaaggcacagagctcacaagcaacttaacattggggacagaactgggaaccaggtctccaccacaaaccaaaaccgcctaaaggctcccagggcctcccagacatggttcttccccttcctcaggggtgttcagaggactactgtcttcccaccccctagatctccaatcttcaaagcaagcatccccaagagcacacccctcaggtggcctcaatagctcccattgtccaagaggctctttggcctgacccccagccccataagcagcaggacagcaagctcagaggagcttgtcctgccttgtccccctcctctgcctcgtccccctcctccagggccgccttgggggagccggtggggcaggagccccgctgaatgtgacctattgtcttcggggtggatttaggaagtgccaagctcccatcacacagccctgctccccaggtaaaacaaaaaaagggctgttcatttgggaccttttcccccttatctccttttcctatctcctcaggcttagctatggtgtagtgttcaaaaccacttcccctctgagccaatcagaagccggggctcaccccgtggccctgaggaaaagttatttataaacgcctccctggattatttgagcagagccctttcacacacctcaggaacacctttcggctgcccgctccccagacacacctgcagccctgcccagccggctttgctcacccactggtaagccccacccagcccagcccaccccactgggctggggtcatccctgcaagagggcagtcaccaggggtaccgagaggagggatgacaggaaccaactgccaagctgagcacaagtaggaaggacactctggcccctggagtctgagagcagcctcccagcccttcccctctgaggagccctttgggtcttcacgtctatgtaaggacctgggctgcaaggctgggcttgactgagggagcaagtagggtgagggtgtggtggtcgccagaccccgaaacagagcgaggcaaaggcctccgagggaaaggaaaatgttagaccttcctccgcgacagcctttgaagctgtgggctgctcctctccctttcttttcaagtcttggagggaaaagctcttaatgcttgactcaccagcctactctgcatggctgtctccccctccttctaccgcccagacatcctccttcactcatgtacttctccaccagctcggggaacttagcatggactacacagaatcccatgtgtccccattagtcctgagaagttggaagaggtggagggggaggaaactgaggagtgggagagggtgagcaagggaccagctccatcaggcaggcgggtgggcggtagctggacctgggacgcccgactcaatggtgaatgcttcaacacagaagggcttgggccaggacagtggatgggcagccagctctccaggctctcagcctccaaacccctcatcctgcagctccaaggggttccaagccactctcaggcagtgcccccattcctcaaaaccagcccagagggtccccagctgagacctaacaaagcttctattattccagcatcaactgcccccttacacttggccccacgggtctgaggaccagaagac

SEQ ID NO: 4060 - DNA, 6000 bp, Homo sapiens
atggttgtggagcatcaagctaaagacagcctgaagggttggatttgtgtgagcctgtgggcttggtcatctgcaatattctctggctaaaccaagggtgtaaacggacgtcccttgctgtctgtagaaatatcatccaaaaaattcatcctgacagcaaaagttttgggaagtggaggaaaatgctttctagaaaaccttggttctagacccatctgtgtgatgacctcctgtgcaaactggagcaagtcatttcacttttctgttcttggtccttcatcattcagtggagaatcactctagttacgccatcatgttctggtacatgctcctagtagtctccaaaactgtcttagcagacagtgccagacacgtatgcatgtacacacacacacttgccttttgctgtcccgtttatttgctgctgaatcataagcgcctattagatgctagtcactgaacatattatagctaatctttttttagatttttattttggggagatagggtcttgttctgtcacccaggccagagtgcaatggtgcaatcatagctcatttcagactgcaactcctggattcaagcaatcctcccacctcagcctcccaagtagctgggactacaggggtgtgccaccaccctggctaatttttttgtttttgtagagactgggtcttgctatgtggcccaggctagtctccaactcctgaccccaagtgatcctcccaccttggcctcccaaagtgctgggactagaggtgtgaaccactgaacctggcctatacttaatctttataacatacctatacagtaagtataattttccccagagacattaaataatttgttcaaggttccctggctggcaggtggtaaggcttggatgtgaacccagggcgtcgaggtccagagcccctgctcttttcccaaggctacacaggctctctatgcttgctacctcctggcttgtgttgttccttgacagtattgcatgtgagtgatgacttctcaattggactacttgcccttgtggaacaggggtgcactctcctgcatgtctcaaatctccctggaccttgagcttgtcatggttggtaggccgagaaataaccaccatccctcttccccaaggtttgtctatgtctcaatctctggagcccagaagtgtgaccttatttggaaaagagtctttgtagatgtgatgaagttcaggatcttgagatgaggacatcatcttggattagctgggtgggccctaaataccatccatataacagagaaacagagagttatttgagacatacacagaagccaatgtgactatgaaggcagaggttggagtgacacagctacgtgccaaagaacaccaaagaatgtcagcagcaaccagaagctagaagaggcaagcaacggattatcgtctagagcctggagggtggccctgctggcaccttgatttcaggcttctggtctccagaacagaaagagcatacatttctgttttcttaagccactaaagttgtgttaatttgttatagcagctgtcagaaactaatacggtgctcaaccaaaacacagaatcctagaactgaaagagccttgggaacaatttggcactgtcctctgatggaacaaacaatcctgcagacctacaggatgaagtgatctggcaaaggtcactcggcaattagaggcagaatcaggaacaaaacaaaggtgttccacagtgacttatgctgagtcccagagtcaggaaagtccagtgagaagctgttcttctgctggtatattttcttgtatgattactttaaaagaagcagggagggttgagcagatgaagtgttgtaagtttggaaagtataatcactgctgttatcatcattattattgatttgggcaatggactctcttggcctgtccctcctcccccagggctgagaaatagtactattttagggccactgggttccagatggggaaaccacagtgcgagaggggaagcaagtgagtccaatcacaccaccggcgtgtggctgagcccagaataggacgtaggatttttgactccctgcctcttcccagggctctacttctcattttcccctttctgtaaactggatcagtaggatcagtgggctccaggtatgtggggtgtgtgtgtgtgtatgtgtatgtgtgtgtgtctgacatgggtcagctaagacagttttggagactattgaaaacatgcagcaggacatgatctagtaaattacccaccatcatgaaatagcaaagcagggaaggaaatctgcaacctgtcctccacgcccaccaaggcagcatgagaagaaatgatttaatgagtgttctccccttcctccctgcaagcctttgctcgtcaaatttctgcactagtgttctgtgaacctgccttgacttctactccagcctggacaactggacacaacttatttcttgctttgggaaggaagaaacaaaccctacaaatattttgactattgagttcaaatggagagaggtataaatcgggaatcctttgaaaggagctataatctgacagaaccaggcttgtctcatctctgcacctgcatatcttgtctcccctcgcatcctcctgctagacattaaccccagaactggggaggagaaagactgctgaagagtaaaaaggagagcttagttactgatgtgtcttggtgccctcccacccaccaccatggggcagagtccaggctacagtaggggagaggggattaacaatgatagagatatccaggtgggcttgaaaactccagattgaggggccctcaccttcgcccatcctgtagagaactttggtggtccacagtcttgctgatatccattgtacccccaattatatgggaacactggcacacaggaggttacaagagtgttgggggaaaatgtgactctgctgcacaggatctcccaaaggcctcaggagtctgtgatcagccaaactcaccctgcacccacaaggtgggcaaggagaggctgagggcctggaagacccaccccagggagctcagtgtatggactaggagggcacagtgtggaccacagaaccctcaggatgagcagggacaaagcccactgaccaagcaggggaagtcacatctcagtagacaaaactatttccttctggagcccaaggccagcacagcatcgtgacaaagcaagaccaaaataataatgggccaccccttttcactgcctcagcagtaacattgaccaccccctcacccaagaccgctctctccagactggaccccaggggagagaagggagacaaaaaggaagggaactccataatgaggctaaattttaaatctggagtgaagtgactgagagatcactgaattgggctgagcttgcctagaagtgactaggtaacttgttttcttttatcagtcagattatgggtttagggtttgaaattaagctacatctggaagccatcatcctcatcaaactaacacaggaacagaaaaccaaacaccacatgttctcactcataaatgggagctgaacaatgagaacacacggacacagggaggggaacattacacatccgggcctgttggggggggtggggggagggagagcattagaactaatagctaatgcatgtggggcttaatacctaggtggtgggttgacgggtgcaggaaaccatcatggcacacgtttacctgtgtcacaaacctgcacgttctgcacatgtaatcctggaacctaaaacaaaataaaaaaagaaaatctaagtttgcaaaccacaaaaaaagagagaaattaagctacataaagaaattatggggtttttttgcttgccattgaaatctgtgattgtgtgttaacacccacaagtgagccagtggttagctaaaataagacccagggctctggctgccttgtgtttctccagggctctatttctctatttttccttccccttctggtgtttggcctataggactctgtagggagagcctgggtcagccctgcacaggtaggatgggcagcatttctgtgggggtttgcagtgaggggtcggggggccatacacgtgtgtgttggggagtgggcttcacttttgtcacaggactgccacgatcatttggggaacacctgggagtcccaaccaggtcatgttttggcatggactaacagatagggaaggaggtgctacttcagctcagcaggtcagcaccgtccttgctatggagccgagcccgggtcctaacaagactctgaggtcagccatgttcaggggagcccagaagcagcgagtctttcatgactctggggagtgaaacaggaagggccacagtcctgccagttcctggagctctgggactggtaaaaggggcttggcaggaggtgtataaggggcatttttgtccaggctaagtaacctagggagtcggaggggattccagagcaactggggatatgagaccaaggactacgacagccactcctgccacctgtgccccatcagatgatgtcaacttcaaatcaagcattgggccaggtattttagagctaataccgggctatatcctctacctgtagatttggtattaccatccctcttttccagatgaaaagaaataggaaggtgacttgccaaaggtcttgcagctagaaagcgacagaacagcatcttcacgcttgacattctgtccctcatcctgaagctgcaacgatggaggattcccaagtaacagagtctccccaaggtcaaaggaaaccaaatggagccagccaggaaggccaaaatgaaaggaaagcaagggatctgtgagagtcacatgaccctggctggccacggtgcctgtgggagagtggccctttaagagcccaggtgtgggtcaaacactgagcagagtttcagttttggcagcagcgtccagtgccctgccagtagctcctagagaggcaggggttaccaactggccagcaggctgtgtccctgaagtcagatcaacgggagagaaggaagtggctaaaagtaagtgttactgctctgggatccccagacgggatgctatctggaaagggctcgggacgatggctcaggtaaccccctccattcccaactcccagtctcctagatagtggggtgacaaggacaaggaggcagactgtgtgactgtgtgtggctggggagtaagcgtgcatatcgcagtgggacgagtagggatgcacgtgtgtggaagccccccatccttttctgagaaatatcagcaggtgggaagggacctctgtggtcagcatatgtaattctactctttcagcttggtctgtgcctggatttcctaactcctcatagttgattaactgtgtggccttagacaagccacctaacctctctgatcctcagtttcttaatctgtaaaacaaagatagaaataacacctatcattcagggtcaatgtgggttcaaatgagaaaacacaggtgaaatagctttgtaacctctagaatgaaataggaattgtttcatatttttcagtttagtttaattaatcaaggatttattgaacaccaacagacctggaattagatagtgcgcataaagtatggcacctagcaagtcctcttccattctttgaggtttcccacttgtggctttctggcaaaggcatgttcagctccttttttctgggcttccaagaacctctgaaatcctttgcaattccacctcgctttgctctagcagattcctgccatgggagacataaatgtgtgtcatcgcatcatcctgcccttcctagaggtagaaaaaaagaggtcctcacgggatcactgagtgaggtggagctgagccccacaggcagcatgatcaactcctgctgttcctcctggctctgcagccagcagatctcagacatgggcttcccctccctttgcccatcctgacagcagcccaagccagcagtgggaccgtccggcacaagggcagcagcgggt

SEQ ID NO: 4061 - DNA, 6000 bp, Homo sapiens
cctttctatccttagatgttcttgccagtatattaacttaagtaaaacaaatcagttgcagaaggattgggaaggaaacataaaattatcactatttgcttgtgatatgatcatttacatataaaacccaaaataatctagaaatacttcaatctaataagataagttaataaggtagctcaataaaagattaatataaaacaataaattgcaatttcatacaccagcaacaaaaataattaaaaagaagataatatttgccatagtcttagaggacataaattacctaggaataaatctaacaatgaattaaatgaatttatcacttaacaataatgaatgaattaaaaccattacagggaaaattataaactttaatgaagactcaaacaatggagatatataccaagttctctgaaggaaagattccgttctccccaggttgatctatggaggaattttgatcaaaatccaaaaggctgttttggaaggaaatctgataagcatttataaaattgtatattattattattatttggaagaacaaagagccaagaatagtcagggcatttctgaagacaatttgggagaggaaaacttgccctacagatgtctgaacttatttaatgctacagtaaataaggcaatggcgaaggcacttggggtgtccatactgaccaatgctagagagcctagagccagacccacatacgtatgaaatgtggaacacgacagaaatggcatgtcaggtcagaagggaaagaagagactactcagtaaatgcaactaggaaaatggttagctgtatgaaaaatacataaaactggttttctgctagttatttattttgtctccctcagccccaacctactcctctgtacttttctctataatactggctacaatgtgtgtttgctctgttacatgagaatattcagtttcatacagaggacaagaaaagcaggtgggtgaaactcatcagatgtattaactatagatacaaagtaagcaagtcatttgtgagacataggcagaattcagaagatgtgctaaaaatgcaggatggagtatcccttatccgggatactttttggattttggaatacttgcattacacttatatgttgagcaccccattccagaaatctgaaatccaaaatgcctcaatgagcatttcctttgagtgccatgtcagtactcgaaaagtttcagaatttggagcatttcaaatttcagacttgggattctcaatctatagtaagttagtaacctgcaagacatgtaaaacagaataaatggaatagactacaaaaggatggaacaaacaagagtgctacttacaggcagaaaaggataggaaaaaacaaatcataagccatgaggtatagattatgccaccttctggctggtgtccatgtcatccctaaattgactacctactggtggcaccttctggccccccataagctctacccaagaaatactggcaaaaagtatggcttcccagaacactgacaaagacctgtggccaagcctacctacccttaaacatctctcaatagaatgagtataccttggttctaagcatcttcctcatattgatccccttactcaatctcagttctggtcctcataactataccactgcagagcgaaacacatgactgaggctgtgagactgtgcaggacttttgccctgcttgcattcccaagtgtatcaaccttgtgtaaatctgtccccttggttctggctctatgctttaaatagattccataacccttgtgatttgatcatcataatttggtctgagtcttcctgatctgtggcctctggaatagcctgcctatcatggaggcaaacattgcatcatggtgacttaccacaggacactggttcccagactcccttgtcagctgatttcttgttaggttctgccaagaggaggcactggagggagactagaaggtggaaagaggaaaaaagggacttgcaggttgtcactgcatcagtccagcatctgaacacttctaccgctaaggatccctgccaaactgaaaaaaaaaaaaaaaaaaaagtttgcaatgtgggaaaaaagtcttggttccaaaatataaaattggaaaatcaaaattcacaaatttttcattaaatgcctacaaaaatgtcaactcaacttgtaaactgcaattcaactctttcatagtttcatgtaaatataataaagtttgaattataagaacaaaatgaatatattttaaaattcagaattataacaaccattttccttacttttttaacatcagacatatttgacataggatgaggtcctcttttaggttgattgacatgatgcgtgtgtattttggggaggggtgaggtaagggatgtttaatagtaaaagtggttgtgacctccaagggtctgtaaagggcctgagacagcctctgactcagtgtatttctgttgtatcctccattttgtgcggtgtagctaacatcttctagcaacagcttatgaagcaggagagcagagaattgaggagcagcccagaaaggctagaactttgaagagactacatagctcaactctacctggcctgtgaggaaatgtaaggctggggtccctgggtacccttgtgtccagtggccagaacgtgtgtttgggggtggcttgggcaagggtgtgtgtgcttggggtgatgagtctcagtgaccctggaaaatatgaagagtggccaatcactgtctagctttgtagttctggggctatccataacctttgcaagccagagaagaaacagctctggtctctcagaggaagggatttgccagcctcccatatcccctacttctatttttcctccctgaagcctgacatccacttcgcccttgctccttgtacccagcaagtgttctttctataccagggcttcttgaacctcagtgtgcatgagtcatggagaatacttactcaaagtacagattctggccctcacccttgattctgtgtagaccatgctttgagaaaactctgctccacagaatcattctctctctctttgctcccaaagctagttaagaagttcaggtactaaagaaagacaagttatttcccctgtttcccgtggtccagctatgggagacaaatggtatttaaagtaaccagaaaaaaaaaatctggaaatggaagttaaagtggaccaaattagctttcatatctagcagggattacaaccccacatttgttctcaactgcacactggatgcctgaagcagaccgagcggtccctggagctgaggaagttgaggggagtggggggcctggcagtgttggaactaactccttttccctgttaattgggagtcccaaggaccaatgactgattttaaaatgcatgtttgccactccttctgtccccaggcccttgccatcactatgtgatcagttctgaatcatcatttgtactttgaaacagattcataccattccgttgtattcaatcaaattagcatatcaggcctttgctcttattgtgtgatgaaagactttgttccctgtttaaaggaatgctaggcaacaagaccagaataaggagattttgggtttgtttttagacctggatccttctcctgtgcaaccccaacgcatagtaggtttgagatggactataaaggtaaagctacttttataatgctagagtgtctgcggagaaatcagaaaggaccacagagtgctggtctggcttctcttttttccctttaggctatgtggtacagacatcatggaagagcctgaactgagtatttataatttcatgattctgctctggatatcagagcagcctctcccaggttataccttatctgatcctcccctggtgccatcatctgcccaggctggcttctcctttctcccgtctctacgtccccaagactaggctgcctacccggctcagagtttcttctattcagtacaaccaacacccagaggaactggtgaggaacaggaagctcaaggatctatcaagtggtggaggatggagtcacagaaagtcctttttctgatgggagagcaaggtgaaatccctagtggcttagacccagggctggagaggggataactggtgagaaggcatccagggaagtcctttttctttaggatgatggtgatggggaactaaatggggaaatatggaaggtcacaggaaaagttaacacaagttagcaaaaagttaacataacacaaaaaggtcttgcaggaaaaaaaaaagaaaagaaaagaaagaaaaagtctccaagaatggtttggacagccaaaatgaatacttatagtcacgtatacctgctcactcctgacgcttcactcacacacagcacaggatctggtgaggctatcactaaatgtgccacattgtggttaagttttacctgattaacgaaatgctcacacttctaaactgaggtccttacagtagattccttttgcaagattgttactggcttacaacttaaaaataaaggaaaatcacaaggaaagaaaagtggggaaaaaatcggaggaaacttgcccctgccctggccaccggcaaggctgccacaaaggggttaaaagttaagtggaagtggagcttgaagaagtgggatggggcctctccagaaagctgaacgaggcatctggagcccgaacaaacctccaccttttttggcctcgacggcggcaacccagcctccctcctaacgccctccgcctttgggaccaaccaggggagctcaagttagtagcagccaaggagaggcgctgccttgccaagactaaaaagggaggggagaagagaggaaaaaagcaagaatcccccacccctctcccgggcggagggggcgggaagagcgcgtcctggccaagccgagtagtgtcttccactcggtgcgtctctctaggagccgcgcgggaaggatgctggtccgcaggggcgcgcgcgcagggcccaggatgccgcggggctggaccgcgctttgcttgctgagtttgctgcgtgagtaccgcccgcgcgccgcggccgcttggcttcgccgcggggagggtggaggctttctgggaggctgaacagcagagcagagtctcacggagggaagggacccctgcccaacccacgcactgccgcccacagctgcttccccccggggccagcgcctcacctgggagctgacgggggtgggaggggaagggaaggccatcacccccgcgagtgtgcgttagccgaggtgtgaatcggtcagcacgactggttccaatggactgagataaagcgctttggagatgccagggtctcttctggttgccagaggcgcggagtgcgaagttgcagccagaaccgggagactggggaggagagaagcaggaaaagttttgtggctcttggttgattcagaaagtatagacacggagcggattgctgggaaggggccggtgtgcccaccttgcacagggactgggagagccagaagtggacattaaggaattcgagggaagcgaatcagggatgaggctccaggtcccaggccaggggtgttcggaatgaacagtccgtgaaaaggaaaaacaaaaccaaacaaccaaccaaacaaaaaccttgcatttaagattgggaagctgagtttgaattcccacttcagcaaccccaccgcggaggaggtagaagtagacagaatttgctctgcgcccagcctcgctcgccttaccaaaaaccgtcacccctgcacaaatttcaaaacttgtcaccttttggagttttcttcctctgcccctgctccaagttctaaagctagtggatgggttagaacactgcccccactcacctacacatatccttactcttaaggtcttgctctcacttcggttaaaaaaaaaataggcacccggtaaatatttatactcgattactttccttggggaatgacattctccacctcatctctttgcacttggaaggtttgaaactt

SEQ ID NO: 4062 - DNA, 6000 bp, Homo sapiens
aactgaatacaattttccccaagtttgttttaagaattgaagtatagtgatattgacattgttcatgaacttcaaagtaggagaaattttacatgaatggagaagagcagtggtttaaatatggcaatgaggaactagacaatttctcacttcaacttctggcttctaggtacatggactgtgacagaataaatatattccaaaaaagtgggaccgacgggactctgagactttaggggaaagccagatctcagttaagaggaggaaagaaagtcttagctgggtgtggtggctcatgcatttaatcccagaatttagggaggctgaggtgggaggattacttgggctcaggcccaggagttcgagaccagcctgggaaacatagggagaccctgtctctacaagaaaaaaaaaaaattagctaggtatggtggcctgcccctatagctacttaggaggctgaggtgggaggatcacttgagatcaggaagttgagcctgcagtgagccatgattttgctactgcagtccagcctaggcaacagatcaagaccctgtctcaaaaaaaaaaaaaaaaaatcttaagcgaagaggtcaagttgaactatagattatttaaaaagaaaggaagatttagagggcacattggagacaggaaagcagttgaaagaaatgacgaagaacatacacattcattaaatatttgttgaatttcttgagggcaggtgccaatcataaccatcttttaatccttagaacctatccctgtctgctatatactagacacgatgcaaatgtttgtcataataaaatgagactgttgtaaatgacttttaattatttcccactgagggaagggtgtgatgaaagatccttttctcttttgtttagaggaaatgagaaagaagaatagcttagggcacttggaaggatataattcaattctacaaacatttcacactatctattgggttaaccatgggtgagtgtagacccacatcagtgcattcttttccccagtcaattagattcagggactagtatttcctttgaagcagattctgtccattctcccaacactagggaaatacatctatagcagggaatctttttttttttcaatggatatagtctgcccaacattcttcctataagattattcaaatagaagttttgttaacagaaatcacatataataagtcagtcagtcattgggctatagaagctgaaatttctcatgctgcaaattcctccacttttagatatttagatatttcactcctggtggctgagtagtgaagtcgcctctatgttcaatttctcctccgcttaagttgctaatgacgatgcatccatggcctgccccttccagctcgcagacctaggactcacaggcaactttcctatgttagagaggttcctggctttctaaaatctgtcacccacaccatgtggtcttaatggaaggaaaaatgaagttcctgtctttatatgataacatttgccccttctgatgtgtggcattgtcatcctcttcatttgatagacttgttgttgttgttgggagagatttttctgtcatctcctggactcttttcccagccaatctgcagatcaccatctccatattctccctatagcattatgccttcatcactatctattacttttgtgaactcactaattacagtgtagcttaatagcatttataagaacaaaaattgttatagtgtgtctttgtttcaaggagctcacaatctacggtgtgatacagacataaacacatcttatagctaaggggtaaacaaaatgctgagggatacaggaggaaagaagcctagaaatagtagactcacattttagaatttatttcagactctgtatctgaactctgtatccctgcagaaaatgggctacattttctgcatggaaggatagaggcagttgaattggaactctggtcacagttatttaaagttgtccctttaaatgaaggagtggctttgtctgttatgcaaaaatataagcgttctcaattggtttgccatggtacattggtatattgtgaatcctttagaaatctgttaccaagttttgacaaatctgtaagattaaagtttactctaactgagattcccatattacagaggtagatctcagacagaactttaagttgagcaggtgctggaactgaatgtcaaggagggaacaaaaggtggcaagtaaaaggtaagaagcacagtatcccgtcaactagcaccaagaaagagggagtgtttactggaatattgagaatgtggctgtggacagggcagaacatgattttattcctgcagtcagatgtgttgtgagtgaaccaagggaatgggggaaaaactggatgtacctccacagacaccatgagacactcacattgtgatgaaagactgctgactttttagcaatttaattcttaaatatttattttatttaaaaatccatgaacacctccagcttttttttttttttttatggcaaaacagttcattgtagctgttcacgtagtaattatcttcctcttgcatccccaggtaatgactgtgatcttgacctaaaagccaccttagttagtttgaataaggaagaccttgaaaggaaaggtaactgaccagaaacactcttaagaagcacacaatgaagaaatgatcatttctaagcaagtacttaaagtgccataacacagtataacagtgcttttataagcatccagtcttatttaagcaaaaagacgtaaaataatgtgatcgtgttatggcacacaatctggaggtttaaaactttaaaaaaaagaaccactttgtagtagcactattttgttttaggtcttttaatttcttcaagtgtgccaccaaaaattgtagtattcaaaaaggtgccaatacacacacacatacacacacacacagagtccatgttgagatccatttcagtagtacatttaaaatggaagacatcttatttctttttctcatcaggttgcccaccaaggctttaacatctctgatctcaaactaatatcatctgtttccttttttatctaagccacagaacatgagagctcattaaaaccttagaaattttattaactctctatgatagttttcccctccacattattttctttatcttcctttcacaagcaggattatgaggtttcttgatgggtttttaatattgtcatgaaaaatcttcccttggcatgtttgtgcgataacacaactttaaaaaccttatttaaatgaacttattcaaatgaagtggataggcaccaaactggctcagctcagcaccaaatacatttcagaatcaagttctcttcaaccagtgttatctcatttgtaatagaacaaagaaccactagacggagctagggtttaagaaatcactgttctagactaggtaacaggcgatgggtagaaggctatcttaaggaaaaagtgtatcattacttgcatttcaaatcctatgacagtcttatccaactctctgctaacagcaatctgtttactttgtctctacacaagacgagataaagggtgatattcgtaatggcccaatttatttagtcactccaataatgacgtctgaccttggcacagcactttacaatttaaggtgctgtccccatacataattcttgcttgatcttcacagcaactctgagagatttctgggcaagaattagttcttctgtttttgaaattaattaactgagacaggatgtctttgcaatacattaggatatgtcaggatggctaacccagacaattaattttcagggttagtttttttttctcttacatttttgtgttgactgttgactcagtctgaaactagtaaactctccattcatttctcctgtgggacataggcttagtctcccaccgcaccgactggggatacatagtaaaaaggcaggtacagactatgtgtgggtcgaaatcccccaaaataagtgaacaaacgaccgttgtcttagcccctgtccagaaaccttgggtgtatgtggttcttccgtataccaggggtcagctgtaaaaactaactgtatcctctgcactacagactacccttcaagccaaagccacggttgcttaattaatgctgcccctctcctgagcattcgcccttagagacaagtccacccctttgatgtttgtcaggcagtttgatactgatcataccaaacatcaggagcctgcatttgtgtctacggtaaaaacaacccaagacaactcttctgaagctgaatctgccagtcactctaaatctgcactattgcaatacgacttcattaattactgctcaaacactggcctagaatcaaggtggggcaactttcactagtcaggctaaccttacaggaaggcaagaaggtgttcccagagcctcacaggtcccgggggccccggcctgaaacagagcaaaggaagagagttacatcagcacgctcccctaagacttgttgggggtgaatccgccctgaaagctgctcacaatgccctcctctccacccagcccatggcacatcctgaacacatttcccggctgaacccagagggtggcgctgccgtcccagccttggtccacggccgcccgccacttccctgcctctgcgggagccccccagcttggtctcccgcaggccggcggtggggcacgagcccggtagggggcgccgccggcccaggcgccgctgctccctccgcccacccggaggcggctgccgctagccgaggccggcgcgagtgcactgcgaggcgggccgcagggagggaggcgcgaagagggcgcgagggtagcagccagagggagccgccagccctgcctgcggatccccgccgggcgcatggggcgcttcgagccgggactgcgtgcgggccccgaggccagtttcctgctgtcgtaagaagccgcgccaggacgcccgccggaccccgagctgctgggaggatgaccatggctgggggcaggaggggactagtggcccctcaaaacacgtttctggagaatattgttcggcggtccaatggtaagaggtgcattcggatttcgattacccgggcgttttatccgtgcctttattgcagaacctctcgccgctcggagccagcagatgcagcagaacccgcgagctctgctaaggagccgcggcgcgggcacccagggcagcctccccgaggcagagaaaggtgggcagggcggggcggggtctgatgggtccccatcctaacaggagagctcttctggggacgccttttgggcctttctagcgccctctcggtcttatctccaaggatgcgtgacagctgctgagcaaagtactgggaaaagtgatggaaagctggctgcagccggagcggcagcgcgcgccccatcggcactgcccacccttccgcgaaggctctggggctcccgggctgctcccagaggcgccgcctctccccagggagagccagcagtagagacgggcaactccaggtccccgctgcctcagaatgggaggatccggctgcctccaccttccatccctgcaactgaaaagtccgaggtgtcgggacgtgctctcggcggcctgattccaccccttcacccacccaccactttctaggtgaagttaaggctcaccttcgaagtgaggggcagatggttttcctggcgtcaggtgggaagtggagggcacaggtgcagagcgaactaaatggtcacaggtacaaacctgttatatttcccctcttccaaacccacaacggttttatgccacccttaagtgttgctcacctataaattcccaatctcaccaaacctataaatagatccattacccaataaactgacaatcagcactcatctgtttccttgtggcattaagatcgacggtagcatgaagccttgagaggcgagagtcctaggagcggggatggaaaggaagaattccaaacgcctttcggacttaacagag

SEQ ID NO: 4063 - DNA, 6000 bp, Homo sapiens
aaggccagtcccctctttatctggtggagcgacatcatgaggctggggacagcagccagaggcagatcagatctggtccggccgtgtgcacccaagtttggttctccttctcctagcactgggaggccactgcaagatctcagccgtgatggcgtgggggtggtggaggatgtgtattttgcaaggactagatctggatttcaaaaagatcactctggcagtaaaatggagtacaactcaggaacaggagggcagagtggctgtttggagaaaggcaagataattttacagtctagaagagagcctggaaatgctcccttccacagaagttccagctcctgcagcctagttccgtcctcatgcaaccttccttccgtgaggttctgcctaccaagagggaaggaggaaggacctgtgcaatgagctttaacccgagacagagaaagtgaacaaactggaagtccagctggcaaatgagtcctttttgtgtccatatgaatgagttcgcctaggtgaaataattcaaaagtggtttctgaatttgcaagttgagaactcagctctggattcttggtgaccccaagtacaggaggcctgaaaggccctgtctgagaatatgcactaggcagctccatctcctgtactcaccttttaactccagttaagaagctatcatgtacaccccatcactgagaagatgtggaaagtgaggcccagagaggtttagtaacttctccaacatcacacagtaacttttaagggccagtccctgaactgtcatcctaaaactcattaggtgtgtgatcctttcaaaatgctctactggccggcatgtttagggatgagtaatggagagagtcataaaaacatacttttaaattaaattctttttttcaaattttctgtacattgtgctttaattaccatctccagccccaagagtagaagggctaaagaaagaatgggcattcagtctaaagtcttaacactgactacctgagccttcaacaatttctggtattaacattatatagcactgcacccaagaaattcacagatgcttttaatgagtgtttctgtatagatagcagtgcctttatttctagattgaatttccaggcataactggagaacttagacccagtttccagcctccaagaaaaataagttccttttgctgctagccctcatctgctattcttttttttttttttttttttttgagatggagttttgctcttgtcgcccaggctggagtgcaatggtgctatctcagctcactgcaacctctgcctccctggttcaagcgattctcctgcctcagcctcccgagtagctggttttacaggcatgcaccaccatgcctggctaatttttgtatttttagtagaaatggggtttcaccatgttggccaggctggtcttgaactcctgacctcaggtgatccacaagtctaggcctcccaaagtgctgggattacaggtgtgagccactgtgcccggcctattctttaaattaacaaatataaaaattcagtgactgttcccagcctcttactgtacagtttcactctctgcactgttcctgtttcccctttgctgctacgtgggtttcctgctctgaccatttctttcatatggtttccctcacacctctgagactttagtgctatttctgggctttattgctgcattgtcagttgtttattctttgttccactgcctgttcctttgagagcagctgagaaatcaaaccttggccttcatgttgttggtagagatttcacttcatatttgtaataattattcatttatgttttgagagatttccccatcagttttaagattgaacattagaagtgatttactgtcagccaaagtcaaatataatgtggttttcacagggttttgttattttatctttccaagcaaggtacagctttatacactcatgatttttgattaccaaaattcagaagtacgtttgtgtttagcagtttttacgagaatcttacaagatcattttaaactttcattaaaagcaaggagaggtccagagggctttgagattgcagtttgtctgaagcccttgactttcattcaaattggcagtctcttttccaaaaagagcattattctctcatctttaaagtatgctgggtttagtcagtttggatactaagcaagttatcaggagatttctcaaacattaagaagagaaagccaagccgtcttactcaacccagggccacagcctccaggggtgttggtgaataacagtatagtgtcccttcattttaatctattcctgcctgtgttgacactctactaggacaaccagatgaaaagggaaaaagctcgagttgaggtaccaaagtcttttgcctacacaatgttagagggaaacaaagtctgactgaagtgttctgctgtgtggtaaatattactctctccagagaacatgattataacttctctagaacctggaaaatgtactccctgccccctctgccccgcccccaaccacccaccaggagggaataaagcacattgtctgggaaatggctgaaatgcaggcacaaagtaggttttcagaagcggctatgagttgaacctgtttttatatgggtctaaaaatctcccaatttagtctgtttagttattgaaggattgctattgtgtttgcaagcatcactgacttttacatcttcttattggttcttctttgggtatcaaatcttcgcatttggaggaatgtattttttaaataaagcgaggcacagcagcccttagtagaaagcaaaatggtcttcaaactgcctctaggccatttccatgaggatatcttgacccataagtggcttccgaatttctgtatatgaggggctagttgataggatgtttgaagctgtgtttacagatgatcagaaaactgtcactcatccatatcaaaggagaggaagttatggaagtcctaaacccattaatccaccctttagcactgcccaaacccagacttcacttcaaattaagcacattaaaaatggagttcatattttctcctaaaaatcagcttcttggcctcccttcccaacttcctcacctgtttaaggcagtattttccttgtcaggttagaaacattataactatctttgttctcctacctagcttcctccttcccaatacccaattaatcatcaaattctatcattttttccttaataatgtcttgaaaattttcctccattctttatattccagcaaaacagaaacagaaggtgaggatccagctctccagtctggatggggagactagaaacacactacatacaagtgaaaaaaatttcataggaattacaagaataccaaaacaatgcaaaataacagctccaaacaagccttgtatacacatctccaggcaatagctggcactgcatttgtccagtagtaatctagggcagtgggtggggaggtccttctgctgcgcaggggctgtggtgaggcctttcaggtccagcttaagccactctgattccagccaccaccccaccttagatgggcaagctgttcctttccagatcaactcatctccacccacaacacagtgcttatgtattcagtctaaaatagcacaatttatcaagagtattccatcgtaattttaaaatgtcgtgtttatattttacctccacctggacagaaactcgttcctttgtattcttactgcccctccacctccccatagcaaccagcacaagattccaccgtgtgtagtctataaataaatgttaaatcatagagccttagaattttggagtcagacggggatcttcagagttgcatttgtccagtcctttatagatggggaaacaggtctagagagattaggtgacttgctcaaagccacacagctggctattgacaaggcaaggagcagagcccaggtttctcctgcctgaagtctgtaccctgaactgtccttagataatcagtgacagacacctgagttcacacaaggtctccaggggttgatggtgataggagaaactggctttcccaaaacatgtacaaagattcggtccacgcccctagcagaccttcgggaggactaactcctcagctcggcgtccagcagagtcccaagttacagtcgcacttgtttatgcgtctgtcggcctcctccgacaggaccgagtactcgagggccccgcgctcaggggctcccctccggcccctcccccgccgccgagctgtcacacagccgccgcgcggcccgcccccacgtggactgggctcggaggatcaaagtctgtttgcagactttgcagcccggcccccgcaggtgtgctgggagttgcgatggtccgcaggccaggactccgccacacccgaggggacccggccagcccctccccctcccgctgcacgcggcccgcgcccccaattcgcccgccgctgcacccggccacggccccccggcccacgcccggctccgggaggaaaaggccccgcccctatctgttggagccgcgaccccgcccccttcccgcccctccgaggctccatccaatagtgagcgtggctgggcgggacgccgaggctgtcgtgagggggtcctgaccaatggggaagcgtgccgggcctggtgggcggggcggcaaggccttgtcacgctcgggtccgtgtgaaaacgggggttccgagtgcaaagcaaagtttttttgtaaaccgtctgcaaaggcgggggggcgaagaaggcgcccgagaccgggccgagtgcagctgccgtggccgccgcctctctagctcctcagccatccgctcctcagtccagccgccgcagaggagaccagcaagcagagccctcagatgctcggagctttctcggcgcgaagctgcccgtcgccctctcctgccgccctcgcccgccgccctcctgctcctgctccggctgcggctcttggtaccccggctccgggagcccagctccccgccaccgccgccgcctgggtgtgggggctgctgaggctgagccgggcctcggcgccggctctgaggacggacgcctgaggagctgcgcggcgcggcgccgccggctggcggagaacgcccacaggcgcggggctcggcggcttgacccgggcttgtccccgtgcggccgcgggggcccctcagcggtttcccgaacggcccgactcgggcgctcctccgtgtcgcggtcgccgaccctccgcgtcccgccaacgccgccgctgcaccagtctccgggccgggctcggcgggccccgcagccgcagccatggggtgttggggtcggaaccggggccggctgctgtgcatgctggcgctgaccttcatgttcatggtgctggaggtggtggtgagccgggtgacctcgtcgctggcgatgctctccgactccttccacatgctgtcggacgtgctggcgctggtggtggcgctggtggccgagcgcttcgcccggcggacccacgccacccagaagaacacgttcggctggatccgagccgaggtaatgggggctctggtgaacgccatcttcctgactggcctctgtttcgccatcctgctggaggccatcgagcgcttcatcgagccgcacgagatgcagcagccgctggtggtccttggggtcggcgtggccgggctgctggtcaacgtgctggggctctgcctcttccaccatcacagcggcttcagccaggactccggccacggccactcgcacgggggtcacggccacggccacggcctccccaaggggcctcgcgttaagagcacccgccccgggagcagcgacatcaacgtggccccgggcgagcagggtcccgaccaggaggagaccaacaccctggtggccaataccagcaactccaacgggctgaaattggaccccgcaggtgagccgggaaagtcgctgccgcaggtggttgggtttggggtgcccagagcctcgcctggccttcggcggggtggcc

SEQ ID NO: 4064 - DNA, 6000 bp, Homo sapiens
ctgtctcaaaaaaaaaaaaaaagtcatcgtgaagattaaatgaattaatgtatgtaaagcaccaagaacatggcctggattgttgaaagtgatcaataagtgccagtgattattattattttaacgtaatattttgaatcttatgttatgaaaatgcaagtttaaatctgaactatgtctttttttttgaatttgcttttttttggcattttaaaattctattctaaatgttaggattctttttttttttttaatactttaagttttagggtacatgtgcacaacgtgcaggtttgttacatatgtatacatatgccatgttgctgtgctgcacccattaactcatcatttagcattaggtatatctcctaatgctatccctccccgctccccccaccccacaacagtccccagtgtgtgatgttccccttcttgtgtccatgtgttctcattgttcaattcccacctatgagtgagtgaactatgtcttattcataggtgtactatgtgattttataggttctgtgagtagaagaacttgccaaaatatccttctccaaaacatcttacaaatatactcatccattacaatacctgataatctgccagcagaaatacattaaggctttgggggttttagtttctgtataaaatactaatgctttaggaagagagttctctcttccattttttagccataagccccttgtcatggattagctgaccacaccaggaaggggagataaggattgagccaaggaaacataacattggacaggtgagaaagaaggttctagcttagagtattatctgtttggggagcagggggaggcctcatgtggagtcttcagggccctttggaaactagggataattttagccttaagaagggaaaagagaagctagccgaacaggagaggagcatggaggagacacaattgtttactttatagtattgtttagggtcaatcatgttaataaaaagaattgctgaaatggctgagagttgcagtcaagtctggaggattttttttttctttgagacagagtcttgctctgtcgcccaggctaaagtacagtggcatgatctaggcttactgcaacctctgtctcccaggttcaagcaattctcgtgcctcaacctcccgagtagctgggattacaggcgggtgccataacgctcggctaatttttgtatttttagtagaggcaggttttcgtcatgttggccaggctggtctcaaactcctgacctcaagtgatctgcctgactcagcctcccaacgtgttgggattacaggtgtgagccaccacactcagccaagtgtggatgatttggctcaccctatctgaaaaattttaaggttataagccctggagcattttatataaaataattattgacatgaatatagaagagaacatccatatatatttccattttttgtttgaagttaaagctgacaacagtcagaatgcatgactcttttgggctgctgatttcaagcctgcaactgtttcctagcaatgtagggggcctgtgccaagtcattgaaggttattgctggtagggtttctccctagacaggaaatagttcactggagctttagtgcagaaaccaacacaggtaggtaaaatgtttttataattgccactaggaaaaagagagggcccagggggtactcttctgcccaagggaacctctccctggttataacctaatttgttgtgtgtatgtggactagatgggtggaattcaaccttctaaggtattgtggttatattgctttcaaatgactggcgattccaagaaatgtaagaaatcctctttctttttcaaaggaccattctcttgtggttcaaatgtgggcttttgaaacagaaacaataatgtctgtggctatagggtggggtctgttcatttccctcttttctctattggagtgtacatgaaggtgttgaaattgttggcttcatgtttgtgttttgataaagatggctctaaggtagcaggataggggactagaagctaactagtcattgaagaagatccttgttttccacagaacagtctaccctggagaactggctgttccaatcttcctgttacagtcattcagagcattcatacatctctctgtccatggtgcaataaaataggctatggaacaatctcaggaggcttcctaagtggttgaaaggaggcagggcaaaaaaattgtagtataggcaagaggaaggtaaaactaactaaaacgaacttcgaaatgcaagaaataaacacaagcatcatctgaaattgttcccttaagaagtcagccctaacagtttcttatctattatagcagctgaattatcttgaaactgatattgtggtcagaaagttaagaagataacccctctcctacactcttggcacaaaaccagggcatatctatacctggaacataatgtgttgtactgttggttgagtttcaagaaaagtccaatgaggttggaagcagttaatatgaggatatctgaaaagatcaaggagattaggtattccctactccttccataaggaggtactgaaatggcagaattctgcaatgagagatggtgatcagcaagccgaggggacaggcctcagaagaaaccagacctccccacactttgatctctgatcttggccttcagaacttcgagaaaataagtttctgttgtttaagccacccagtttgcagtattttgttatggcagctctagctgactaacacacatgagaacacatatgatcaaatgatttaaaattatgaagggtctagaagagaatgtgatcatctcagaatacctctaagtcagggtttcttaaagcaaggtctgcatactacttgcatcagaatcacctatgacgctttttaaaaagcaggttctcaggtccactggacctagattattaaaatgttctggtatgatgctgaagaatctgtctctttggtagacacttcaagtgttgtttttgtacactaaagagccagaggtcctgcccaacctctggctcttttctgagcctgaaaatgaattctgggcctggtactaattgcatttcatcaagtgctgctgtgtctggtcctctggcagatggtccctgatccaggaatcacgtgtaaatcccattgtaggttatctctctccaggtgtcagccaacgtttacgcagcatgtgggaaagctgaattgcatggaccagatggaatccttagagtttattcttgattgtggaaataaatatgtacctcacctatcttactgaagaatataatgacatattttgaataataaagtatatatattatctctctcatgagatttatttaaagatcttactaccttgtcaataaagagagaatgcaaggaatagaatggggcatatctttccttcacctgtggacctaagaggaactgaaattagagaaagttgagagtccagagcaaacgctgtgatgaacattttcaaaataggcagaataggtggcattctgattcaaatatggcagttccctagggagtgtgaaatctgccctgccccatcccctccatttacaaatgtgcttaagggacataaggttttataaacaggatttttaaaaactaaaatttaggcagatcatttaagaatgctcaagggggtaggtcaatggactatttctctattttccttcaggtggtccagcctttgaaccagaatgcagctatagtatcccaagtgacggggtctgtctaggagttcccatggccactgttttttgtcttttcggtttttctttttatggcgggcgggggagggcgggcgggtgagtacttacttaatgccaggcacttggttgttttttccttcttgactaaccagatttcagtttctctgtgtagaccattcattcccactgagtttcttggtggggtggtgggggcgggggcgatgaatgggaaagtggaattgccattaatgttccagctgctttcctgaaacaagacttttgaccgtaaaaagaatgaatttgaaactctagacaataatacactgcagaggttaagaagaaaagccatgagtgcaaccgggtttcattaagaatgaaaagtggacatttagccgtcaaggagacaggttcctagtttgggcagagaagagagccctaacaatgaaaggcggccgtgttggctgaaagggggctctcaactgaaaccaaggcactcctggggtgtgaggatgggtgttcattcctagatctttccgagcggccctttccctcagtatgttctggactcactgaggtcctggccgagcgtccaggtagccccgagggccccgactcgctggcgcaggggtagggggagcgggccaggcggggcaagcgggccaggcagcggcggcggcgctttcattagagggcgctgtgggagcggctccgccgcagtcccgactcccgccgcttcctcccgccgcccctccccgccagtccgggcgaacgcggccgggcccttggggaccgagtctcggcgccgccggggaacgggcgcgggccgcgccacagccggagcggggcagggccccgccaccgccttcttccgccggccccgccgccggccatgcattcttccggctcctctgactcccaaagccccggctggggcccggccagcccgaggtaacctccggctccgcggtcgcaggccccagagcggcagcggagccgggccaggggaggcgctgggggcggggaagggggtgtcgtcgtcgcgtggcccggggaggcggcagcggcctgagggacgagggcgcggtaggccccggggaggaggcgggggcgcggggcatccgcccgcctccccgggacccgcccgggtgacaggtccggcctctgagtccccgccgtccctctgtccgcaggcagccgcgaggggagtagggcgccagcgcgcccgctcgcgcagcgcctcgggccgcttgggccgccaccgcgtccatgaccgcgacccctcggcgggggacacccgcccccgctctccgcagccgcccgccgtccgcgcccgccgaggtgagcccggcgcgcgggccgcgcccgccgccacgacccttccacatccgcggaaaccgctgcaggctccaccggctccccgcgctgcggtcgcctcttctctgcccctttcatcatcccctgcttccttgccctctggtcggaaatctcattctcttcatccccagttccttggcttttacctctttctggcttttgctcccttccccctactcctgtccttcctctttttcgcattataaccccctactttcttcctctcaccttgtaagctttttttctaggccccccattttttttcttaaaaaaaaaagggaaacaaaaaccctattgctacaaatgagaattttgagggtaactcttcgctagagccagagaccttttaaaggaatgcatcggtgtgcaggaatcgtggtggtgaggagactgaggtcctcagtatctgggaaatcttattgaggggaccctgtttcggtcatgtcacttgtgtcttcagtttggagatcctgaggttgtctgaagcgagtggatctatttttctaagtccaatagacgaccgcagtgagacacggtgcggggacggccaccgattactgaatgggaattgtgttatcatttgctaaatatattgtgacatacttcgtgcctcggtgaacagctcccttgaccttgtgcggctcctcctccctcgctctctgtccccctctggaatttcccctgagagatcaccgaggtactacacccggaaagcttcgaccctcgctgttttattttgtgctgggggcgatttctatgttggtgactgtttagatgtatttaatgaattttcctttttaagtgaatttttctttcaccccagaaagacaggacggagtccagtgtgagaatggctataactttggaagaagctccgtggctgggc

SEQ ID NO: 4065 - DNA, 6000 bp, Homo sapiens
tcacaagagcagttgcaagtgagaagcacagcccagatttagttccaaatcggtccgactccaaagctcaaattattaactgcagcgctactctgccttttaaattttctcaaagtgagtgcaaaattaaaattatttagagtctggtattttctcagtaagtaggtggtatcacgtgatgctatgctcgtgctcctaacacttcctgggccagggctattaggagacatactctttcgttgcaagaacaagtggcattttgaagaaaccatggaggtggcgtttgggtgaggacactgcaggctgatgggcacagctttacattcatattagagctgcttcgttctaggtgggctgcaaatcacaactcccttataaatatagcccactcaaattagtattgaccactatctcatttttctttcttctttttttttttttagacggagttttgctcttgttgcccaggctggagtacaatggcaggatctcggctcactgcaacctctgcctcccaggtgcaagcgattctcctgcctcagcctcccgagtagctgggattacaggcgtgcgccaccacgcccggttaattttgtatttttagtagagacagggtttctccatgttggtcaggctgatctcaaactcctggcctaaggtgatgcgcccacctcagcctcccaaagtgctgggattacaggcgtgagccacctcgcctggcctcactacctcatttttaatcttttgcacatctcatgcctccatcactaaaaaaaaaaaaaaaaaaaaaaaaaaagaatggttactcaagtcaagaatctcttaagtttaatggattctaaaaaaacttggaggcccaatatgcatacttttggggtacaaaaattacctttgtacaaaaggttacagacgtacacattatataaattcaccaatgaggagctgacttcatccacaataagaatttggtgctttggaaagatgtccattctcttctccaaaggcaatgtcatctcttgtcaagtagaactaaaaacaaaaacagatgcttttacagtttctaaaaaaaaactaattgttaatttctggtcaaataccagtataaaaataatttttagtgtcataatctctgaatttgtgaattgtagcatatcaagttttgcaccaatactaacagaacttttaaaaaccatttcatttgtttagaacaaaagaagcattaaaggccaggagcagtggctcacgccccatctccactaaaaatacaaaaattagctgggcgtggtggcaggtgcctataatcccagctacttaggaggctgagtctggagaactgcttgaacctgggaggtggagtgtgcaatgagctgagatcacgctattgcactccagcctgggtgacaagagtgagactccgtctcaaaaaaaaaaaaaaaaagatgattgagttagtataatctggaagcaaagggtgtaagctctagagtttgatgcctagttcagagctcaaatctatcaatcatttacagcttgtgtggtcttgggtaagttacttaaaatctcaggttctatcctataaaatagtacttattttatggggctgtgatgaggaagaaatgagatgatgcttataaaactctcagcacagggttgggcagagtaagagatcaataaacaaaagctatttaaacctcacaatttgctgttaagtataaaatgctggccaggtgtggtggctcacgcctataataccagcactttaggaggtcaaggcgggcagatcatttgaggccaggagttcgagaccagcttggccaacgtggtgaaaccctatctctactaaaagtacaaaaattagcagggtgtggtggtgcacacttgtagtcccagctactcgggaggctgaggcaggagaatcagttgaacccagagggcagaggttgtggtgagctgagattgggccactgcatttcagcctgggtaacagagtagactctgtcttaaaaaaaataaaaataaaatgcagcctgtatttttatcaattaactttatatatactgtgtgtgtgtgtgtagttttagtacaaacatttttctacagtgctttttattgacaccatctggcaacacttaccctttcttaaagtcaggaatgggtcccccaggcaggctgcctctgccacttccagctcctccagcttcctcagccactggctttatggttccatccactgcactcctggggcagtgacacaattcttatctgcctttggttaggaaaataattgggcaatttgctccagtgatacatttctgctgatttcaggttttctttcagtggtgaatgacaaagacatgcaattagcaaggaatgctttagtttgtcaagtttagttccaccaggcttccctcacttattttgactgttttgcttgctgtcatattaaatgtttcagaagctttacagtttgaagacagtctaagccagaaacagcaatggctacagtactctgataaatctcttttgtctattagagtgtctcatctgttgttcaatagtaattccatcacacatgtgctgtagtattaatactattgacaacaataatagaacatttattgagtgcttactgtgtaccaggcactattttaagcattttacacatattaactcatttaatcttccctatactattattattcccattttacactagtgaaaaataccgtagtctatatcttcttacctctacattattgattatttttatgttgatttttagaaaatacttccaatgatcaattttctctaattctcaatataaggatattttcctggaggtgcaaatatttaataagctctgagtttggaggcttatctggtgtaaggtgggacttggatcaaggatgctttagcatggctgttatggacctcagaaatactgaaagacaaggttatgttttacaaggctaaggacaatgaatagggctagaggttaggatgttctgtggttggggggaggtggggttgagacagggccttgctatgtcacccaggctggagtgcagtggcaccaccacgactcactgcagtctcgacttcttgggttcaagccttcctcccactttagcctcctgaatagctgggaccataggcacacacgcctggctaattttttttatttttattttttgtagagatggggtttccctatattgcccaggctgatcttgaactcctgggttcaagtgatcctcccacctcggtcttccaaaatgttgaaattacaggtgtaagccaccacgcctgacctgtgttttttttttgtttgtttgttttttgttgtttttggaataagacatttgtattcatttctaagccaaaactacatgtgtattcttcaggaatggttaaagttcaggggctagggatggggaaggagaatagagatgaccagactgcaccttcaaatcctctatgggatgagataatgagacaacaaaagaaaccaacaaagaaacctaggagccaggcctctcaaacctccacagcaggaagagaccagcagcagacacccttcttcaagggtcccttcctcagcctcttccagagtcctggagacagttaccttctggataacttttatttggaacacagcctgttgtcaatagaagagtcttggccaggtgcagtggctcacgcctgtaatcccagcactttgggaggctgaggtgggcagatcacttgaggtcaggagttcgagaccagcctggccaacatggtgaaaccctgtctctactagaaatacaaaaaataaaaaattagccgggcatggtgcctgtaatcccagctactctggaggctgaggcaggagaatcgcttgaatccgagaggcggaggttgcagtgagccgagatggcgccattgcactccagcctgggcaacaacaacgaaactctgtctcaaaaaaaaaaaagagtctttatttggaataaaccttcatgtaggtcagtcgattgtactgcgtatcaggtcatgctgtcagggacacgtgggggtgagtagaatattctcttcaatgaagaatgagacaagtacacagaggaggtcagccctggtttctttggcggccaagggacttgtgtctaccacaaagtagaccagccttcgagtgctaggcaggagtgcatgcttacagaagtggggtctgctctcctgagggctgcctgcgattcacccagggaaggaagccttgacagcgaagatcctgaaggggaacggggacgatcttgtgccatgagtgggtaataggaacgatcctgcaccgtttataatggctgtgaggaacaagagaggattaaatagctttatcctggggttagtggaatgagggtggagggctgagtggcggatgaggtcacatttcacgaaatgaaaagcaggaagcaccctcaagggcaagttgccccaagcctgtgctccggggccttgcacctgattaatatggaatctgcaccgcaaggtgcctatgggcacgtacgcgaaggtgtcccagtccaccgcagcgaacacaccccacagcagccaaggcccttatgactgagtcaacaggacactggcgaccctgagggccaggagaagcggggtgtctgggtgaatcccacctctgcatggggagggagtctgtgaagattgacgtccagacacgccccctctcctccgcagcgcccctctctgcacagtcctgtcccacaaagagagacatcggctcgtggccacctgccaagtcaggcccaggccgcgagggaggggaaaagggccgcgggaggcggtgcacgggctgttcagatactgcccccgccactcctttagactctggacgtgcggggactggtggcgctcggcctcgcgttataaaaagcggtggggcagggccggcgagacaatctgggaggcgggtaccgggcctcacggatccgcgccgcgccccccacctgtggctgcgcgcggggtgggctgcgctcccctgggcggcgccgggcgcccggggctggtggcgagatgggccgctactctggcaagacgtgccggctgctcttcatgctggtgctcaccgtcgccttcttcgtggcggagctggtctccggctacctgggcaactccatcgcgctgctctccgactccttcaacatgctctccgacctgatctcgctgtgcgtgggcctgagcgccggctacatcgcccggcgccccacccggggcttcagcgccacctacggctacgcccgcgccgaggtggtgggcgcgctgagcaacgcggtcttcctcaccgcgctctgcttcaccatcttcgtggaggccgtgctgcgcctggcccggcccgagcgcatcgatgaccccgagctggtgctcatcgtcggcgtcctggggctgttggtcaacgtggtggggctgctcatcttccaggactgcgccgcctggttcgcgtgctgcctccggggacgcagtcgccgcctgcagcagcggcagcagctggcggagggctgtgtccccggcgctttcggggggcctcagggcgcggaggacccgcggcgcgcggcggacccgacagccccaggctcggactcggccgtaaccctccgggggacctcggtggaaaggaagcgggagaagggggcgaccgtgttcgcaaacgtagcaggtgcctttcggttgcatcctttggaccgcttggcccttccttcctcctcccacccggtccctttcttctcaccccacgccctctttttcttctgcatgctttttttctgtttttttttttttgttgttgttgttttttttttttttttttttttttttttttaataaatccattccctttacaatcccgctttacttctcttctgccaatttaacatattccccatcccttcttttttctcctggatcctcgggtagccctggcctcttttcccttaccctattctctgtatatgagta

SEQ ID NO: 4066 - DNA, 6000 bp, Homo sapiens
aacagctgggggcgaagtaaaaactgaacaaagattatttatcattattattacctcatatcctgctgctgttttccctctatcaacaagtcattaaagcacacatatcccacatcttctaagttcctccactgaagcagtatacttgctccatctattcaaatagtttccccttctaatttatgtattaacaaataaatgtttaatattgagaatgtttaaataggcttgggcatcgtggctcatgcctgtaagcccagtgtgtccagaattggtgggttcttggtctcactgacttcaagaatgaagccgcggaccctcacggtgagtgttacagttcttaaaggtggcgtgtccagaatttgttccttcggatgttcagatgtgttcagacttttcttccttctggtgggtttgtggtctcactggctcaggagtgaagctgcagaccttcacagtgagtgtcacaactcataaacgcaatgcagatgcagagtgagcagcagcaagacttactgcaaacagcaaaagaacaaagtttccacaaagtggaaagacacctgagcatcttgccactgctggcttgggcagcctgcttttattcccttatctggccccacccacatcctgctgattggtccattttacagagagctgattggtctgttttgacagggtgctgattggtatgtttacaatccctgagctagacacaaaagttctcaaagtccccactagattaactagacacagagcactgattggtgcattcacaaaccctgagctagacacagggtgctgattggtgcatttacaaaccttgagctggacacagagtgctgattggtgtatttacaatcccttagctagacataaaggttctccaagtccctgctagattagctagacacagagcactgattggtgcacttacaaaccttgagctagacacagggggctgattggtgtgttcacaaaccctgagcaagacacagagtgctgactggtgtatttacaatcccttagctagacataaagtttctccaagtccccaccagattagctagatacacagtgctgattggtgcatttacaaaccttgagctagacacagagtgctgattggtgtatttacaatcccttagctagacataaaggttctccaagtccccgctagacccaggagcccagctggcttcacctagtggatcctgcatcagggagcccgccagtcccacgacctgtgcccacactactcctcagcccttgggcggtcggaatgggaccgggcgcgtggagcagggggcagcgctcatctgggaggctcaggccgctcaggagcccatggtgtgggggaggctcaggcatggcaggctgcaggtccccagcctttccctgcggggaggcagctgaggtccagcgagaattccagcacagcgctggtgggccaggccggcactgctgggagacccagcgcatcctccgcagctgctggcctgggtactaagcccctcactgcctggggcctgcggaaccggccagccgctccgagtgcggggcctgccgagcccacgcccacctggaacttgcactggcctgcaagcccagtgctcagccctggttcccacccacgcctgtccctccacacctccccgcaaggtgagggagcccgctccggcctcggccagcccagagaggggctcccacagtgcagtggcaggctgaagggctcctcaagagcggccagagtgggcgccgaggccgaggaggtgcagagagtgagcgagggctgctagggctgccagcacgctgtcacctctcaccagcactttgggaggccgaggtgggtagatcacttgcagtcaggagttggagactagcctggccaacacggccaaaccccatctcttctaaaaatacaaaaattagctgggcatggtggcgtgcacctgtaatcccagctactcggggctgaggtgagaagattgcttgaacccaggaggcacaggcagtagtgacccaagatcgtgtcattgcgctccagcctgggtgacagagggagacaccatctcaaaaaaaaaaaaaaaaaaaaaaaagaggataagtgctgcaaacatacatatagtatgtagaagaagtttcaaataatttttaaattgctattgagatggacataatgcatcatgttaattgtgagctccatttctgtgtgaatagaaaccatatcaaacatcatcagtagaaatgtgtttttatcggacagcttttgaggtacctctaccttatgaataaaggctttctgcagtttgcagcatacagaagtttgttccttatgtaacagtaccaaaagaatccaactggatctcacgccacgtgaaactttacctacacgtctttcctgaaagagatgtttcaatcctgggaaccgagatcctctggagaccagagccaaataactgccacattggaatgcattccgctgggggttcctgtattttatatatgaaagcttcctggccgcatgtgtgttttggttggctttagtggcaggactgaagggttttgctttgcttttgttatgtgaatggggaaaggggctttgccactcatggcctcattaacaacaatggtgccaagatgcggacttttaagtgacttttactttatagattctgaaaacccacaacttgctagttgtgagtgacaagcatctttctgagaactttctgaaaattccccacttccaagtttacacagcctttagtagacttaaaaaagaagagaaaaataccaaacagttcctttgttgagaaagcagcctacatatagatctgattgttcatggtatgtttgagtccacgaagtagaaatgaacaaaaattattgcttagttttcctgatgtcaaatcagttttgttttaaaaatgtcattagtaatttattaggtaaaatgttagctaagctaactctagttaatttacaaagttttggcttcattttgttatgatgagactttataaacctgatctttaaaataaggttcttaaaatttttaaaaatttattttatttattttttgagacagagtttcgctcttcttgcccaggctgagtggcagtggcatgatctcagctcattgcaaccttcacctcccaggttcaagcgattcttctgcttcagcctcccgagtagctgggactacaggtgctcgccaccgtgcccagctaatttttgtatttttttagtagagatggggtttcaccatgttggccaagttggtctcgaactcctgctcaggtgatccaaccgcctcggcttcccaaagtgctgggattataggcgtgagccacggcgcctggccaggtgtttttttttttttttttgaaacgaatcttcttctatttcacaagtggaaatcatccaggaaatgtgcacctcaagggaaatccagtgaaatcttgattctgggtagaacatatgagaaaagaatagtgtagcactcactgcttggctatttgggataggatctgtcttaggtccccataagcgcttttatttctgtgtaatttactgcaaaactctatgaggtaggactaatattatcttatgtcaagggttaagacaattgagacttgggggtttgtcaaaaataaaagattttctgactttggagtgcgatgtgcatttctgttgcacagatctccaccaagggcaaattcgatggcaatgacaatttgatgtcagaacttctcaggaaaggctctgatgaactcattcacactgcatgtgaatgactgagaaaactcgatgtattttcacttttttttttttaagaagtaaacctgggtgttttgtagttctatgagaaaatgaaagctgaagctaggctatagatgaaaagttctattcattattacaatttaataatgcttccaaaatagcaattcacttaaatatacctagttagggtgttaagaaatactttgattaaaaccacactgcaaaatagggaacttcaatggactgctttaaactctcgacctcaaaggaaggaaatcaactaaccgataatgaaaactagcagaaaaaaaaaagcttaggatccgtaacagattcggagtcaacaatgacatgactcagcattttggggttcaattaaaaccaggcttgtaggttgcaggtcaagttgtgtttcggtgtgtaacgcataaaacttcttgttccacgctccgcggtgttggggattttctactgcatctcgacagcatctcgggtaacaaccgagcccctcctcgcagcgtaagtcgtaggagccctcggccattcttccccctccctcccgccgccggtcccagcatcggtccgggttcgcttctacgcaggttcagcggccgcggacacaaaagcgcccctgctcgccttcgatgccgctgcttggtccaggggcttctgtgggattttaacacgctaaggagggcactcatagtgttttaccgagaaacgctttcgagctcggatctttggtgatcacttcaagaatgtattagttttctttgtagcttaaaaaaaaatctcgttcgccaagccacctggcaccccaaacactgctgcgagcgctgggagggaaagggcgggagcgcgcgggctccgtgtgctgcgagggcgcctgggcggctgagataaggcggtggcaaacgtcgcgctccgggccgccccgccagactcggtttcccccgctcaccggcctccccgcccccaggcagggtggggcggggcggacgcgccacggcgcgcgaccaatcgacagcgccggggatgattcaaaaggtcgaggagccaatgggagccccgggcggcctcgccggtggggaggggaggcgaggggaggggagaagcgccgcgaggcggggccggggaggcgcgcgcccggcttgcgggactgcggggcgcgagagcgcggccgggtagcgtcgcgcgcgtggatctgccgccgggttgctgtgcgactattctccgggagccgtccgtgtcaccgccggaacctggcgcaggtgagtgcttccacccccgccctgctcccagctccccgcggcgcgttcttcgaggggccgctgggggaggaagcccgaggccggcgcagcggccgggccggggaccctgggcgcggggcctggcgcggcggccttcccctcctctcctcgcctcctcgtctcctcccctcctcgccttttctggcccagtcgggtggtcggggcggcggcgggcgaggctggagctcgcccgagccgggcccgctgcggaaatggagctgggggttttaaactgcggacgtttccctccatgttggcggcgcggcgcggctgtggagcggcggcggcagggagggttcgtgggcgcctttgtcctgccccaccgcagcctggctcccggcccctccgagcgcccgtctgacagatgagcaggcggccccgcggtcctgcagtaggaggctgacagggcgcggcggcctggcgggacggggaagggtctgcggccgaggtgggcttagattcgcgctgcttgtcactggctttgagggtcgtggtcgtcgcggtttggtgattctccaggcacactgcatggctgctcgctcctatgcgttgaattccttcgcccggacagtctcaaaaatcgggtatttaggcgggtgtgcgtgttcctgctaaagcacggtcctgctttttcacctttttgagggttcagaaaaatgttctaatgacagccagcctcgcactgccagtagcctcaaggggcacttagtaaagcacttgctttcggagggctttgttgaaggcgctttcccagagtgattacggggcccggtcgggtgttcacacgagggcgcggtagataccgtggtccgcgcgtggacacctgcagcgcgaggcgcggcgcctgggcagtgccagggtgaacaggcccccggggaccttgcacgtaaacacgtgtagatctgtagtt

SEQ ID NO: 4067 - DNA, 6000 bp, Homo sapiens
ataaaagaacagacatggagaagatatttgaaagttttcaaaaatacacctttttgatcaatctgtgtgcctcctcacatataaaagacagggatatagaaaaacaggtagttggccgggcacggtggctcacgcctgtaatcccagcacttggggaggccaaggcaggcgcatcacgaggtcaggagattgagaccatcctggctaacacggtgaaaccccgtctctactaaaaatacaaaaaaattagccaggtgtggtggcaggagcctgtagtcccagctactcaggagactgaggcaggagaatggcgtgaacccgggaggcggagcttgcagtgagccaagatcgcgccactgcactccagcctgggcgacagaacgagactccgtctcaaaaaaaaaggaaaagaaaaacagatagttgcgctgaactgtttatgtaagttagattctactgtgacaagtgcattataacaaagatctattgaaaaatcttgggggaagaaggaattacaaaacagtaatggatgtttgttattttatggtaatggttatacaggtatatgcctgtgccaaaactcatcatattgtaaactttaatatttgcagtttattatacaacaattatactcaataaagcatgggaaaaacacgtttcctagacttgctattcaaagtgtggtctgtagacagcagcatcggcatcaccagaaagcttatgagaaatgtatactctcaggcctccctctatacctactgagtcagaatctgcagtttaataagacattcaggtgagcgtgtctggaactcatctcccacagtgaactgttaaagcgaagttatattctctaattttttaattttattttttagaaacagggtctccttctgtcgcccaggctggaatgcagtgacgccatcatggtttactggagccttgacctcccaggctcaagtgatccttccacctcagcctcccaagtagctggaccctaggcacatgccaccatgcccagctaattttttattttttgtagagacagggtcttcctatgctgcccaggctgttctcaaactcctgggctcgaacaatcctcctgcctcagcctcccaaagtgctgggattacaggcatgacgcactgtgccaacccctaatgtttttagtcattaagggcaaccacctacacaatggcccttgatgtttcgattagcaagaggttcagatgcttggtctagaggatgtttgggttttccaaccatattcaatatgttaaattacaaaacaataaaaaagtccatataattttttttaatgtatgtctttttttgagacagtctctctccatcacctaggctggagcgcagtggtgtgatcttggctcactgcaacatccacctctcaggttcaagcaattctcctgcctcagcctcctgagcagctgggattacaagtgcctaccaccacgcccagctaatttttgtataaaaagtccatgtaattaattaattaccatattttacctaccttcctaggtatattctataggttttaataattattgtatactttttaaaaaaataactttttttctgattacaaaagaaatgcttatcgtgaaaacttggaaaacagaatctagcatttcatgaagaagggttatatttaccctactcattatcatcccaacagttattgaatgttaaaggtagaacactgagcaaaacacaggggaatatatatgtatatataacattttgaaggttaggcacataatatgcatatttttaagctaatgaagctaaatataaagatccaagctaagtgggaagaacacagaccttagagcagtagaattagagtttttagtcctctacaactagaagtgggtttaccataaagttaatgaagctcaagcttcagggccccttgcttacacaggcccctcccaaggcccttagagcggccttagcagtatacacttctgtaacagttttgagagtaagatatttaagacctctgtcttcgtttctaacttcccttcgtcatcctcctctggttaggaggtattgaaatggctataggctttgtgggggatttggctaaggggacaatgaatagggatacatttaatttggggtcagtggcatgcatttaagtggtttgcagtcacttctgcatgtttttaaattattgctcaccatgggtgtaggaatggctttctggaatatacctactgcccattatgtcaattcagccagcaccatgtcacaaaagtgcaaggccaaagggcgaaggaaccctatgttgcctgacacaggaagtacttgggtagtggaggagcaacaaggtttgaaagaaaagaaagagctagtaaaattcttccattctttttcctcttctggggatgttgtctataggcacatagaatggtccagcgtttgacatactgttgtaggctttcctacaatacagcttctaataaaactaggctgtcctgaacccctggtaatataattgcttacctttataccaagaaggctgggaaagcaccaaaatctactgtggtgtgtacccacgcagacttcaaggggttcgtgctataagacccgaagtcttatgagattgtccaaaacacaaaaaaccatgtcagcagggcctatggtggttccatgtgtgctatatgtgtttgtgacaggatcaagcatgttttccttatcgaggaaaagaaaatcattgtgagagtgttgaaggcacaagcacagggtcagaaagctaaataaaaaatgaagcttctttgagtaattaaaattaaaagacttaaaaatatgcttccaaccatcagaagtggaagattataaggagagggatcaattctctcaatgcctaatcaaaatgaaggttctcactcactgagaatctaagtcatatctgcaattataactgcaccatacttcatgtttttatgtgaagcatgcaaaagggaatagattagaaaccctatgtttatgggacaaaaacttatagttgtactacagtgagtctgtctgtatgtgaagttatatgtcttatccaccgtaatgaatgagatcctgtctgaatgcagcatacaaatcttgtcctgaaaaaaaccctcggccaggcgcggtggctcacgcctgtaatcccagcactttgggaggccgaggcgggcatatcacaaggtcaggagattgagaccatcctggctaacacggtgaaacctcgtctctactaaaaatacaaaaaaattagccgggcatggtggtgggcacctatagtcccagctactcaggaggctgaggcaggagaatggcgtgaaccctggaggcggagcttgcagtgagccaagatcgcgccactgcactccagcgtgggcgacagagagagactccgtctcaaaaaaaagaaaaaaactctctagggcttcagtaaaaaccacacacaaaattgtcactgaagcagccaaacggccataaaaatctcatagcacatccatgaaacttgagagaggtttcccaaactgaacaataaccctaaaaaagtacgttaacaatatcagtaatgagttgtgatgctgaaataaatttataaacaattattaagaaacaaatttaatcagccatgctggagaaaagactgatctttctcttttctttatagagaattacaaaatacgccgggcgcggtggctctcacctgtaatcccagcactttggggaggctgaggcgggcagatcacatgaggtcaggagtttgagaccagcctggccaacatggggaaactctgactctactaagtttacaaaaattagccgggcgtggtggtgagcacctgtaatcccaactacttgggaggctgaggcaggagagttgcttgaacccgggaggcagaggttgcagtgaaccgaattgcaccactacactccagcctgggtggcacagcaggactgtctgcaaaaaacaaaaaaaaaaaaaaaaaaaaaaagttacaaaataattgttataggaaaaggcaatcagaagtacgcagccaaaacaaaggtgggaaaaatgatcataaatggtgctcccaaagtctggaaacacaggtgaatatacataatgtcgggggcgacttcaatcttttagaaaaaaataggtttctgggctctcagacgccctgtagaagaatatcaggcagtcaatgaaaatattacggttatgtgtgtgatgtttgtgggttttattaacttttaaaatatcatttgttttttctttctctttctaaatatacattcactttcctacccttctgcgcgtaactttttgtactctttcctaatgagggtccccacaaattgtatgagctgcgcttcctgcaaaaccaggatcagccccgtctgcaacctcaaagtcactgaatttctctgcagtctcagtttccccttttaaaaaaattgggaatttgccctgcatttccttagagttgctgtgaaggccaaacgagatggtggtgggcaaaagagctctgccaaccacgcaggcccctgcaaatgtgaagggcctctgacctggagggttgggtgctggccgacctcgtcaatcctccctactccgacccccgcgcggggctccactgaccccgcccctgctgggcactgacagccgcagcaccgaaccgagcggtgggggtggtagcacccgcccacctggagcaactgggatccgaaaggatggggtgcgggggaggggagttcgggaccaacgggagttggggagcctgaagggtggtcgctgagccagggcaactgacgattccggagggggtggggcgccaggcctcagcccctctcccggagccctccagcctcctcagcagcggaagttccggtgtcggtaagcggaggtcagaggtcagcaggaagtcgatacgtggctgccgtctgtccccgctgaggaggtgcagcagccggagatggcggcggtgctgaacgcagagcgactcgaggtgtccgtcgacggcctcacgctcagcccggacccggaggagcggcctggggcggagggcgccccgctgctgccgccaccgctgccaccgccctcgccacctggatccggtcgcggcccgggcgcctcaggggagcagcccgagcccggggaggcggcggctgggggcgcggcggaggaggcgcggcggctggagcagcgctggggtttcggcctggaggagttgtacggcctggcactgcgcttcttcaaaggtgagccgggccagccccacccccgccgcttctgcccggccccgggagcccggcgtgggctgtggtccccagggtgactggaccagacttgccctcacccactcatactgggctgtggtgactcaagcggggttccctccttgggggtacccgaagtttgtcactacccgcttggccactaggtcacacccctgacgggcctgcaaccttggtttagcagtcatgtcccgcctcccagaggttaccgggacattttacctgatttagcttctgggatttccaggagccctggtggaagaatgagcccactttcttccaaaggatcccattctgggattgccttttattattattatttttttaactgacgcttttcttttcctatttcccatggcttgtcacatcagaacccgccgatttttacccttagtggaagaaatctgtcaagaggttccatacatagcttttccagccattcttgggaaccataaactggaacaggacttgatcccccggcagattgatgtggcagagaggaggaagtaaagtgttaagctcatcatcctctccggcttgtcaaactcttgaggagagatgtccactatgttctagtaacttctaggtggttaaaattttacattgtaagcaatgtgcaagagtgaattctcagagtaaggcctaacagtaccttctgtgcttttcgcataattaattgttaaatgtctcttgtcttagagc

SEQ ID NO: 4068 - DNA, 6000 bp, Homo sapiens
tgtaaaatgtaaaagatgctgaagccttctacctacagtgcactcacctgcctaaggcatagtgctaagaggttaaagttacagcctcagcattcactgtaatcacacagtacaggtgagttgccaaaagcttcgatcctaacctcttcagaggaatttacaaagcactcctgccccacgtggattccacgcctttgctgtgcatgcttcactgagctgcttgcttcatcttcagccacagtcctgacaccctacccttgacatgatgagctgcaggcttgagtcgaaagaacaagaatgtaccaataagggtcaaatgacacccctaatcagcttacaaactccgaccagagagcctttgttttgattcttgtgctatcgtgtacccgttcctgctgtccacatgggctccctcctttgccacccttagagagggacaagcacccacaggtggaattgctcttgaagtaatcccaacagctctcaatttgcatcaaaagaagtcccttttgaattcaatacctgttagccacgaaacctattaagagtctattcagagggccagattttacctcttggttcagtcacacctccatcaagagccttctgtgtctttcttgtgggcaggacttaaacttttgttattctcttggcattaatacacagccctttcttgctttgctgtggtattttattaatccaatcacatctaactggcttgttttattcttttccaaacacaccttagagcattttttgttttgttttttgtctttatttatttctttttttgcttttttcagaggcccaggaacttgatcctaatttctaaagaggcagtgaagagccgggcatagtgactcatgcctgtaatcccagcactttaggaggccgaggcaggcggattaccagaggtcaggagtttgagaccagcctggccaatgtggtgaaaccccttttctactaaaaatacaaaattagccaggcgtggtggtgggcgcctgtaatcccagctactcagggggctgaggcaggagaattgcttgaacctgggaggtggaggttgcagtgagcccactccagtctgggcaacaaagtgagactctgtctcaaaaaaaaaaaaaaaaaagaggcagtgaagttattcttattttcaagtgagaagagaaggtcatagaaatgcaaagcaataattcatatatatatgaaatgtatatgttatataaacatatatatatatatatttagagtaggtcatcttttttgttgttgttgttgtgatggcaatataggtccaggtgatccttctgctaatattcattccccattgtacttttaagagctatagactttttttttcttttctttctttttttttttttgagacagagtcttgctctgttgcccaggctggagtgcagtggtgtgatctctgctcactgcaacctccgcctcctgggttcaagccattctcctgcctcagcctccccagtagctgggattccaggcacccaccaccacacacagctaatttttgtgttttcagtagagatgaagtgtcaccatgttggccaggctggtcttgaactcctgacctcaggtgatccacccacctcagcctcccaaagtgctgggattacaggctttcttttttttcttgatacagggtctcactctgttgcccaggcttgagtgcagtggcccaatcacagctcactgaagctttgacctgccgggctcagggaatccttccactttagcctcccaagtatctgggactacaggcacacaccaccacacccagctaatttttacatttttagtttttgtacagatggagtctcccagtgttgcacaggttggtctcaaactcctggcctcaaatgatcttcccaccttggcttcccaaagtgttgggattacaggcgtgagccaccacacctggccaagttttgttttttaatcagctacacttgagttatttttctattgactggaggccttagagagcaatggcagaaaaaggcagtgggatgccatgccagggaaggcaggaagggaaggccagtctgacatttcctggcccttgcagcagcaggggttttctggaaagtgggtaagagaaagatgaagcttaggtctaggttaaaattgtcactttctctccaactgggagagtgtcgttcattgatgtttcttcagctgggctcaaagaagaggtagcaggatgcatgatgaggcatgatcctacttcttttcagaagtcactgaataacatatttgctaaaaggaacatgcttagtcataaatatcagtggagctgatttcacactacaccaccaattctagaacttctgcactgatgagaaactagcttgaattgtcgtcaccctgggggcaggaaagtgggggggcgggggtagggaggcgagactccatgtcctctgggtttaagaggttggactttagaggattacatgcttactgctcatttcacaggcacatttaaggcccgacttaaccccacactttctattatcgatccttcccccacctcactccttacctaccaggaccatatacttaaggcactctactagggacaaaatttaaagatgtgctaaaaagtctcagtaatcaaatcatgcaaaatttattttaattgaaaatttttaagtcagtttttatgaggtgacttctgaaaagaaatgggatcgttttcattgtgcatcttgctacctcctctttgtgttttttttgtttttattttgttttgaaaagatgcagtcttggtgtgtcgcccaggctagagtgcatggagtgcagtgacgtgatctcagctcactgcaacctccacctcctggattcaaccgattatgctccctcagcgtcccaagtagctgagactacaggcatgcaccaccaagcccagctaatttttgtattttcagtagggatggagtttcaccatgttggccaggctggtctcaaactccagacctggagtgatccgcccgcctcggcctcctagaatgttgggattacaggtgtgagccaccgcctggccgctacctcctctttttttttcttttcttttttttttttgagacggagtcttgctctgtctcccaggctggagtgcggtgtggcaccatctcagctcactgcaacctccgcctcccgggttcaagcaattctcctgcctcagcctcctgcgtagctgggattacaggcacgctccaccacacctggctaatttttgtatttttagtagggacggggtttcaccacgtcggtcaggctggtctcgaactcctgacctcgtgattcgcccgcctcagcctcccaaaatgttgggattacaggtgtgagccaccgcgcccggccgctacctcctttttgagcccaactaaagaaacatcaaggattgataccctcccagttgaagagaaagtgacaactttaacccaaatctcaccttcctcttactttctctttcccattttccagctgccaaactaagggcagctgctgtcagtttttgtaaataaagtttccagggctgggattagagcgagagaagagaggcaggattgtgaaaggtcaggagtggatactcaatcaaaattttttatattttgttcattacggattttttaaattaattttgatttttaaaaatattgcactaaaatgtttatgttgattattgaggtttttttattttgtgaacccataaaatttgcaactgacagtaccctgtccaggtccagtaaaaatacctaggagtctacaaaaatctacccacgactcactggacctcaggtacatatccccccccgcccccatgaagtctccataaagtgtcccagtgagttttaatgttctctcctgtctttccatgcacgtgtattaagatgcattgccttctgattagtgttttccacttcgaacagcgggaatgcctcgaccacgcctgtcttcaaatttctgctctagttaagaaacgatctcaggccgggcacggtggctcacgcctgcaatcccagcactttgggaggctgacgcgggcggatcacctgaggtcaggagttcgaaaagagcctgaccaacatggtaaaaccccgtctctactaaaaatacaaaatcagccgggtgtggtggcgtatgcctgtaatcccagctacttgggaggctgagaagggagaatcacttgaacctgggaggcagaggttgcagtgagccgagatcgtctcaagaaaaaaaaaaaaaagaaaaaaaagaaacgatctcttcccttctcaaagttatatacatttcactattcgccaaccacctcctccacgccgtccagagctgagctgacacgcagcgaagtcctctcagtggtccctccgcacctcagccctgtgcttggcagcgagacgagtgacagggccgccccagcatgggtctcccgggccgcggacccgccccacgccgtatccagcacgctgtcctcccgccccatctttgtgccggccatcgtgtggtcgcgtctgcgcgctccgcccggtctgccggcgtgagaaagagctcgtgtcgttcccaagttcagaccagaggggacggcgaagcgcgaaaaagttccctgcgcccagtacgcaggcgcagccgtgctcctgggcttcccgggcctcgtcccagctggcgcgcccggcgctcctccgccagcgggcagttgggggcgctgcagggagggcacccgagcgggttgggggcgctcggaagggtggcttgcaaggtccgggtagctgcagtccccggagtggggcggagaggcgcggcaccgcgcggacgaggatggggcgggggcgggcgcagcccgagggtgcaggcacgataaggcgggtgacagccagcggggaggggcgggcgccaccgcgtccacgccctttgctcggggccgggccgggagggtcctcgggctttgcgcgcgcctggccggcgggctgaggcgtacgggtcgcacgcagcgccatgcgaggcccccctgcctggccgctgcggctgctcgagccaccgagccctgccgagccaggtcggctcctgccggtagcctgcgtgtgggccgcggccagccgcgttcccgggtccctatcgccgttcactggcctgaggccggcgcggctatggggcgcggggcccgcgctgctctggggcgttggagccgcgcgccgctggaggagcggctgccggggcgggggtccgggcgcctcgcggggcgtcctgggcctcgcgcggctcctggggctgtgggctcgcggccccggcagctgcaggtgcggggcttttgccgggccaggcgctcctcggctcccgcgcgcccggttcccgggcggtcccgcagccgctgcctgggcaggggacgaggcctggcggcgcgggccggcggcgcctcccggggacaaggggcggctgcgccccgcagcggccggactcccggaggcccggaagctcctggggctggcgtaccctgagcgccggaggctggcaggtagggtcctccccggccacttccctccgccgggcctctccttctccacacgcggggtcccggggcgccgagagggacacggccgggccgcagagcgcgtgtcaccgccgcctctcctgggccactcctaaccccggaggagggaggggatcgctcacctcagagtagcgttgtcaagatttcgccttagctggggactcgtttgcagattttacacttgttttcttgttgacacacgttatatatgtcattattggaatctttgggtctgttccaccaccaacttagtgggagcatctgttttggcttaggcagcaaaatgagctggaggtttttccttggaaaaaaaaattctagccaaaaatatgcctattttgttattaggcgtttatactttttttttttaaccaaaaacacattatttgcttcaagcgagtctgtcaagcagtcaccaatgctttcac

SEQ ID NO: 4069 - DNA, 6000 bp, Homo sapiens
ttggagttgtaattgacagggggatgtactgaaggagaccttgggaaatcaagcacattaggggattgtactgctctgcaaagctaccttactctactccaaccccactgtttatgttgtggtgtcttgaacacagctgagtcattgcccttctctccccaggcagaatgcccaccctaggggctgctagagtaaacacactttgcttagcaagcaactcctatcaagggaagcctggatatgtctctgaacacgaagcagtactgttctagttcccatatcatttcaacatttccatcccaattattctcaattgcataatatttcaacttttacattgtttctctcatccctagctaattcaatcatggctaacactgggtgccagaaaatgatgtgcaaaaattctacatagaacactatgaaacgttattgagcaatcttaataaaggaaggatgtatcttgttcattatggaaaggctcaatattgaaaagatgtcagttctctcaaaatttattggtaaagtcaatacaatcccactccaaatcccaccagattatgtgcatgtgtgtagatatgttgacatgctgagggaatagcatcagccaaggtgtagactcatgaagaaacatgcagtatgcaaagaagtacaagcactttgggttttcagagatgagttcagagatgagtttaaagggattaggtgagggcagggctgtagagggcacttggactgttgttgttgttgttttctgaatgtgatggaaagaatctaagaaggaataatcaggttggatttttattttatatagagcactctggcctccctttcacatgctgtgatctgtattataggtaactacattttccaggcttccctgtactataacttccaggcgggtttagccaatggaagagacaggtaactgactggaaaagagaagaaaccagagtattcatgtttgctcctcccttctgcatattcccgactcaaacccattccctttctgtcgtaccacctgtggccgctgcaggtcctcaaggcttcagctctttccagactgccctgccatggatctatctcttgccgccaacctctggcttgtggcttctaacaatactacttgttcccactgttcttccagtcctaggagtggtaggtgcatattctgctttgtctgatcccttgtttgctttttcagctttctcatttcctgtgtaaacttatgtatgctttgaaagctagagttgctcctttcttcccttcattgatatagaaggtttagttggagatacaaaaattagttaggaagccactttgatagttcgagagaaattctgaggatgacttgaagtcatggcaacagggatagagcaaacatatgtagttaattatcatttggaaataaaatcgataagacatggtcactgactggatatggtagtgagagagaggaggatgagaggaggaggaatttaggtttcctcctggttctaagtgactgggtggattgtggtttcatcggctgagatcaaaatacaaaaggcacaatggaaggaattgcagtaagagagaagacagagagttcacatttgaacatgctgagggcctatgggcagaagggcacccaactggatttaaatcgaaattcaggaaaaagttagggctgaagataaagactttagagtctccaacatatgcattacagtgaaagctataatgatgccaggaaacaagtagtcaagaagaagcatacttagttttttgtttgtttgtttgtttgtttgtttttgagatgcagtctcgctctgtcacccaggctggagtgcagtggcatgatcctggctcactgcaacctctgcctcccaggttcaagcgattctcagcctccctagtagctgggactacaggtgcacaccaccacacccggctcatttttgtatttttagtagagatggggtttcatcatgttggccaggctggtctcgaactcctgacctcaggtgatccacccgcctcggcctcccaaagtgctgggattacaggcgtgaaccaccatgactggccagcatacttaggttttaatattaaaagccaatcagtcaaaacaaacactttcttgaccattgcacctgcatttagatcacgctcacctccatggccaggctcctctaaggagcagctgactttgcctccctctacttttgcattcactacacattcaatcttttgtaatacaacacaattaggcacctgcccactttatcatctttaatcctcaaaatggctgaggctatgtcacattaggtcactcctaatggctgtgtcctaataacaacctttgtacttggcctcttctatggcacttgacactattaatcacgtccttcttgaattgttctttccccatttatttgctaatttcagattcaccttattttcctcctttcctccctcttttgtcctgcttgtgtgtttaatccttgtaattcacagccctcttggcttcatttttttctgggacattatcatcccgttttatgggactatctgctgatctctctcaagtataaatcctatttcagaaacctcccctaagcttcagaaacattctctccctgatggcttgcaaagtccctcagcaactcaaattcagtgtagtcatctttcactgctaatcttcctatatcttataaatggattagttttacagtatagtcatctcaacccaaaatggaaaatcattacattccttatccctttatctccacattgaattgatctctaagccttaagatcatatatgatccctcaacattttgtcccttcctgctggttcaggtgttcagcatttgcccctgtactatcgatcatgtcacatgcatgcttcagccttccagttcttgtccattgcctaggataagatctgaagaactttgtatggcccaggagactgacctttgcttatctcattaagtttcctactgttccgtttctcccattcccagccctaccttccagacatgttagactatcctgacattttccccaaattgccatgctcctctttccacatatacatgtgcctggagaactattcccacttacatgccttgagagctaatatttagctttaagacccagttccctggtgcttattgacaccacccctccctcacagacttacacatgtcttctgcactccacagtgccccagtgcttccatatatctggatatgtgtccatttctacaatatgataacaggcagcacattttattgcaagtctttgattttcctgcctcctcttgtggtttattaactccttcatggtagggactatatttgacttacatttgctttcttagtcttctgcaaaatgcttgacacccagaaggtgttgagtaaatatttgatgaatcaggacaagtgaacaaggacacaacctccatgtgggaacagactgttgcatgacctttcctcctatacccatgcacgtgacggcgctcctttaatgtggagttgattggttgattaacccattaaacacttatacagcacctggtaggttacaagcattttgagcagatatacaaaaaagcccatttgtttacaagctgtgtctttaagaaaattactcttccagtacagaaagcagccatattccattttgatgattcattcctactgatgaatgtaaagtagaaggaagagtggttatagctgatggcagacacaccatagtgaggcttttgctgtaactcagtggcctttcatgtcctgggccctctcctcatgatgggcctgtccttatcttcgtttcagcctgggaaggctggtgtgcctttactgggcctgactagggcagccataagtaagtgctgctgcagaccagaacatggccaggacacaggcaggcacacaagtcagaggagtgtgatgtgttgggacagaccaggtaaggatgatgcagggaaggcgtgttgggaatcatggagccctctaatctttgtctctccctaaggctctagctcacacagggcttctgctcctcatcccaaaggaagacaagctcctttttatctcttccctttccaaaacccactctcaaaagagaatctaaactgtatccactgtaaatgataaaatatataatagcttaaagattattaattttttgtccagtgggtcttcctgtctaaacagcatagagagatttagactaatgttctatatagccagttaaatacctgggattatgttctaggaaagagataaaaaactaaggctaactgaagctcctaaaattttatcaggaaggtggttatcttctttctccaccaagttggacaacagggagtggaggagaaacagtcagggaggacagaagatcagtggcagaggaccaggtagagcttagattaatagaacgtctggggtcagcccttaattaaggagaatgaagtcgtgcaggaagtgctcaggagaagaaattactttgagtgctgtgtgacaggaccttgtatgaggtaaatacttgggtgcaaaaaaggacaaggacaaggaacgtgtcctgggtctgtgccttctgcatgagaacacccttgcacgtcccctaacaggaggatcagagagaaggggaagggaagaggggagaggcaaaaaaaaaaaagaaagaaagaaagaaaaaaagagcgagaaagaaagagagagagagagagaaaggaaggaaggaaggaagaaagagagagagagggagggaggaggaaggaaaaagagagagagaaagaaagagagaaaaagagaaagagagaaagaaaaggctggaggcactcacagaaatccttctggcccccagcgaaggctaaggagggactgggcgggcgttgggaggagcctcggaagcaacctctgagcagccgcctctgagcacgatgggaaaatccttcctccctcggacatggcgctcacctgcccggccgcagcagccggctccggcgccgcggttcgcgggtccgggcggaagagcagctccagcttcaaacgtggggtggaaggaggcggcgggggcgacggcggcggcgacggcgggggcgcggcccgcgggcccgggtgttagacctgagggagcctggagatccggccggggcgcgcagggtgcagcggggcgctcaccagccccggggcgcagccggcatggtgtcccaggtgctgcagctgctccggcagggcgtgtgggccgcgctcaccgggggctggtaccacgacccggagcagagcaagttcaccaacagctgccacctctacctgtggctgttcctcctgctgctgcccctggccctgcacctggtgagtggggagggtccggtcccggggagctgtgggtatggagggaagaaggagaaaggaaccacagacgtgccatcagcctcacgggctttcgggttcgtagagattcttaagagacggaaagggaggggcttcagaaatttgggacagagaacatgcagggaaaggggactgtgaggattcactggaaaagaaaagaagtagacaggactgcgggggctcggggactcattaagaattgatgccggatgttaggatgagtcactctgcttgtggcagggagcgtgcagcctgttttgtaggtgggtaactctaggccttagagctgggtagcttgggataatgtttggtgtgaaatgctgtagattgtagccaagaggaaaaacgaaatgtaaaaagcagactcatttcagttattgtcccctttttcccccctcaccttctttcttgttttgctttgagaaggcagttcagttatcagttactcacattgtaatttctacaccactatgtatagaaatctgtaggaagatataataatggataaatctaatgtactttatgctaaacaaagtattacaacatttagatggggcttgacattttagtggggttatggtaagtgagtgcttgctgaagaactacatag

SEQ ID NO: 4070 - DNA, 6000 bp, Homo sapiens
gatgctgaagtcccttatataaaatggcacatttgcatgaatgtatattgttatatataataaatttttttattgtcatattatttgttgttttcaagtattttctatctgcagttgattgaatcctctgatactgaactcacggatttggggagctgactgtacatactatgtgatgtcataaatttttcttctctcagtaacaacccattactacatttcctttcagtttttccttgtgctgccatttttatagttgaacttgtctctgtgaacttaaattatatttacatcttattttatgttgttttctgttatgtaagcatgttccattgagtgatataacagagtttatactgtcatttctctcatgttggaccttggtagaattctctgtttttccctgtaataatgaaattgcagtggttatgtgttttttgtttttgagacagagtctcactctgttgctcaggctggagtgctttggcacgatctcagctcactgcagcctctgcctcccaggctctagcgatcctcccatctcagcttcctgagtagctaggactacaggtgtgtgccacatgtctggctaattcttgtatttttttgtagagacaggattcaccatgtttctcaggctggtctccaacttctgagctcaagtgatctatccgccttggcctcccagagtgctaggattataggtgtgagctaccccgcctggcctggttatgtttttttccccaaaagtttggattgtagattacttaagatagatccccattaggatatactaggttaagatgtgttaccattttgaagactcttgatgagaattgcctggtagcttttttagaaagattgtcacagcgtttgttgccattgttactgtattgtagttacctttctgcttgtctgctccctttcttctattacttgataagcttctaaagtcctttaacaaacatctcatggatattcagggttgttagcattaatggctctatattggaacagaagtataacagaattttggatctaaatggaaccctagagggtgtctagtccaacatctcgtaatggagcgttccctgccctctggtcagctaatacaatggggctttgacagaaagatggctatacgaaggaggtttattcgtttaaaatattgcatatgggggccaggcgcggtggctcatgcctgtaatcccagcactttgggagggcaaggtgggcagattacaaggtcaagagatcgagaccattctggctaacgtggtgaaaccctgtctctactaaaaatacaaaaattagctgggtatgttggcccgcgcctgtaatcccagctacttgagaggttgaggcaagagaatcgcttgaactcaggaggtagaggtcacagtgagccgagatcgtgccactgcactccagcctggcaacagagcgagattccgtctcaaaaaaagaaaaaagaaaaaaagccaatattgcatatgactaatctagtctagaacctcattttacaatgaaaaaaaaaaaccacgaagcctgtagcattgtgacttagctgaacatttcacaaggcagcttgagtgctttctgaggaaacactggtgacgagcatggtgatgaggagacttcgagtgcagcagctgatacacctgggattggatggggcttatctgtgcaagcttgaaagtcgttctcatctgttaaagtgacactttcactagtttctttgcagatgggtttctggtagcaattaatgtattgtgttttcttttgcagaatacagattctgttcatcttgctctgaaattaaataattctgaactcatggggagaaaactcagagtcatgcgttctgttaataaagaaaaatttaaacaacaaaattcaaatccacgattgaagaatgtcagtaaacctaagcagggacttaattttacttccaaaactgcagaaggacatcctaaaagcttatttattggagaaaaagctgttctccttaaaacgaagaagaaaggacagaagaaaagtggacgccctaagaaacagagaaaacagaaataacaaccaggaactgctttttcttttcctgctgagtactgctaataaaagtgctattatctgctgatagcatcgtctgctattcatgtgttgagttttatacttctttatggatggtgtatgtgaaatgtggagacttccacattctcagtttattcacattgtgatactacctttgaaggtttttttgtttttgttttgttttttgagatggagtttggctgttgtctcccaggctggagtgcagtggcgtgatcttggctcactgcaacctctgccttctgggttcaagcgcttctcctgcctcagcctcccaagtagctgggattacaggcgcctgccaccacgcctggctaattttttgtatttttagtagagacggggtttcaccatgttggccaggctggtctcgaactcctgacctcaggtgatccacctgccttggcctctcaaagtgctgggattacaggcgtgagtcactgcacccaagcctcctttctcttttgcctattaaacctctgctcttaaccttactccgtgtgtgctcaagttcttgatttccttggcatgaagcaatgaaccttgggtattaccccaaacgatgtcgcttcagtatctcactttgttgcccaggctgctctcaaactgctggactcaagtgatcctcccaccttggcctcccaaagtgctaggattacaggagtgaatcactcatcaattccaaggggctagaactcccaggaactggggacaaaggccagccaaattctttattatgcaacctcgtgttactggaaaaggatccagatccagaccccaacaaagggttcttggatcttgcctaagaaagaatttggggccagtccacagagtaaagtgaaaacaagtttattaagaaaataaagaagatcactcacggtggctcatgcctgtaatcccagcacttcgggaggccgaggtgggtggatcaccagatgtcaggagtttgagactagcctggccaacatggtgaaaccccatctctactaaaaatacaaaaatttgctgggtgtggtggcacatgcctgtaatccgagctactggggaggctgaggcaggagaatcgcttgaacccaggaggtggaggttatagtgagccaagatcatgccactgcactccagcctgggtgacagcaagactgtctcaaaaaaaaaaaaaaaaaaaaaaaaaagtgaaaggttactttgtagaatggtgcataccctaaagcaagagaaggaacatgtccaccttaggtacaaggcttgtttgtattgaacagcaaaaaaatgaggaagatgagctctactccaagagcttgtgacaaaggattttttgtgtgtttgttttgagacgaggtcttaccctgtcacccagtttggactgcagtggtacaatcataactcaactgcagcctcaacctcctgggattaagggatacttccgcatcattccccatgtagttgggaccacaggtgtgtgccaccacgcctggctaagtttttaatttttttgtggagacagggtctcaccatgttgcccaggctggtgttgaactcttgggctcaagctatccgcccatctgggcctcccaaagtgctgggattacaggtgtgagacactgcctggtctttgtcaaaggactgttaatcctgtgtaactactgtcttctgcaaggatcaatattatctttaaagggaaaattaaactaagaatgcttttgttcttaagatatcaggacatcaggacatttcctgggtctgttaggtaaacattattaacttgttcccttccctgtaaatatcctgtgaccaagaatgccaaacttcctgggaatgtgccccaataggtctcagcctcattttacccagcccctattcaaggtaaggtagctctggttccaatgtctcttgacactgatgcttgacttcgatacccctcaacttacagtgtctgtttaatgcctgctttctgcccacgattttccttgtcaatatcttaagttagatcatatatatatatattttgtttttttgagacggactcctgatctgtcactcaggctggagtgcagtggctcgatcttggctcactgcaacctctgcctcctggttcaagcgattctcccgcctcagcctccagagtagctgggattacaggccccggccaccatggccagctaatttttgtatttttagtagagacagggtttcactatgttggccaggctggtctcaaactcctggccttaagtgatccgcctgcctcggcctcccaaagtgttgagattacaggcgtgagccaccgcgcctggcctgatcatgtgtatgttttcgtgtggctataaaacaattcacgttttctattttttcttcaattgtgtatatttttcaagaaattactccatttaattttattccagttatcataaaatgaggctatcctgtaacattcttttgaaatggaaccactacgcacaatggattgtggcaacctgaaaagaaagtacagtttaattcaaacaagtcacaggctgcctgtgttagacaagatgaagcattcgcagtctgggaccctgcatctctgtctgccacaaacaaggctgtcagctagtcttctgagtacgtgcacgccagtaacgcgtacgcctcgttacagcatggtcggcggatatgaaaaaaagtccgtggtcacgtgcaaattcccgactccagtgcgtacacccagcggcgcaggggaaacgccggcttcgcccactgcgcaggcgcaggagccgcgctctgggcctctgctcaggctctgccgcggacgacctcgaggcccttagttgactgggaccggaagtggcgtgtgctcggcctttctgtgttcctggcccgcggccgtcgggtgtgagctgcgccgaccgctctgagggttcgtggcccaccgctccttcgcggtccctgccgccaccgtccacgctcagcgttgtagagaagatggtgggtcggaacagcgccatcgccgccggtgtatgcggggcccttttcattgggtactgcatctacttcgaccgcaaaagacgaagtgaccccaacttcaagaacaggcttcgagaacgtgagtgggtcctctctcccctggccaggcttgctgccttcggccgccgcccttcacaggaggggtcattgcctcccaccagcctgtgggccgcgcagggcgaccgcgtggtgcggccctcaataggcgatggcgctggctgcgccgctccgggggctctagtgccccgtaggaattccattttggaggaaggatttttcccgttttgttttccccagacactttagccgtgcaaatgcactcttgatttctgttgcaatctcgggtgtgtgtggcctggggaggaggttgtctctttttttgtcgttcatctttttaaacctctactcttaactaaaaagtcgtgcatttttgtcgcaaattttagtctgaggctaaatccgcatgctcagtgcagtatcattgttgcattcttttttttgagacggaatctcgctctgtcgcccaggctgtagtgcagtggcgcgatctcggctcactgcaacctccgcctcccgagttcaagcgcttctcctgcctcagtctccccagtagctgggattacagtcgggcgtcaccacgcccggtgattttttgtgtttagtagagacggggtttcaccgtgttggtcaggctagtctcgaactcctgacctcagatgatccgcctggctcattgctgcattcttaaaccctcttggtagcttcgttctaagtgcttccaagatatgagtgaatgctatagaaattgcaggggagtccaaagggctgcgcttctcccgtggctcagtcttatttcatacctgcgacatcttttaagagaggtctacc

SEQ ID NO: 4071 - DNA, 6000 bp, Homo sapiens
ggaaaacaggatgtagaactataggaattaaactttaccctgaaaagcttggcatcttcccaaacataggtggacataattgtgttttcccaaggtactttttatcctaatcgcctttgaaaacagaataaagtgaacaccaaatcctgcttcactctcatcctttgtcagagtgtttttttgttttgttttgttttgttttgttttttgagacagagtctcgctctgtcgcccaggttggagttcagtggcgcgatctaggctcactgcaagctccgcctcccgggttcatgccattctcctgcctcagcctcccgagtagctgggactacaggcgcccgccaccacgcctggctaattttttgtatttttttagtagaggcggggtttcaccgtgttagccaggatgatctcgatcacatgacctcgtgatccgcccgcctcggcctcccaaagtgctgggattacaggcttgagccaccgcccccggccaagggtgtcatttttatctgagatcacaattgagtgtgggttgtttaaaatactcatgaattggccgggctcggtggctcacgactgtaattgcagcactttgggaggccgaggtgggcggatcacgaggtcaggatatcaagaccatcctggctaacatggtgaaaccccgtctctactaaaaatacaaaaaaaaaaaaaaaaaaaaaaaaaaaaaattggccgggcgtggtggcgggcgcctgtagtcccagctactcggtaggctgaggcaggagaatggcgtgaacccaggaggcggagtttgcagtgagccgagatcgcgccagtgcactccacgctgggcaacagagcgagactccgtctcaaataaaattaaaaaaaaaattcatgaattaggcgaattccctggaattggaacactaatacattcacatctatatgacatctggaaaataaaagaaagctccatggccatacatggtcagttaccaatcctcacaggagagtgagattagaacaaatgcctccttcagagcaatagccaattgagctattttcccactcagctgcctggacttttgtctgaatcgtcagagagaagagttaccttggggccgggtgtggtggctcacaactgtaatcccagcactttgggaggctgaggcaggaggatcacctgaggtcaggacttcgagaccagcctggccaacatgatgaaatcccatctctactagaaatacaaaaattagtcgggcgtggtggcatgcctgtaatcccagctactcaggagactgaggcaggagaatcacctgaaactgggaggtggaggtggcagtgagccgagatcacgccaccgcactccagcctgggtgactgagggagactccatctcaaaaatcaaacacacaaaaaaagaaaagttaccgtggcttcttatagacacacagcctgagacctgcttcttaaattttgtgtttctgcctcatcaggatgacagccatcaagaaaagagtataaatctcaaaagagcaaggtttcatttttttttaaagctggtatattacagaattatgggtaccattggtactgcagatatcagatgattcttaaacatatcagtgagttcttaaatggttaagaactgtgcacattattaatgtgtatgcagcattgggctaggctctgcgaagtcaggaaaacaaataaagcacatgggccttgcccccaatgagctcttatccccgaaaaacatacgaaatgactagagaaaaagaccgaattattatatacacttagaaaatgtccagagcacaatataaaagtaagtattcgatgatgaatgtgtttggaactactaattctaaaggagtgacagggacacactgtcctagtaggagacacagcatcaatattacgtcctacaaggactgggcaatgtgaggcgagtgcagggctataaatagtaaatgacagagaatttaccgtatatactggacttactcaggccaagagatactgatgaaataaaggagcacaagcatgcacagatagatcgtgagcattatgtataaacaatggagcaaatagatcttgtgggtggaaataaagggagaaacctttccttccatagatgggcaggatggcgcggcagaaagaataatagctttggtgtcggacaaactggattcaaatcctagctctttcactacctgtgtaaaactgggcaagttatctaatcattgcaaaccttgttttcactacatagggctactagcttgtgcagttattagtattaaattgaatgctacattaagcatctagcagaagcagcattcaacaagcgatatctcttgttggtttgtgtatttcttaaagcatcgcactgttattgttgtgtttgtctccctgatagattgtgagcttctcaaagaaaggactgtgccttaacggtcttggcattttgaatttctagtatagaatctggctcatggtagattctcagtaaatattgacataataagaatcacgaaaactgtacatttaggtaacaacgatggtttgatattaacggaatacttactttgtgcccagctaggagcatttaatgaatcaccttatctaatcctcacgacaatccttcgattttaactatgaacatcccatacaagtgacaaggatattgaagcttagaaacctgcccgtgcttatacagccagtaaatggagagccttgacctcagccaggttggattcaggctgtgctgaaccagcaaagtagagaactgctctcctcctgtagttgctgaggaaagtcccatggatggaccaataggagtttcagaagctgcctgagtaccaaaaagggagagaattcgtgagaagggtaagagcattccaggcacagactacagcttcagagacagctctgatgtgtgacagaggctggggtggggttttttgaaggaggagtgttgaaggcacaggccaaaaaaggcctactgagcttggggtttccctcaaccacagggcatggggaagtcgtggggcccgtgtcacgtgcgggtgaagatagagaagaatctccatacagagatcctgtagcagctgaaacaggcagtgctggggcccagaagcccagaaatagtcagaaacacagatggcatagagtagagtcagaagtgcttctggggagcaggctgggggctcacagtgctgtattgttgggagggaactgaaggaaaagcaccatatttgacaacagactgcaggctgcagtaaaaggtagtaaacagagggcacttaatgcagtggttataagtggggtccttgcagctggaacacctagggtcacttaccggctcccagctgcatgaccttagcaacatgacttaacctctctgggcctctatgccccttctctgtaaaacagggaaggtctgtttcctagggttactgtgagtgcaaaatgaatgaatacttgtagaacacatgctgtctctgatgggtaataaatgttatttctgatggcgaatgaattcaaaagaaaaagacaagttctcatgagtaaatcaaaagtgttttgcttagaaggcatgtttcctttgctttttcttcctgtctttgctggttcagaactcatgccccctaaattttatacagaatttgctgttttctgaaaaattattataaactaggttcaaggtcgttacttttagctgctgacaggaaacggggacgtcctgttgaccgctgataggtctgacatcaaacatatccaactccagctgtcccagatcctcttccctgacgtcaaaaggcagtactggttttccagtcctccaagtgcaaacccttgaactcaattttaacttcgtttcttctcctcttcaatgccaatcttataatcaggatttgctccttctttcatttcaatgttttagacttggtcctctaataacttacctgtctctactttcaccctagtgccaaagtaacgatcaaccgattattcaggataccacttaaatcgcttatctccctttgtcaagaactttcaatagtttcttctccgagtgacagagcgaattcaaattcctaaatttgtgattcaaggctgtacttcaaccggtccctccccacatcctctgctgggggatggtgccctgaataaacccagctcggtcctccacctcccttctctgccgcctgatgacatcccattccttccagagcacccgggttgattcccgccgtcccacctgcagctttccccgccagtttttccagccctaatgtctttgatgacttggggcccccatctgacactggcttgtgttgtacactggtgactttgcctcggagggtgagaccccgtttcctggcgaacctccacaatagggagcacaggatcaggcactcaaaaaacgcgcaatgaatgggtggatgagcccatgaacgtgttggtggctctgtcccttggctgattcccagctcccaccccgtcttcctaccagggtcaagcgaattggaccccggacgcggccgagcggcaatggggtgggcgccgttcctgaatccggagcgtttccacgtcgccggctctccacgacccaaccctaatcagaggaccacggtgcgggtcccgcgctctgctccccctcccggaggcgccgttcgctgggagtcgggctggtttcgagaatcgcaggcaccggcgcccaaggcgggaggttcggcttcgcccctcgccctccccctcgcggccattgggctgccccgcggcgcgcccgctggacggggcggggccctccgctctcccctccgctcccctcccctatttcccggggtgggaacgccgggaggcgggaggagagggggctgccaggggcgtccggttacatccccgccttcctctgtcctggccgcgggaccgggtttgcgggaccgcagttcgggaacatgttggcctcgagcagccggatccgggctgcgtggacgcgggcgctgctgctgccgctgctgctggcggggcctgtgggctgcctgagccgccaggagctctttcccttcggccccggacagggggacctggagctggaggacggggatgacttcgtctctcctgccctggagctgagtggggcgctccgcttctacgacagatccgacatcgacgcagtctacgtgagtgagccccgggagggcgggcgaggggctgcagggcgcggcgggccgggggcgcccgtggagccggacggacttgggcgtagcaggcggggacccggacccgctggccgccggggcaccgggcacggcgcagggtctcccgcctctgcagggtccgcgaaggtcttcccgacccggtccctgctatccgaagagcgggtcgcggggtctgggtggctccgcgcgccccgggccgtgaccccggcacccatggaccccgcggagcttcctccccggcggctgtgggctgcatcgccgcagggaggtcagtccgcgtccctcggctgtccagtcccttcggggctaggacctggccggtcccgggtggagccaggttctcgcgcggagcctccgcagggcaagagccggagctggatcgcagtctgcgcgcgggccccgggactcttgtggctgcgggagagtttcgccggcagcctcctgtatttgtgtgtggactccggatgtgtcttggcagtgatgctgctttccagttgggctcgtttcagagtccagagtccagagcgggaaacacagggctcccagtgatcccatttcctgtggccaggcattgtcaccacggaggccccaaacgaggagcgggaccagatgacctacagctccctggatcctccccgtgactggccgggcctggggtcgctgtcaacttgttgaagtcctttcgtgccgctgccttcctcggccgcccaccatgtggatttcatataaggcttgtgtgcattccagaagtgtggggggttggccgggggaagggggttggaac

SEQ ID NO: 4072 - DNA, 6000 bp, Homo sapiens
ccaagagggactttatcaagtttctgcaggaccacaattcagattcgtttcttgcagaacataaattattaggaaacattaaaaatgcaggcaagacagctaacaaggaccatttggttacagcctataaccatctttttgaaactgagtgtttcaagggtatcaatactgtaagtgttgcaagtgaaaaatgtgaagcttaatgaagataaacccaaataaacccaaagtctggagagtctctggctgagggtccaccaaaatatgcaaaatctgttctaaaaacatgagataaggccaggcgcatttgcttatgcttgtaatcccagcactttgggaggccgaggcgggtggatcacctgaggtcaggagttcaagaccagcctgacccacatagagaaaccctgtctctgctaaaaatacaaaatttgccaggcaaggtagcacatgcctgttaatcccagctactcgggaggctgaggcaggagaatcgcttgaactcgggaggtggaggttgcggtgagctgagatcacgccactacactccagcctgggcaacaagagcgaaactccatctccccaaaaaaaggaaatgaacagcagtgaataacatctctcctttttgggagatggggagatgttgttcaaggctggtatacaggaacactacaggatgggactgtttttgatactaatattcaaacaagttcaaaaaagaaaaataccaataccaagcctttaagttttaaggtcagagtaggcaaagttatcacaggatgggatgaagcactgttgactgggtaaaggagaaaagcctcgattgaagagtgaagcagaatgggcttatgcaaagaaagggcagcctgaagccaaaattccactaaatacaaagttcgtttctgaagtggaattagtggatactgattgaaatagcagtgcttcagctctaaggatatcagcaacagtgataaaacttggccttaaagaaacttacgtaactaactagagtttgttactattggaagggaagagtcacctggaaaattcagagttaaaacttgtttgagatctctactaaaaatacaacaaattagctgggcatggtggtgcgtgcctataatcccagctactcgggaggctgagatgggagaatcacttgaacccaggaggcggaggttgcagttagccaagattgcgccattgcactccagcctgggtgacagagcaagactccgtctcgagaaaaaaaaaaacaaaaaaaaacttgtttaaactgatcccaacttttcagaaatgtaatcccttataaatccctgaagtccaaaatgttttacactacaactgtgtaaaatactggtcagggagaactttttccttttacctcatgttgtaaactaaatggctgaataaaaatatatccactggggggcggcgtggaaagacatctgtgataatttaatgaatgtgtgaatacaagctgaggtaaaggaagtgaattcaaatggagtactcaataaaaactcagcatcctgaaggagacatctgttgcctttctctgaccagcatccctttcccctctattaaaaatagaaagttgtttgaggccaacctggccaacatggtgaaaccccatctcttctaaaaatacaaaaattagccaggtgtggtgacacacttctgtaatcccagctaccctggaggctgaggcatgagaatcgcttgaatctgggaggtggaagttgcagtgagatggcaccactgcactccagcctgggtgacagagtgagactctgtttcaaaaaaaaaagaaaaaagaaaagaaaaagaaagtagtagtttgtgcaactacctctggctcatttcttgtggtctgtaggactgtgaatcaaggtgctcacattctacctgcaagctaacctccagaaagaatgtgaattttgataggagggacagaagactaaaagcgatgggaattgataagtataatggcaatgccctagaagagactgttcaatcatgagttgtactctaatttagagtccctgaattctgtcctgatggacttacctttctaaaggtgtgtggtgaaatctgcctcagtactgtaagcaatttgacatttttttcatttgctatttcaaaaaaaattagagctagagctgatttttgtggcgtgcaatcaaaggggtttagtgtatgcactttcttcctgtttcaacttctaaccacagccttaggaatgggaaggttctaactgaacatcatctgcaggaagcatgggtgatagcacatccccagggcctctcacaatgctggtttcagtgtagctgattttagggaaagcagaggtaaatcagtcagaatgagagaacaaagaggagggctgcctgttcacaaagaaacaaccccgtcataccactcttaacaatgaacactaaaacagatcatgacagacaccactttaagtgagtcttggtatgcccctatttcatgacaaacacctgctatttccaatttcactcaccaagaaaaatctcatttgtccctagaagttatgtgtaaggcttctgagctgaaaacaaaagcaaacggggaggtttgttactgtgactttctggattaggtaactaagaggacaaaagctatctgacccctgtctgcattaaagttccctgtccactttgtctctctctcttttttttactccacccccgaacccactttcttcctttgttctttaataacaaatatttcaagcctctggaaagccatgaattctgcctttgatatccaggcactagagagagtccttaaagaacccgagattttataataggaaaatttataacccacaatttaaaaaaagaagttttgcataacaaaattccaggaagtatgtgttattgacaacctcaaatacagcacagacaaggaatcttttaaaaagtctaccaaacttgataaaaagtttctcttatcaaaagcacatttatatgaagggaagaaggcagtgagcagataggaagtataggtttggaagagaaaaggagacatggaaaagtagctggaaaaatcaagcaacaatttttttttttttttttttgagacagagtttcgctcttgttgcccaggctggagtgcaatggcgtgatctcagctcaccgcaacctccgcctcctgagttcaagcgattctcctgtctcagcctcccaagtagctgagattacaggcatgtgctaccttgcccggctaattttgtatttttagtagagacagggtttctccacgttggtcaggctggtctcaaattcctgacctcaggtgatctgctcgcctcagcctcccaaagtgctgggattacaggtgtgagccaccacacccagccaatttctttttgcttttaagctagggaagatctggacagtttggaggcagaagggaaagagttgctggaggggaaaaggacaggcaggactggcttcatgggcatgtgacctatgcagtcagccaccccaggaccctgcatttggtttaatgctctgctggttctgaaaggtataaaccactatgtggtaggctgattaatgaccctctatttataaatcctcatcctaatctctggaacctgtgaatatgttatcctatatggcaaaagggactgtgcagatgtgatcaagttgaggattttgagataggatggtctgtaaccaatgtaatcacaagggtccttatacaagagagacagaagagttagggtcacaagagaaggcatgtgacgagggaagcagagagagtgaaggagatgtgaagtcatgaggtaaggaatgcaggtggcctctggaagctggaaaaggtaaggaaacacattgtccctgagagcctccaaaaggaacacagccctacaggtccattttggacacctgatctccagtactataaggtaatgaatttcttttgttgtatgcaactaaatgtgtgatagtttcttacagcatcaatgagaaactaatacacgctacataaacacaagggagatgtattactcgttttgtagaaatcaaaggcattaataaaactaatagcagttaccatttattgagtgcttcctaggtgctaggcactatactcagctctttctgtatctaatcttatgtagccctagaacaagatatgaggtgggaattaaggcccaataactagctagaatgttttagagttgggatctgcgcccaatctatgtcactctaagtttttttttgttttaccccatccccatatttcatcataagcctttgggtttgtcttcattctttagcatgcgttatactcgcacgtgtcaacctaggagtcgggctggggcggggcaggagatgacatccacatctagggtgcatgaaattaaaaaagagccgaagccatctctacaagtcacaggtagcttacataggcacccacagcagatgtgaggctacagaaaaatgaatgagacaaagaatacgcttcagaccgaaagtcaaagatcccgcaccgtccgttcctaactcgcccgcgtactgggtgaatcctagagcctggcgtctgcgaggactccaggagcgacagcagggaccgacgcagagaggtcctcagcctggtttcccggagaagaggtcgccccgcttcccccgcccgcaccccccggtgttttggaggcccgcgtggtcccgcctcattggccgccgcggagcccgaggcctcggggaggcggggcggccttcgcagttgtagttcccgagtcctctcgttcagcggctccgccttcctgccgcggcgcctaggcgaccgcccaggaccacaactcccacaaggccccgcgcttgggggcgtggccgaggagccaagcgagccgggggcggggccgcctgggggatgaagtgggggcgctcgcctttcctgcctcactcgcagctgccgggtgttggggaaagagtcgcctgcctccggactggagtgcagacctctgaccctggagtcgctcggccgctgggaaccgtccccttgggtcgtcgcctgggccgcccgtcgttccccggccccgaggggtccggctggccgcggtgtgggtagaggtcagcatgagccaaggggtccgccgggcaggcgctgggcagggggtagcggccgcggtgcagctgctggtcaccctgagcttcctgcggagcgtcgtcgaggcgcaggtaagcccgagtgatagcgggccgggaacccccggccgaacacccgcggccgctacacacgggccgcggctgtgacgcggggagggccgggcagggccgggccagaaaagaggtgatttctggcgagcagaaaacccggggagcagagacctgaccgtccagtgcgggaaacatctgcgaaccgcccgcagggtggggggacggcgacactccgggtaatggcagtcaaaagaggaagatggtgacggtccccctgagctgttttcgttttttcctctcggatgtgttaagcggctgggagtgtggcgggagatgggacgggcatgaaccacctcggctgtcttgcgaagggagcgagcgcccagagaaacggtgacgtccttcccttcaggagttagtgagggagggagactgagagttgggggcactccgcagacccccgaggccccgccaggcgcaggggattgggagggggcaagacttcactcgaactgtcggactagagctttctgggcttttactcttcctcgagcaccttcccttgctcaagattgctttatttttacccagctgagctgtgtctgccaagtggcatcgccaggtaagtcccaatacgagactgggggggtctgagtggggcgttgtggctcgtggatggaggctctggctctggcagtcgtgaggtgctggctggttgttgatgtgaagcgatgattacaagtgttctcagtgtgctagaaatctgaggcttagctgaccagatcctttcgccttcagagaggtg

SEQ ID NO: 4073 - DNA, 6000 bp, Homo sapiens
cctgcgggaaggcgagctcgtggccaggcccggcgggaaggcgagctcgtggccaggcccggcgggaaggcgagctcgtggccaggcccggcgggaaggcgagctcgtggccaggccctgcgggaaggcgagctcgtggccaggccctgcgggaaggtgagctcgtggccaggccctgcggcgggggctgcctccttgtgcccaggtctcgcaggtcccaggaggcccagggtgttctctcacctgcacctcggctccctgcccggcaccctggctggcctgggggactcacgggcacgccctgaccctgctctgcctccaggggtgaggccagcgctgagtgcaagtaggttccagggccacaccgcagggcaccccggccgtgccgtaaggagtaaggcgcccgtgcaggacctggctccttgtgggtgagtggtcaggttgacccatcttggacccctcacaacaggctctcgagactcagggatggggtcgggggagaaagctcggcactaggcacagaggcagcaagagggtctcgggactcagcagggtgggggcagtgacggccaaggatgggccactgacagcacagctctgctcccgaccaggccagcaaaacaagccaaccccacacacccccagcctgcgtgtgatacgcggcccgtgtgtgacagggaccccaaacacacagggtagagggcgtgtcaggaggagcccagagcaccctgtaccagctctccagccacctgtggcagcccctcactcctcagccaggcctcgtccaactggggctgcagcctgcggaggctgcccgtggccggcgtctgcccctcagcatggaggacgctgaccactgcagtgccgcgtgggctcctccaggctgtcctagggacggccacacaggcccactctggccctctgagcccccggcggacccagggcattcaaggagcggctctgggctgccagcgcaggcctccgcgcaaacacagcaggctggaagtggcgctcatcaccggcacgtcttcccagcccggcaggtcccgacacagggcccggcgccccccaccgcgcaaagccaggataggaacacacaggcgagcgcacgcggacagccccccagtctgggcacatggcggcacctacttggaaaagatgaccatcagcttcctccggctccgccgcggctccgcgtcctcatcaaagccacccaggtccttgcctaggaagacctcctggtggaagccgcgattgaggtgcccgtccatctccagcttcaccccgttcaggtggtctgggggcaggatctcattctcctccctgttggctactctctctcgagtggacgagtggttggcaggccgtgcagacgcgtccatcagaaggactgcccccaggagccagaggcagcacggagccaggccaatgaggggaccccacctggacgccatcgccacccagggccagaccatggggcgggctgcagggtgtgggccaggtgctgggaggggcaggggcaggggcagaggaggaagtgaggtcctggctccaatccaatccccgggcaccacggagggctctgtgtccccaggacggccgcaggatggggacaagcagctcacagtctgcagagagacacagacacatcattagcaagactcagcaaagacttccccaagcacgtctatcctgcaacatgaaacatatcctcgattcacaggatccagacatgtggcatcgccttctccagaccacacgtggcactgccttctccagaccacacgtggcattgttttctccgggccacacgtggcatttgttttctctggaccacacgtggcatttgttttctccggaccacacgtggtgtttttttctttatttttagaaacagggtcttgctctgtcacccaggctggagtacagcggtgaccacagctcaccgtgaccacgaactcctgggctcaggtgatgctctgggctcaggtgatgctctcgcctcagccaccggagcagctgcgaccacaggcgtgcacccccacgcccagtaatttatttttattttactctttgtagagacgggtctcgctgtattgctcaggctggtctcaaactcctggcttcaagcgatcctcttgcctcagtctcccaacgtgctgggattacaggcgtgagccactgtgcccggtcttttttttacagacactgagttttcagccctgtctctccgtctttccatctctctctcgagctgtcagcacctccaggggctaacctgtccccatcgcccaacacctgcagcacagctttcctgtggggcccggctctgtccctcctggcatcatgccactgacccatggggttagggtcactctccagaccctgacttgaacattcttgagatctatgaccttagctaagtcatgtggcctccccggcctcagcttctcactaagaaacaggaggctccccctctccccccgactgaccaggctttgcgaagacagccaaccctaagtgcagagggcgtcagggcctggtcccagcaaacaaacacacaacccccacacacagatgtgcacacacacatccacactcacgcatgcacgtattacacacatgtgcccttgcccacactcgcgagcgaacgccaaggccgaggagcccagaagtctgtcctgccgtccgaggcgtggccagtcctggtgggaagcaggggctcacagggcctcatgcctcatgtatcccaaagggaactcggggtccttctcacccacgagcctactcctttcacagtctgcccctccggcaaacacctgcgggtcctttcgggtgccgctgaggccccgccatgtcacagctgttccctcaacacacatggactgagactcctgttctgtggccgtcttattcagcttcactgttctggcacctgccactctgcctgcacacagtaggcgctcaacgaatgctaccctgggtaatattaaacgaaaaaatgctgcctccaggtatcgagaaacaccagtggggccgccatgaaagtggtcctgaagtcagtgcagtctgccacaaaccaagaggggtacaagcctgagttcccccaaggaaggaaaccctgggtgaggggctcatgtctgattttttttttttttctgagacagagtctcactctgtcgcccaggctggagtgcagtggtgcagtctcggctcactgcaacctccacctcccaggttcaagtgattctcctgcctcggcctcccagttagctgggattacaggcacccacctccactctccactaatctgtatttttagtagagatggggttttgccatgttggccaggctggtctctaactcctgacctgaagtgatcctcctgcctcggcctcccaaagtgctgggactataggcgtgagccatgcacccggcctgattttctgaacatggctgagggcttttcccttccctagtggtggcataattctattcctgtcgtcccagatcgcctgaccaggggagagtcctggataagaaccaagacacctcctcctggtgctgactccactaactacagtcgtaaaacacacgctgtgtgcaaagagactgtactttgttcctagagaaaataaagctagttcttgattctacatatcttgatgagttacacggtttacttgaggcaggaggatcgtgagaccagcctgggcaacacagtgagactgcgtctctttaaaaaacaaaaacaaaaagataagaccctgtctcgaaaaagggggaataaaaagtaacccaaaagtaactataaatatcaggagtccatcaagtggcgcttcctctcctggcttcagagtatctattcatcacggtgtgccaggttcgcagcacagcggagcgggccggtcccaccggaatggggtttcgacttcgccatcccctagcagctcagttcccagcaaggaatcaacacacccttgcaaaacggacgtgggaaacagcttaggcagagacgctatttctttgccatccctgggcttcagctctggtggaacgaggctatttctggcagttaacaacacacacggttagattctaaaagctcaacagggttcataacaccgcctctgagccagacatcaagggctccacacagccgacttcacatctccaaatcctactaactggggatgagggtccacgcggttcagaagcggaagcgcaggcgcagggaagcggggcagcttgtccaaggtcgcctcgccgataaacgcgagtccaaccagaccccttgggcctccgtttcccggtggcattcgtaggttttggccagtaggagaccagacgtgccggcggccggggaggccagcgtcgtcggcctgtccctgcccccgggaaccccgggagccccggtggcggcggagtctcgccagggctcaaggccgagcggacggacgatgccccagcccaaggcgggaggcggcggcggcctccagacccgccctcgccgtccggccggcgtacacttggccccgcggcctgcagcggccgtcccgggcccctcactcaccggtctgcctccccgcgctcgggatccgaggaccggagcgaagcgtcagtgacgccgccaacgggcccggatcaggccactgccatctttcttgcgggcgggggcggtgcgaacgggcgcgacctcacggaggggacgccggcgccaccatctctcctccgggcggaagcggtcgcggggccgctccgaggttgaccaatgacaagggtgcccgaggccacgtgacggccgccgattggccgccggcctccgagcgccccggggctcggcgtctgcggaaggccccggcgcgctcccaggagcgccgtgcgcacgcgcaccgccccgagccggcggcgcctgcgcactcgcgagtccggcctgggccgccggcccggcgcgggcgccatgaagctgctgcggcgggcgtggcggcggcgggcggcgctaggcctgggcacgctggcgctgtgcggggcggcgctgctctacctggcgcgctgcgcggccgagcccggggaccccagggcgatgtcgggccgcagcccgcctccccccgcgcccgcgcgcgccgccgccttcctggcagtgctggtggccagcgcgccccgcgccgccgagcgccgcagcgtgatccgcagcacgtggcttgcgcggcgcggggccccgggcgacgtgtgggcgcgctttgccgtgggcacggccggcctgggcgccgaggagcggcgcgccctggagcgggagcaggcgcggcacggggacctgctgctgctgcccgcgctgcgcgacgcctacgaaaacctcacggccaaggtgctggccatgctggcctggctggacgagcacgtggccttcgagttcgtgctcaaggcggacgacgactccttcgcgcggctggacgcgctgctggccgagctgcgcgcccgcgagcccgcgcgccgccgccgcctctactggggcttcttctcgggccgcggccgcgtcaagccgggggggcgctggcgcgaggccgcctggcaactctgcgactactacctgccctacgcgctgggcggcggctacgtgctctcggccgacctggtgcactacctgcgcctcagccgcgactacctgcgcgcctggcacagcgaggacgtgtctctgggcgcctggctggcgccggtggacgtccagcgggagcacgacccgcgcttcgacaccgaataccggtcccgcggctgcagcaaccagtacctggtgacgcacaagcagagcctggaggacatgctggagaagcacgcgacgctggcgcgcgagggccgcctgtgcaagcgcgaggtgcagctgcgcctgtcctacgtgtacgactggtccgcgccgccctcgcagtgctgccagagaagggagggcatcccctgagccgccgcggcccggccctccgggacacctgcttcacccggcggcgcctt

SEQ ID NO: 4074 - DNA, 6000 bp, Homo sapiens
ggtagagggacagggcacagccccctcctggcttgagtctggcctcctgacttgcttgggccaacagaatgtggaggaagtggctaagctgtccaagactactgggcaaggagctgggcttcccaggcctatgaggacctcagggaccctcaggcctggcagagttgctgtgactatagccatttagtgaccccacatagaccagaccagaagcccctccctgcagggcccaggccaacctactgaccccaggatcaggagcagttaataaagcagtggccattttaacccctaagccacgggcgtctgttccgcggtagcggatgacagagctgcatcaagcgccgcaggacccgctgggcatactggtgtatgccgggcataggacatggcctggtggtgcggagaagagggcatgggccccctacctcctttccaaccctctgaagtcaggcaggccctctcagaggttcctgaacccaagtggacgtaggattccatgtcctgaaagcgcccaccctcacagcacccggctcctgtgggcgccagaccttcccgcatgccgtgggagacctccccttcataacatccgccggctttgtactccatgacgccgtagccttgaggctctcccagaacaaactgtccagagaaggtgtctcctgcatgtggacaaggaggaggggagacaggaggttcagttcagggctgcggccccagtcggctctcctctgtccctggcccatgacacgcaggaaccattccagaatggacgtccctgcctccatcatactactcagtctgcttcatgagggaaaacatggtaagcaggtctggtctccccaacagctgggcatgcagacagccccaggcagacactctctttgggcatctatcccgagggcaaaggaccctctggtcggtttgcagggtgaagggtgaggtttttccctggctctttaaaaactgaaagccaagcctgagagaaaacacctccactgagaacccaccgacccctctggcgtgagggtctgaggttcctggacacacagctcccggcaacgaatccccagagctggtttcccatctagggatacaatgtggctgaaatagctttaaataaaaaagaaatagtgtaacttgggacagataaatctttattctagaaaagtgtctccggaagcctgagttgctctcagcggtgaccacagagcctcagtcaggtccccagggcttctcggtaggccaggcctctcacggcacaaagcttcccgtctacacgtcacgccttctgcatctagactcggcggaccaactgagcccgatgggttatgagaaaggagtgaatgtgccatcccagctagagctcacctgaccaggcccagtgccggcggccttctcccgtgatctctccgtccacaaacgccccttcgtaataactgccatctttaaataacaacttcccgtgacctggcaggagaaatcgtcacgtgaactcagacagtggttgggttgactgcgaatgacactgtgcagtgttgggcctgtttctcagaaccaagagcttggcttcaaaacttgtgtttggctccatcactcatgctatacatgtatttaaaaataaaaaaatgttctcaaaaatatctgccgaaacacgcttgagcggccggcgccttcagccagaacaagcacaggaatcgaagtgcaggcagccagcctgagcaacacggagagaccccgtctctacacaaaattttaaaaattagccaggtgtggtggtacgtgtttgtgggtccagctgctcaggaggctgaggtgggaggatcccttgagtcaggaggttgaggctgcagagagccatgattgcatcactgcactccagcctgggcgacagagcaagactgtctcaaaaaaaaaaaaaaaaaaaaaaaaagagagagagagaagaaaactaggcagagtggctgggcgcagtggctcatgcctgtaatctcagcactttgggaggttgaggtgggcagatcacctgaggtcaggagttcgagaccagccaggccaacatggcaaaactgcatctctactaaaaatacaaaaattagctgggcgtggtggcaggtgcctgtaatcccagctactcatgaggctgaggcaggagaatcacttgaacctgggagccggaggttgcagtgagccgagatggcagcattgcactccagcctgggcaacaagagcaaaactctgtctccaaaaaaaaaaaaaaagaaaaaagaaacaaaactggcagagagcagatacaaaactgcgtgagaggagtacagtggcgggaacgtccacaccaccaaaggttcacggcacttgcctggggttggtgggggtacaggtgttatcgactttatacttgctttttttgttctgttttgagacggagtctcagtctgtcacccaggctggagtgcagtggcacaatctcagctgactgcaacctctgcctcctgtgttcaagggattctcctggctcagcctgccaagtagctaggattacaggtgtgccttaccacaaccagctattattgtctttttagtagggtcagggtttcagcatgctggtcaggctgttctggaactcctgacctcaagtgatccgcccaccttggcctcccaaagtactgggattacaggcgtgagccactgcgcttggcttgactttacactttctttcttctattacttggatttactacaagagtaggttctctttataataggaaataaaccataaagccagttttcagtctggaaaagacaaatgaactcaacctctagggagaatttcaaagtcgcagcttcctttgctaaaggtggccctccaggggggtctcccaggcctctgtttcccctgcccatccagccttaccctgagcagccagggaagcaccagggtacaatgggctcgaaagctacaggaaatgccacttgcccacccaacctcccggggagaaactggtttcgtcagctgtggggcagcagctgcaagaagagaccacagatgcttctcaccgtgcttcctccctgctttccattctccttcatatcgaaagaaggaatttgggtatacgtagacaccataacctgagtattgagaagacacacacaggtaagcacagacacagagatgagggatgctctccagtgctgaaggagggagtgcagctcccttgagggccttcaaggggttggtacacgtcaccttcagcagaccagaggcgacctgtggggctcatgagctctcctgtcgactgttgggccattcatttgctcatttgtttatgtgacaaggatgaggacctacttggtgcagagaagacaggcccagtaagaggagggctggcttgaaacaactgcaggtccttgagagaccagaggtgctcgggaggtggtgaggagcaggttgggagccttgttgcaggagatgagtgagccaggggaaggcagagcggcagtgtcagtgaggcacacaggggaggagcagactctcccatcccctgccgtggcccttcagtggcctcctatcgctggggagaaaatccacactcatacccaaggatggcctggccggcttcatctcctcctagttgctgggtgtgccacccgccaactcctgcagttccaggaatgggcagggctccctccctaccagctcctcaggcacattttgtgggcagggtttatgggaaaatgtcggggaggagggcagggggttactacaggctactgtatctgtcccaaatcagggtcaggttctacctgaagatagtagtgttagctctgagttcattccagacccgtttatttgattctagaaacagttcctatcaaaacctgctcttttttttttttttgagactgagtcttgctctgtcgcccaggctggggtgcagcggcgcgatctcggctctctgcaacctccgcttcctgggttcaagcgattctcctgcctcagcctcccgagtagctggaactacaggaggcaccaccccgggccaatttttgtattttttagtagagaccgggtttcgccatgttggccacactggtctcgaactcctgacctcaggtgatccacccgcctcggcctcccaaagtgctggaagtacaggcaaaaactgcttttgaaacgcgtcctagcgtttctggacagcaccggccaggaagtcaggaggcttggtgctgctcctgcgcctgccctcgccccaagtcctgggcttcgggatccccatggcaaccccaggtcccgctggctgtgaggctgcggccggaacccggtcttcccggctaggagcccgcggggggcgaccccctgcagggcttggcctgctgcgggaggagggctcggggaagggtgcgagccgagcccgaggcgcacggcgagtcctgtgggagtgggggacgcgggggcggccctggctccgccgcggcacctggacctctactttccgaggtgagcatttgggggtcgagggcgtagagcgatcgcaccctgaatggagcccagggcagccagcgacctgtcccgtggcccgcagtcgttaccgttccggggcggccgcctaggcgggtcccgacgcggcccgcgggagctcggggtgccctcgcccgccgctgccatcttgccgccgagggttctcttagcgaccagcaacgcccgcttccattggtctttgtcgcaagggggggtgtggccacgggcctagtccctgagcccgcgcaatctctggagcgaagctagccgggcccggagccagaggacgcagctgcgcctgtgcgcgtttccgccgctgtcgtctcttccgccgggaggcccgcccgccaacggcctgcgcgtctgcgccggaagcggaaatggttggagcccttggccccgccctcgcgccatcttgggggccctggaggcggcgccgcggaggacggagcggaagtgctcgctgcagcttcccggagccggagcgcagcgcctgcggccgcccgtgccccgccgtcctccttcccgcggccgtgagggagaccgcggctcggccgtagcggagctgcgaggtgccaggaagggctgcgtggcgcgggaacggccgggcagcgccgcctccgcttcttccgggctgtcaaggccgcgggcgggcggggccgcgctgagggccgggcggggagggccgtcggggcccgggtggccgcggggaccgtgttcccgacccgcggccctgaggggtacgggtcgcgcctcggggtcgggcccgggacggggtgctggggggtgcggcggagccctggggcctgcgagggtcgggggagcgggagaggggccgggcgggggctgcagccctcgagccacccgggccgcatctcgtccgcatcccctgcttggcatctgggggaagcgggcagtcgcggcccccacagcgctgcgagttgggctgtattccagagtaatgtgccctgtccccatcctgcgtccaggtcagcgcttatctgtaggatttagtgttaagctctggggtgaaggcgttactgacgggctgaagggaaactagttacatcggttttgatcgtattctaaataggcaataaaatcataaattctccaggctgacttagtactggtctgtggccccactgataaaggtatcgttcgtttctctgccaggtgtctcacagcacagagggctgctttcagcctaagtaccttcagtgggcttttgcccttttccctttatgaagagtagagactggccgctagtcctggaagcactttatttttagttgagttgacatttcccaggaagatgcagttatccccgtaagtggataaagggttctcagtaattcagactctcacatggcttctgccgtatgcctgaggtgacggcgacggcggtaacagtgtgtcagagccaggtggagatataagatggtcaggcccagaggagcggggagcccaggctggaatgt

SEQ ID NO: 4075 - DNA, 6000 bp, Homo sapiens
ggttttagtcttggcttttcagttcagagggagtggtaatacccctttcctttacttggtcacaattcactatagagttatcgcctgctgttttgttttgtttctcttccagagtgaaagaattgaaaaaggccaaggaacttgaagacatacagcagcatcccttagcaatgtgacattgcttttcagactgttttcatttctgtttttagcagagacatgcaacaacaacacacacgcacacacgcacacacacacacgtacacacacatacaaaatccctctgcagttttggggagatcagctgcaggattttaacaggaatgttttggtcattgcatttgcactttcatggacaacttttaatttgatcagcaagacatcttggaactcaatcttctgttggatcacgggaaatcaagacacccaggaggaattgaaagaggcttcctcttctcaggaagaagccatttccttctcatatagggctgtattcaaacatcgtgtggaactgtacaaatatttataccaaaaatatagataagaaaaggtggggctatactagcaacaaaaaaagaatgctgttcctgcacctgccggttatttccaagaagctgaatctttgggactgattctcagtggagggcttagatcatacaaaaatctttattgggtccgtgtgttctcatttccttcactgtttatttttgtttgtttgtttgtttgttttaatctctacagcacatttaatgcaacttttgaaatctgcaggtttttaatgtcttgtggaaatttgcagaggggcaggtgtgtggtaaacgggtaatgcatgggaaataatgagaagcagctcacagagtttaaactattttcttgtccccaccaccttccaagaacctgcgagggtagtaatcatcttgtcccctttttcatgttcagcactttaatttttttgccttactttcatgtgcaatgagaattacttaagaattggtaacgcatgtagccttttttagtaaccttggaagctgtagtaattctaaggaatcatgaaccttgcctggacatttgccacctaaacgatcagtgtggtgctgcgttctggccagtaaattccatgtttttggctatatctcatccaaactgagcagtttctgtgtatatatagaaggtagaaatgaaaagtgagaaaatatttgaaagggattatattaattgctaaatattttattcacaaaggtcaataacatggcaagataaaattatttgtatagttttgtctgaatgagcgagaaaaatgtggatgtactgtttgtatatattgtatatattaaaacagagatatgtgcatgaaatcaagaaaaaagaaatgaacaaaagcaaagcattagtggctatggtctgtaaaatgaaacaaaaaaactttatttcactataagagtactttattttaaatgttctttaggagaacattttgctaaagcatgactaaactgcaaaaaaaaaaaaagagctactgtatttagacttaggaaaaaaggcagagtaacattacttaaaaaaaaaaggatatgtttacatttaattttggctaccaggagtttagtttattttatttaaaatttttttgccaatggtgccaagtaatgtgaatgctaatactgcttaagaaaattaagttacttttgcaaaacagataatcataagatgaatcagtatgtagcttaacaccatccactcactccaacaaagaacacttagaatgataaaaaaaaaaaaaaaaaacctgacaaaagaaatagtatgaaaagtagaaaaatgtcacgtttccatatctcctgctggaaatcagaaaatataataaaattgcacaaaaaaaaaaatgaaaaagatgcagactggtcttttagagacggcatggtatattactatttccacataatgaggagccaaagaaatctgatgtttttaacaattaaactgctaatgttaaattgagagaataaagttcgtatttgctgatgccagtttaaaattcccaggttacgtctgaggatcagttggtgtaaagctgagatgttttttcttggttctggctgccaactgtgagttaaaactcaaggcttgttgtgaagcctaaaaatattcacaaataagcttttaaactggtgtctttggaaggaaggtagatacaaaaagattgtggtaaaaactggggtcagtgctcttggtgccttttctataattgtacttgttttttaattacttcctttcactgccaacctcgaattactgtacagtatatgtctttctgcttgtgatcagctttgacaacagtgacagccccacaactagtagccacctgtacatttgtaaactgacctgactccattttgtttttaaatgtgtgggttatgttgcagctgttgcagtcccccagatacctattattttacacaatttgacctataggaggacactgagtaatttacaaacacaactgcattcataaatgggaatagaacgtgaaagccagctctttcagaatatcctctattaatactgaatttagatatctttattccatttattatggtacaaataactgatgttttaaccagagtaatgacctcagtggatttgctttaaccctcacattttttttttaatgtttcacatgttacattattagctgaatacgttagaaaatgacagatggtagagacttccatagaattaagagggttctcatggaggggataggaagtaggtttaaagcctaccagtgtaacctaccagtacaactgtgaatcctaggcaaggcaaaaatgcacttccactgaaacgaagcatttctgaccgctttttcttggttatgaatcttaatttcgaatataagatgataggtaagcgcagctttcttggataatctgaattcccaagtgccaggagtaggatttcattataaaattaatagctaatcttattctatctcctgaagatttaattgctattgttacccattcgaaatcagctgtactgtgtgaacgaaataaagacaataatacgaacccctctctggctgcacggtcgcttatggcagttccacacagtagttggcgcccaatggggggtccctgagacttgcatgtaaaactagtctagatgtcttctttttttgtaagttttatttttgtaattgtgcatgtaaagcatcattgaatcaatggatctgttgaagaactcagctgctggaaaccatgcaaaatgttttgaattgcccttaaaatatggaaaatgttttctgaatgctttatattctttctgctgtaaattaaaaatgaagaaaatttccccatactacgtgtgtgttttgctttaatatgaccgggtagtgaaatctaaggtgatgggcacatgtttcaaaacatatgtaataatgtcaaggatttccttctgatccagatgtaatgttttgacattgaatgttacattgtttcagctaggtccatgaaagaaaaaatgtcttccagccaccattcagagagcttttcccctatctttccaggcacctctcaacatgtcaatcatttgtgtaaggcagtgcaattatttgaaagataaagacattaatttaattcaccttttcagttacaatcctctaaagtcttctaaaaggcattttccagcagattacgaacgtcgtcctttctgagtattgtgtcatcgccgctcccttcccgttcactgcagagcctctccttatctccctagtgctccctcttccatctaatccatctggccactactgccagagaaattttgcatcatggatctcccacgtccgtaagtcaatggtttccagggcccactacaattaaatgacatttttcttgtttgtttatcctctttattcagtcttcttttcacttgtacccaacctgcaccctctaggtggtctgtgcacactgcgtccattttcactgctgtctttgttcatggtgtttgcccaacccttacttggaaagttcttttccactagtacccagctcaaatcccaccgcctttgtgacactcgtttattcgatatatactaacgtttcccttttcaaagtattctatttagagttggaaaaaacagcatagtatttaagtactgtatttttcacttctcatctaagagacccaccaatgacctattagtgttttattttttggtgtaggtaactatgttggtaggaatatttcagtaacaaatatatacaaggtaactcactgcgttcagatttgtgcttccctcccttcgaccaaaacctgaggacctattctgtgctagggcctgaaaatacagaaataaaggaactacagccttgatgccaaggctctcgtaagcagattataatatgatctgcagtgacaaatatttgtgtcaccgatgaaaacatgagcgggaacctcacccaacaccatgtgacaaatacccgaaatggacttcctatttcaactactttagagaaacatggtgccctcaggatcactaggttactctggaacactcagcagaagccagtcatctgtctctaatactgttagaaatggtcccgagcccagaataacatgaattgcccccaccctcacttatccacgcagtccctcgccagtggctaatgcaccacgtttacagaccacgtccccaagcgccagcgcggacggcggtgcggacagggagctgtattgacctgcgttctgcgtttcagagcccggaccgccctgggacccctgtggccctcaagttcccaagtgacctcgtccggggaggggacgtctcgctctgaccccgccctggacgcacccacccacgacgcccccgcccacttccggcgcgccccctcttcgccccgcccactcccccggctccgcctagtgacgtctttgccccgcgccgcgccgtcccacccatctccctggcctccggtcccaacttcgcttctctgctgaccctctctcgtcgccgctgccgccgccgcagctgccaaaatgtgagtgacgctacgcgacgcgggcggcttcgggccccgcaggcggcagctcgcgctgggaccgccatactgcccagttgccgccggccgccactcggacgcaggccggggctgcgcggggatcccgaggcctgggggtgggcggtggcccttgggtcgcgggctgcagacgggccgggcgggtcccgcggccatcgggcggacgcggaaggggcaagggcggggcggcgagacgcttcccggaggaagtgagctgcccgcccgcagcccgctcctcgccccttccctttctagtccccgacgtccctgagaggaatggggacgacagccctggttcgggagcgcccgctctcggcccggtgctgcgctgggccccagaagttgcgaaagaaaggacctcggccctgtcctgagcccctgtgggccgaagagctccttgcctagctaggggcatctgcactggaaagatcacttaaccgtgggccttcgctctcttaagcgaaagcacgttgcaaacccctgcttccagtggtaagactcagagaatgctaatggttaagaatcacaaggactccctcttccacctccattctgctcattgctcaccgtcggaggaagccccgggtttcttccaggagctggggacccccctcgaatgttcctgctgaggctgctgtgccaatagatcacagtggttaagatctagagccaaggtacacaggacctgatctaaaaacaagctgtcctgcagccagctgtgttgactctctaaacctcactttactcatttgtaaaataggagtaatattcccctcagagagttatgagggttaaaggaggaaaagcatggaaagagtctagcgccacggcatggtccttacttatctaccagatactaaactccgtgaggacggtgatgagatctgttgtagccctggtcattgacacatgacagatgtaa

SEQ ID NO: 4076 - DNA, 6000 bp, Homo sapiens
tgcctggctaatttttgtatttttagtagagacggggtttcaccatcttggccagtctggtctggaactcccgacttaatgatctacctgcctcggcctcccaaagtgctaggattacaggcatgagcaaccgcgcctggcctaagtgcttttcatatacagtatttaatctcataataatcctgtaaagtaggtacttttattagttctgttttatagatgatgaacccaaggctcagagaggttaagtaacttgtctaagatcacacagtaagtggcaaagctgggatttaaacccacaaagtctggctcctgaaagtatgtttactccagctactccacactcatgtatggtaggcatttgagtttttactggagtgaacaaccaatcaaagtctagtttgattccttgcaaacaagcagtctctcattcatttattcagttttcctcttttttttttttttttttttgagacggagtctcactctgtcgcccaggctggagtgcccaggcgctatctgggctcactgcaagctccgccccccgggttcacgccattctcctgcttcagcctccggagtagctgggattacaggcgcccaccaccacgcccggctaatttttttgtatttttagtagagacggggtttcaccgtgttagccaggatggtctcgatctcctgacctcgtgatccgcccacctcggcctcccaaagtgctgggattacaggtgtgagccaccggacccggccctcaggtgtcctcttaaattctcctatgtgtaaaaatgtcaaaaaatacaccaaaaaggccaggcacggtggctcacgtctgtaatcccagcactttgggaggccgaggcgggtggatcacaaagcaggcaatcgagaccatcctggctaacatggtgaaaaaccgtctctgctaaaaaatacaaaaaattagatgggcgtggtggtgggcgcctgtagtcccagctactcgggaggctgaagcaggagaatggagtgaacccgggaggcggagcttgcagtgagccgagatagcgccactgcactccagcctgggtgacagagtgacactccgtctcaaaaaaaaaaaaaaaaaaagaaaatgctttttgttctttacagtatcttccttagcagcttcttttctaacctatgggaaagtataaaagaagtggaagcttctatcagtagcttttcatatcattatcattggcggagaggctttctccaggacaggtctgtactattccatttagtgatagcaatgcttcaaatactaacgggactggagtgatcagaaatagccaagagactacaaatatccttcagcggtgttgtctaccacccaatagaacagcaaggcatgtatgcgctggactgcagagaacaccagcctctgtgccacgcacatccagccacggcactgaaggggaattagaagtaaagtaatctaatgtcaggaaaaaaaatacataaatgcttatatgcaaaatccatgttaccaaagcatttataatgctttggctgttcatgggtctctgaaaatttccatatgatttctgttggtgactgagaggaagcaactgtgccctctgacacacactgtgactacatgcctggggctggctcacacatgtaacctgtaaaacttctttgggtaagcgatttgttgctactggctaataagacttgtaagtcacttaaatatatcatcttatttgagagaaccaacaaccctttgaagcagggctataaatattatacccaatttgctgatgagaaaactgagggttgagagctggttaagtgcaaggccaagcagctggtaaaggtatggggccgggctcggaacttccgtcggctccgtcacttacaactcacgttccttgtctggacctccagaaatggtcagtagcagctccctctttcctgcataggttcctgccagagcggacggtggaaacccctccccacaccgccgtgggctcagctgggggttcttgtaccatctgagtgtggcggagtggcaggaacccagtggggtccgtttggtccaacatcgaagtgatttcaggcaagagacctaagccgagtctggcttaatttgcacattgcttcctggctgtcttcccaccaccgtggagtctcacacgagattaattacgctcaagcgccttaaatctgtaaatcgctatgcccactcggaccgtttctgtcccaagcctccacccgagatacaagaatccccaagtcgcctctcctgaccccgcctcgcccccgccggacgtcctcacccggccctggctcccccacaccctcgcccggggtcccgagccaacccttgctcctcaggtcttcgaggcaggaggcggccacgccgtgctgttcgcggctgtagttgcggcgcagcagacacggctttagagtccggatctcgccagattctggtaccccggcgtccccggtcacctccatcctccacaaggtgggacctgcccaccttcgagaagtcgcgggaggccggagcggcggtccttctactcgacccccttccgcagcctgccgggagatgtagttcgttccgcagcaaatcacacgtgagaccagggcacgccgggaaatgtagttctagttgccgctaatcacgtgtggcgtcgaagcatgccggaaactgtagtctctgggtttaaagccgctttcgttctatcgcgcgattcagcctaggagttgtttttaacttttaggagctgcattcgcgcgttcaaatataaggccaatagagacttattttgcatgacgatgcacacgcatgtatactgtattgaatttttagagcattcctattcgcatatgagatgcataatgctaatacagacacccgcatgtttccacccattctatttcctgcttcaactgtgcaaattagtttggggtctcagaacaaaacgcttaaataaatatagtaagcattaaagtctcaaatgcatcggagaggaaaggggaaatgcgactcggcactgttggagattgttcagatgcctcttgacaacatattcatctttgttttaatactgctactatggaaaagtttgtttttttcctcctgaaaaataaacatctaagattaaaagaatagtaataaaaatgatcaaaaagttcctctcttaaaagagggcattttatgtaaactagaagtaattatctgctcatatttattcattcgggggacactttccttccttgtttcttttttctttttttgagacagcgtttcgctctgtctcccaggctggagtgcagtggcgcgatgatggctcactgcagttttgatctcctgggctcaagcaatcctcccacctcatattttgtttataaaaacgtgggcaagggccccgggggcggtggctcacccctgtaatctcagcactttaggaggccgaggcggacagatgatctgaggtcagtagtttgagaccagcctggccagcatggtgaaaccctatctctactaaaaatacaaaaattagccgggcgtgatggcgcacgcctgtagtcccagctcttgggaggctgaggcaggtgaatcgcttgaacccgggaggcggaggttgcagtcggcccagatcgcaccattgcactccagcctgggcgtcaggagcaagacttcgtctcaagcaaaaacaaaaacaaaagcaaaaacaaacaaaaaaaacgtgggagaggaaattggatattatctcaagaaaagtttagacatttaaaacagcgtttagtaggaggaattattcattaagtcatcccttttaagcagtctatattgatcaaaacacaactataataggagctggcggttaactctaatgtatgtatcctttttcatataatttcattttttattttcttatcttatttttagacaaggtctcgctctgtcgcccaggctggagtgcagtggcataatcatagttcactgcagcctcaacctcctgggctcaagggatcctcctgccttggcctcctaaagtgttgggattacaggtgtgagccactgctcccgtccaatatttaatttaaaatctaacaattaaaaaaatctaacaattcaaccagtgtaaaataatgacgttttgtagaagcctcttctcttcaaaatgcccccttttatgttctcccaatagacctgcacacttatccgagtcctatccccataatactgtaattgtaagtgtgtttggcctgggcgtgggagtagggattgagtcttgaatgtttttatttcaaggcctaccaaagtccctagcatatagtaggcactcaatgaatggaactgaactgatgtctaaaaattaatttccaagtttcttcgcattcatccattggcaagtccctaaatgtgcccatggcactgtggggatgggcagagattaactcaataagaataatatgggccgggcgctgtggctcacttctgtaatcccaacactttgggaggccgaggcgggcagatcacctgaggtcgggagttcgagagcagcctgaccaacatggagaaactccatctctactaaaaatacaatgttagccgggcatggtggcgcatgcctgcaatcccagctactcgggaggctgaggcaggagaatcacttgaaaccgggaggctgaggttgcggtgagccgatatcgcgccattgcactccagcctaggcaacaagtgcgaaactccgtctcaaaaaaaaaaagcaaaaccagaataatacacatataacaacgcaaagaagatatagacttgggatcttcctggaaagcagagtcttaacggaaactatgcaaggtgacccggacacccgggctccacccctctgccccagtcccctacatcgacaggctctgttccggctaccttagtctgggcgggagggcgagagcgagggcgcctgggagaaacctcgcccagcggcggttgattagtcaggcctcagaaagatggcgtcctcggagcaggcagagcagccgagccaggtaaggggagtgggactgccccgctgtgcggcggagaccccggctggagggggcgctcagcatacggctgggagccgggtagggaccccgagtctccgaagctggggaccccgacctcttgccccctcctgagccccgcccctccccaggtcctccccacccggcccctccccccggtgacccctctttgaccacattccggagcccgggctctggtgtttggctgtgcccccgggtccccacttcccgcctgccagcacctctggtcccacttgagcttgttggggagggtgacgggacccttgggaagtccccagccttgagctgcgagggcttgagaaggagaggatagatcgatcgttcccggctgtcccctccggggaggggcctgtttccattagggttcccactccctcacggcctcagcctcctggagcggctgccagcctcttcatctgtggtcacctttgcgcttctctcgtcaagttggatagtcagaaataatctagtcgagccctctcagtgcgttgataggaaagggacgcactgtgactaacagacgccaccaagcttttggctgaggacccatcctcgcttccctgggtttggttttgttggccgagggctccgctctagcttttcacctgcagattcagacaaatcccactccaataaggggaccataaggaccagcgttgacgcctgtgcctctgcggccgggaggcagtggatgataaggtctccgaaggggtttatagtccaaaggtggggtagggtggggtgaggagaaaagggctaagagacatcttacatttaactgcctgtgtggtgtcatgttgagcacaaattacatctattatctcgtttagtgttcactacaacctttatgaagtgcaggctactaacctccatttcacagaaatgaatactaagggtttgtgacatgccccaaatcgtgtgctctgttga

SEQ ID NO: 4077 - DNA, 6000 bp, Homo sapiens
ctggtctcgaactcctgacctcaagtgatcagcctgccttggcctcccaaagtgctgggattacaggtgtgagccaccgcacctggcccctgattaattttataaagtttgttgggacggtttcatttccatcttggtacacacagagtttcttgtccttttgttgttgctacagctgcatagtgttctatcacatggctgtgccatagttcattttccagtcctctgtgaatggacatttgtgttatgtccaaatttgtgctattacaaatgctgcagtgaatgcctttgtacgtatatcattttcttccctgacagctatatcaagataaattcccagaaatgggattacagggttagacagttttgttgaatcttgtcaagttgatctctataagggaggtaccaatttttattcccatcagccatataggagatttttgccaccctgagatatgatacagccctgttttctaattaataatcaaagatgattttatagcaacagtaataagtgcgtttgtcggtttcttttctgtttacaaagaactttcttttttattgtatttttgcaagtctttttattttattattatacttcaagttctagggtacatgtgcacaacgtgcagatttgttacataggtatacatgtgccgtgttggtttgctgcacccatcaacttgtcatttacattaggtatttctcctaacgctatccctcccccagccccccaacccccaacaggccccggtgtgtgatgttcccctccccgtgtccatgtgttctcattgttcaactcccactacaaagaactttcttatgcattacactaaaataatagctaatatttattgagcacttacagtgtatcagggattttggtggacattatagagtacttgttaaaagcagcttggagtcaagtcaaactaactgaatctgaaatttggctgcaacactttgtacctatttccttatgtgtaaaactggaaggattatagtctcttcgttggtaggcagtattgtgggggttaaacgctaataccacacgtaaagtacctaaaagaggtacttggcccagcatggtggctcacacctgtaatcccagcactttgggaggccaaggcaggtggatcacctgaggtcaggagttcgagatcagcttggtaaaaccctatctctactaaaaatataaaaattagctgagcatggtggcagacgcctgtaatcccagttactcaggaggctgaggaggagaatcacttgaacctgggaggtggaggttacagtgagccgagatcgcaccactgcactccagcctgggcgacagagcaagactccgtctcaaaagcaaacaaagtatatggctcatgtgaaaagtcaataaatgctgtttactattattcctgagcatttctatgaggcaggttgtattgttcccaccttatatataagtaagccaaagaacagagatattgggacatggaattggtaagtgatagagccaggattttaatctatctgctgatatattgtctgatttgacattgtatgactcatgggtttggccagcatagaaagctctgtgttgagtggtgaagttgtaatgttcaacaaccagattgggggtaagtggaagcagacatgtacagagctagcttcacagctgtgtcatgctctgttttgcaattgttaatgattttgaacaagaggccccacttattttttttattttttaaattaattaattattttttttgagatggagttttgctcttattgtccaggctggagtgcaatggcacgatctcggctcaccgcaacctccacctcccgggttcaagtgattctcctgcctcagcctcctgagtagctgggattacaggcatgcgccaccactcccggatgattttgtatttttagtagagacggggtttctccatgttggtcaggctggtcttgaactcccaacctcaggtcatctgaccaccttggcctcccaaagtgctggaattacaggcgtgagccaccgtgcctggcctggccccacttatttattgattttattttatttttttgagataggatctcactctattacccaggctggagtgcaggggcacaatcatgactcactgcagcctcaacttcccaggctcaggtgattcttccgcctcagcctcccaagtagctgggaccacgggtgcacactgccacgcctggctaattcttttactttttctttttctttttttttttttttgagatggagtcttgctctgtcgcccaggctggagtgcagtggcacgatctcggctcactgcaagctccgcctccggggttcatgccattctcttgcctcagcctcccaagtagctgggactacaggtgcctgccaccacgcctggctaatttttttgtatttttagtagacatggtgtttcaccatgttagccagaatggtcttatctcctgaccccatgatctgcccgcctcggccttccaaagtgctgggattacaggcgtgggccactgcacctggcccacacctggctaattcttcgatttttaccgtgtggtccaggctggtcttctcctgggctcaagcgatccacctgccttgtcctcccaaagtgttgggattacaggtgtgagccaccacatctggtctttttaattttttagagcggagatctcactttgttgcccaggctggtctctaacctgagctcaagagatcctcccgccgggtgcggtggctcacacctgtaatcccagtactttgggaggctgaggcaggcggatcacgaggtcaggagatagagaccatcctggctgacacggtaaaaccttgtctctactaaaaatacaaaataattagccgggcgtggtggcgggcgcctgtagtcacagctactcgggaggctgaggcaggagaatggtgtgaaccctggaggcggagcttgcagtgagccgagattgtgtcactgcaccccagcctgggcaacagagcaagactccgtctcaaaaaaacctcctgagtagctgggactacaggcacacattatcacccccagctccacctctttagtttgcactgggtaccacaaattatgtagtcagtcctgtgtgcatctatgttgcatgtgtattataatttcactgatgtaaatgatgtgtagcatacagtttacaaatactaaaatatacagtacaggactctattgtaaactccatatagccagttctcacagtatgctttctttgatgttgtgtagcttccctatggtcccaattgatcaatgagcatagttcagacatgaatgttggttgatattttatgttaggagtaagaggaaagtgaaacaatcaaaagagatatgtcagaacttcactagtttgtcaaggctacaagcgacttatttgttcaactggataataatttgccaatgctgaacgaatatttcctcaaagttttggtgcattcacttacacactttttttctctcttttttttcttttttgagacggagtctcgctctactgcccaggctggagtgcagtggcgtgatcttggctcactgcagcctctgcctccagggttcaagcaattctcctgcctcagcctcccgagtagctgtgattacaggaatgcaccaccacccccggctaattttttttttttttttgagatggagtctcactctgttgcccaggctggagcccattggcatgatcttggctcactgcaacctccatctcccgggttcaagcaattctcctgccccagcctcccgagtagctgggattacaggtgcctgccaccacgcacggctaatttttgtatttttagtagagacagggtttcgctatgttggccaggctgatgtcgaactcctgacatcaagtgatccgcctgcctcggccttccaaagtgctgggattacaggcgtgagccaccgcaccctccaacacttttaagtttaaccagtaatatgaacattttctccgccactttcttaagtctagacgacttagcagttattaagcatttgctgatttgcgtggtgtaaattctcccaccatgggcagatttcaagctgctgaaggatgtcactgaatgaaaagctgataagaggtgagcagtagcacatcatagagtatttccacggtgcagatatgatagacgtcagaatgtatgcacacagcaggcgctcaataaatgcttgtagcatgaataaattaatgaatcctacttcgtgaatgaaagtgcgcccggtaagtcctaaagcaacacgccttcgagttcttatgatgctaagagaggctgattgcagttagtctggaagtagctgcggggcgcagtgcaggcaggaaaagggctggatgccgggtcaccgcccggccccagctcctggcccgtccccgctcccggtccattcccgccccggccccgccccctcccgccccaccaccggtctggccccgcccctcagccccgccccacccctcaccgcccttctccccgcctctgaccccgcccctcctctgactcggccctgcccgccccgcctctgaccaggcccccgccccccacccctcaccgcccttctccccgcctctggctcggccccgccccctcccgccctccagcccaccctccggtccagcccgcgccgccggcacctgtttccgggcgggcctccagaggccggcgcacaagatggcggctctggcggcctaaagaaggcggccgcggctcagccgtgggctctaacgcggggctgggggccggagacagacttcgcccaggtgacgggtagtaggggcggcgccgcttggcctcgtggggtgtaagacccacttgctgttgcccccggaccttgccgccacaccagccctgtcctggggcggaaccgaaggaaggtcgggccctgctgccccgccccgtccttcctccttcccgggcggtcactgtgcgtggctcacttttagagtttacttcaaccacgtggagcttccatggcggcctctcaggtcctgggggagaagattaacatcctgtcgggagagactgtcaaagctggggacagggacccgctggggaacgactgtcccgagcaagataggctcccccagcgctcctggaggcagaagtgtgcctcctacgtgttggccctgaggccctggagcttcagtgcctcactcacaccggtggccctgggcagtgcccttgcctacagatcccacggtgtcctggatcccaggctcttggtgggttgtgccgtggctgtcctggctgtgcacggggccggtaatttggtcaacacttactatgacttttccaagggcattgaccacaaaaagagtgatgacaggacacttgtggaccgaatcttggagccgcaggatgtcgtccggttcggagtcttcctctacacgttgggctgcgtctgtgccgcttgcctctactacctgtcccctctgaaactggagcacttggctcttatctactttggaggcctgtctggctcctttctctacacaggaggtaagatttggcctgtcctgtgtgctgcaggtcttagtcgcgtccactggaaaccgctgctttgtaaaggagttatagggatgtcaaaggtggctttctaatttaagccgctttaattgaagtctataattgtgggtgatgtgaattttttgaaacagtgatttgagaagatcctggtttgacttacggacgtagggcatgactgaaaattttatatggacatttatttttatttattttttatgtattcatttttgagacggagtctcgctctgtcgcccaggctggagtgcagtggtgcgatctcggcccactgcagcctctgcctcccgtgttcaagcgattctcctgcctcagcctcccgagtagctgggactacaggtgcacgccaccacgcctggctgatttttgtatttttattagagacggggtgtcaccatgttggc

SEQ ID NO: 4078 - DNA, 6000 bp, Homo sapiens
gccaagatcgccccactgcacactagcccgggcgacagtgtgagagttcatctcaagaaaaaaaaaaaaagcaaaattagctgggcatggtggtgtgagcctgtaataccagctacttgggaggctgagatgggaggatcacttgagcccaggagttggaggctgcagtgagccaaggttgcaccactgtactccagtctgggtgacagagcacctagagggccctgtctcaaaaaaagaaaataaaatgcatttaatacacctaacctactgaacatcatagcttagtctagcctactttaaacatgctcagaacacttacattagcctacagttgtgcaaaatcatgaaaaacaagcctatttcataataaagtgctgaaaaccctatggaatttattgaacactatactgcaagtgaaaaacagaacggttatactggggactggaaatatggtttctactgaacgcagatcgctttcgcactgttggaaagtagacaaatcatgtcagaccattgtaagttggggagtgtctgtactcactcaatacatgaccccaagccttgtggaatgccacgtgggggtctattatgtccttccatagccaagaataggtcgtggcaggaactccggttcctttgaggataccgacagtttcactttcttttgtttctccgtgcttcccacctccccgcatccccccaaccccaccagcctgccaagcccgcccagccagctgggtgttctcgtgctctcctccctccgcctctggccccagctggtggagatgaatacagtgtcagtgtctgagccacagggacgttccacaggcccagccttgtgctgccttccgatccttgtcttctcctacttgcttcactctatccttctcatttcagccctggccggatttttctgctgtgtggttacacgtcagggtcctggagccaggcttcctgggtcccaccgcagttccagcagcaattagtgctgtgcctgcagcaagcggcttcacttctgttgatttcagttgcctaagtgtaaacaggaataagaacagcgcgtgccatagttctgttgtgagcatttactatgaagaactttctttttttttttttttttttttgagacagggtctcgctccgtctctcagtctctcaggctagagtgcaatggcaggatctcggctcactgcaatctctacctcctgggttcaagcgattctcatgcctcagcctcccgagtagctgggattataggcatgtgccatcatgcccggctaatttttgtatttttaatagagacagggtttcaccatgttggccaggccgttctcgaactcctgacctcgggtgttccacccgccttggcctcccaaagtgctgggattatagatgtgagccaccgtgcctggcccactatgaagccctttcacactgtctgccacacgacaactactgttggggctcagaaaatgtcaccccaatatctggtgctttggcatgctaagtactatgaactacagaagactggaggcctcaaaagcaaggtctctgtgacgccctcctgacctcctgtctccagcccctccttctcccgtgaggcagtcacagaacaagaattcctcctttggcaggggatgaggtgactcaagtctgtaatcccagcactttgggaggccgaggcaggtggatcgcttgagcccaggagtttgagaccggcctgggcaacatggcaagccctgtctctataaaaaaaaatacaaaaattagccagtcatggtggtaggtgcttctaatcccagctattcaggaggctgaagtgggaggatcacctgagcccaggaggttgaggctgcagtgagccatgatcacaccattgcactccagcctgggtaacagagcaagaccttgtctcaagaaaaaaaaaaaaaaaaatcctccttctccaaggtgggtcacagaaactagaacccgtgtctccaaagtagccataaaacctagaaaggtggctctctcccttctctctttaaagacctcattacagaggggttctacctcatacccaggaggaaggaatgctgcatggagagcccaagaagaatctggacaagacttgttcattttctttttatccaattgcattgctacagggctgttcattcttccttgaaactaagcacaaaaatggacagatttcccagggcctttgagtcttcatctctgaagcctcccatgtcacatgaagctttgcttaactaaacttggtatgcttttctcttgttaagcagtctttttttacaggagtgtcagctgtgacctttatgatgggtgaggaaaggtatcacacccttccgcccctacagggtcctgtaaatgtcagtttagtaaatgtcagctctaatcctaggagttgttttgcggtttttttgttttttttttgacatggaatctcactctgttgcccaggctagagtgcagtggcaggatctcggctcactccaacctccacctcccaggttcaagcaattctcctgcctcagcctcccaagtagctgggaccacaggtgcacacccccatgcctggctaatttttgtatttttagtagagacggggtttcatcatgttggccaaaatgatctcgaactcctgacctcaagtgatccaccggcctcagcctcccaaagtgttaggattacaggcttgagccaccgtgcccggcctgtttttcattttctccttacaaagtgatcacaactttattatatacctaaaggcttggattaaatccctctagaatctggagtgtatgggaaatattttttagaaggaaattgatcaggctgcgcactgtggctcacgcctgaaatcccagcactttgggaggccgaggcgggcagatcacctgaggtcaggagtttgagaccagcctggccaacgtggcaaaaccctatcgctactaaaaatacaaaaatcagccgggcatgttggcacccacctgtagtctcagccactcaggaggctgaggcaggagaatcacttaaacccgggagacggaggttgcagtgagctgagatcgcgccactgcactccagcctgggtgacagagccagactccatctcaaaaaaaaaaaagataataataacataatattctaatattgactgcttactgagaaattactctcttctaagtactttactaataacaataattaattaccaataatgaactaataataataatagcaaccagtcctaaatcaaactggatgtagccatttggctggtctctaatttacccctagactggggggatctgtgcctcctaagagggcattaagttaggcctatgggccctgcagccctgcaaaactctcctcatccatccagagaaaccctttctttgcatctggagagactatgggtcttggtattatctaaggactcacccaggcagttttgtaggttcccacctggtttcccccaccctaggaataagaccaagtgctcaggtgtaccctgaaggtttccatacctaggtgacactaaacaaaagctggtgttctctaaaggaaagttgatgttaggaagggacctggaggtagagcggattaatgttcttgttgcggtggggggatgtggtggtcaacaatctttaagggaggtgccaggtgaggcaggagacagccctttctttcctcatgtacaattgggggaggaatttcttatggtttttcagctagagttttctaaaacttttggtatgctgattaaagtgggctcccaccaatttggctcctcaggtgttgctttttgtttgtttgtttttcccagacaaggtctcaccctgtcgtccaggctggagtgtagtggcgtgatctcggctcactgcagcctccccggttcaagcaattctcgtgcctcagcctcctgagtagctgggactgcaggtgcacaccaccatgccctgctaattttggtatttttagtagagacggggtttcaccatgttggccaggctggtctcgaactactgagttcaggtgatccaccctccttggcctcccaaagtgctgggataacaggggtgagccactgcgcccagcctcatcttgtgttggtaataacaatagcttgtgtgtcctgcccatttactaagtgccgggcactgttctctcctagaacaaaccgtagttagactcctctgagtcctcatcttgactaggcctcggccttggacctctgtgtcttcctgtccttgctgggcctgagcctgcataataaaccagtttcagcaagagtcctgctaagttagcaagaactcccccatccttgatgtctcctcctaggaatcttccattcctgctccctcattctgctctggctataaatccctccttggtccttgttgtattcggtgttgagcccaaactctcactccatggcaataaccctacagcaagtcttgaacagtactggtttaacaacagtcccaataacgttttctttaacaacagcagttagctcatttaatcctcataaggatcatatgaggtaggtagcctaaatagcccatttacacagggaagtgggaaggagagagggtgcccccaaggatgagacacaagctgttgccacatcagcactttgcgcctggacggtcccccagttgtcctggctgcaggcagtccgaacagtccgcttcctggaatattagccaggcaggatacgccctgggcgacagaaactccaactttcgccagcggcccccaagtactgcctgggcggtggcgggagtctggagcttggctgaaggcgcgagctgccgacgccgtctcctagcaaccaagcggcggtcacgtgacccgctccagcccgtttcacgtggtcttgagctgcgctggggttggagtggccgcaacgggcggggcggggcggggccgggcaagtttgttccccgagttcggagcctaggagccccccgcggctgcggcgcaggtgccctcggcctgagtcgggatggagctgcctgctgtgaacctgaaggtggcgacgggctggggggagggtcccctttgcgggaggaagtgggacatttgcattttcccggaaggtgggaggaaggaccggagttttggggaaagagggatggtagggaggaagggaaggtacagaccccacgcaagaaggagatgggcaggcaggccacagcagggagagtgatccaggcacaggccagcagggcgacactgaggggccgtgggaggtggcagcggagggcaagggccgccccctcccggactcagaccctcccagcgggcagcgccggtcccagcattgctgttgcctgcacgcccagaattcccctggaggaggaggaaggtgcgcgggaggggcttgtaggcggctcacctcccccgcgcggggtcagggactgggcttgccccccgggtcccagcaccgtttcaggagcctccttgtttgctaagtcgggttaaggaaatcagatgttcccaagcagttggttttataaagtttacacatccagcgcccttatttcataatcaagaagcgcgaactccaacagaaattacttaaaagcagaaaaccccaactttgtgcactggggaaaacactgcagggcttcctgtggtgtcttcatttcccgagccgtgagctcagtccgggtctgggtgccagcggctgttctttttctccccgcccagccccgccgcccacgtgtctgggctccatttgcattagaggggctaggggctgtagttttggtcaggaaggtgtggaccttggaccaaaccggccattttgggtcttagtgcagcctcctttgaggcaatatccaggaatgtcctcttactcatgaatgacagagcatttagctccctgttggtgtctgggactaaaggaacctgagaaatagatggttacaaaacaatggcttaatacactttattattacacaacatctgtgctatgac

SEQ ID NO: 4079 - DNA, 6000 bp, Homo sapiens
gcggtgctggcgatcatcatggaggaggtctccttgtctgagccagggtcacctgctgggtgccaggtcacgtctatgtagagggggccacctgctgccatccggtcaaacctgtagggggtttgtttctgaagagaggttccaggagaaataccatccgtcactgccttcccatggggcccgggagttagagaagcatcaatgaaggttggagacagaccaatcagcgttcatatcctggctttgctacttatagctgtgtgatcttgggtacattacttaatctctgtgagttctgtttccttatttataagacacggcagatagtagtacccacttcataataacactaggatgctgggcgtggtggctcacgcctgtaatcccagcacttcaggaggctgaagtgagtggatcacttgaggtcaggagttccagaccgcctggccaacatagtgaaacctcatctctactaaaaatacaaaaattagctgggtgtggtggtgggcacctgtaatcccagctacttgagaggctgaggcaggagaattgcttgagccaggaggcagaggttgcaatgagccaagatcacaccactgcactccagcctgggccacagaatgagactctgtctcaaaaaaaaaaaaaaaaaaaaaaaagcaacaacaacaacaaaaaaccataacactaggagaatatgacggcagctggttccacagaacttagaacagtgcctggtgtacaaaccgaatactcagtatatgtgaggtgccgttataatcactattacagaggtaagacacaacaacagcgctatcattttgtgtgagagcagcacttcagacttttcacagcgcttgcctgtttattatctcaggtgagttaagacatcatgattgagagttaggggaatcctaactgtggcaagcacagcctcgctgtaggaacagttagaaagagggtcagcagactcactttctttcatgccaccccccaagccctgtgcagcagcttacagttatgcagaccaaggccaagttccgaaacgagactcaaaaaaaagcctggatgtgcacgagtacttgtgttacaagctatcaacggtgtatttaaacatccttgtgcatttaaacttcaaaaacttgggagtgacacgtgagacgtgcatacagtaaaaggcataaacttaaaaaaaaaactgcaattcatgaagtgctaatgtaattcagttggcatttctagagttcaagaagcataatccaaatttctaacttgctgaaaacaatctcactgctttgtgacttcctaaactgcactcgtgatccagcccccaagttccctcaaagaatacagtgtgagaatcaacatttttaacccattgaagagtgtgtctaaaataccttgacactgtggagggacttttacaggcaacagagaagttgcagatcagatgacccactctgccttctccttcctgccccctccggctgcttttttctgccgggttaaagggcagcccagcctcagggctgacagtttgctccccaggcaccaccactcccgcctcccaccttaaccttgcatgagtttaccttgagatgagattgacagctccctcagcagttcgaggagggaagaattccagggagaaccacttgtcaccagattccaatcgccgcctcatcttctcccggagtctctcatgccgctcggggtccaggcccggggtggaacatctcgaactatctttggagctctcactgccactgctggcactgccctccaagcaggggttgaggctgctgtttcctctggcttcgttcaccatggctgggttcctactgcacagggtggggcagggagcatcagggggcaggcagccacacccccgacacatcaagacacctgagtggcaggttcaagccggaggcgctgtatttccacacaggaagaaggccaaaaaaggtgacactgccccctcccagtggctccatgctcctcagctatggctgtccgggccgcctcactcaaagccttgccctccgctgctgccaggctccttgcatgcaaggcagcccccacccggcactgcaacatgctcctcggtgacagctacctgatggaaggtggcacagaggacctcacgctgccgacctgcgaggcccatattcctagcgaggggcagtagtgcccagctgggaggaccctggcttttcgatggtccatctctgtcagctcaggcccagagtgcgtggggagggaacagaggcaccttccccagcgggtgtgttcaactgggcggagctgcgacaaaggaagaggcttgagctccagccagcacaagggggcgggggcaaggcttccaggcgaggagggagggctgaggctctagtaaggggaggcggatggaaggagggggactcaggggcagagactgcaggggttggtggagatgaggccaacaggcgttcagggataccagatcaccctccagagaaggaacagctcactctggctggctctgcctggaacatctgttacttgaaacagttcgtgcacaggatggaaggggtgagggcttgactatgcagccagatttctcctgaattcatgctactccaaaaagaccgtgttgtgggttagaacttgatgctggccatgttccaaaaatagccagacccaagttcagtaagggcacgaatttctcagaacaaaagctgccccatctgtgcttgccttgcaggctgctcttcttacacatcacagaattcaattcaaatcatcacagtgacccagctactgggaaggctgaggcagaaggattgcctgagcccaggagttcaaggccagcctgggcaacatagcgagactccatctcttaaaaaaacaaaaaacacacctgtaatcccagcactttgggaggccgaggtgggtggatcacctgaggccaggagtttgagaccagcctggccaacatggtgaaatcccgactctactaaaaatataaaaattagccaggtttggtggcgggcgcctgtaatcccagctactctggaggctgaggcaggagaatcgcttgaacccggaaggcagaggttgcagtgaaccaagattgtgccatagcactccagcctgggcgacaaaagcaaaactccatctcaaaaaaaaaaacaaaaacaaaaaacagaaacaagtaatcagagccaccagggcacagacaggccaacagagggcatagggtcatctggcagtctggttaagaaaataagacaaacacttaaaaacaaacaaaacacttgcacagcaatgggcaaacacacagtagtgaatgggtgtgtggtgacatggcacaacagaggaaagcccaggtgaggttcatttctttcagactgtccaccactaaccctgtgtacctaaccatttggggtcttagactcttttgacaatctgattaaatgcactgctcccttcccctgaaatacacacacaggtgcacagactacacggggatacatccaaagacaaggagttgattccagactaagaaccctgggccaaagctttctccctctagggctgctctctttcattctgacctcaaactccagattctcagtggggatggctgtggggagtgaggaacgggggcgggggggaggagtaacagcaagagcagccagttggctttcctccagcgtttaagggcgcacctcgttaattgcttgctggaacagaacctagagtaggaggaagctgaaccacctgtaaaccctctgattttcaaagacttattgcattcctagtatatgccacgcatgtgccatatttgtaagccaactcccacgatttatccgttatcagctggactcccatagcaccctgggttgtaactgtgggtgaaaaggcctgtctcctttctctttccccagttccctgagacaggaccggtgtcctgcctggggtatccccagagtttggcacacggtgatagccaacattcactgagcgccaaagggccaggtgctgccactctctcaaaataagcctctgccacttactgaacaactagtctgcgccaagcactgggatactaagcctacgactcccagaaaggtcccggcggacccccgtgcgcagcgggacgcagtgggcgccagggaccgcagtgccccgggcccagcgctcttctccaggtgatcgccggggaggcaggtttaaaaggcaggagccggaagccgtctcggcgcccaggtggccgagaatccagtcaccaggtcactgagtcaccgatgggggcgaggacacgggcctgggccggtcagaggggcgggatcgtcacccctggctcaggggcccctccgtccaggcagggagccaaagtcagtcttcgcttgagggttggcggtcgctggaagtggtagccattgggagttacactaatcccgcgaagggtgcgcaagggaggcggcagccccccccaagaagagaggcaggccggcctccagcgctccccgcccacaagcacgtccttgcccccgggaggttgtttgccggctccaggatctccctcccggcgaccccggcctcgccgtcactcaccctccagtcccgggtgactcagaacgctcggccgccggccgcaccactgtggccgctgcaggggcggggaacgcagtgaaggggcgcggcgcaggtgtcaggttgctggagaggcgggcctacagggcggaaaccaccggcgcgggtgaccggaagccccgcccccaacatggccgtgcccacaggtctcgttggaggccgtgcctttatcgtcatgtgacgcgagtcctcgccccacccgtctgcagccactcctggtctcagtcccagagctcgagagggccacgtgaccgtcccggggccagtcacgtgaggcgcagatcctggctgggagggggttggtagaggggtccagagtggcagtaaaggaggaagatggcggggtgcagggggtctctgtgctgctgctgcaggtggtgctgctgctgcggtgagcgtgagacccgcacccccgaggagctggtaagaagccggcggagtcggcctggggagggggcggttgctaagggactgagagaggcgttgccgggggtggggccgggccaatctgggcccgcaggtggcagcgggtggggcctggggaccgcagccagggctctcgaagcgtctaccctgcttcacgtgcctaagtctggggtcttttctcataacccctcctggaatctgagggagaatccaggccagctccagtaaatcccacccatgtttccttttatttccatctgaaaagagtttggaatgaaacaagcgttttcagaatgagcttcctcacaggactttgtgcttatcatgctgctgttttagcttctccagtcctttctcactctatccctcaccctttctgggtcactgacagtccagcttccccctgcaaagcatcctgggaaaacttgagttgtgttcccagagttgacaagtcctttctgatttcagatacgtcacactgtcaaatggaacctgcatttttaccccccttttcagctggcgttggacatctttgaggtgtcctgaagaggagggtggttatttggagactatcagtggaaatgaagagctcagctgatggctgtagatcctcacccacatggtccctcacccctgaaaggttttttttgagggctggttcctatttgataatggctccagatgatttagaagctagccactgatttcagtaaatacttctgcctccttccactcctaaccactaaaaaaggctccctctgcggatctgtttttctagaccatccttggagaaacacaggaggaggaggatgagattcttccaaggaaagactatgaggtgagctcctttgatactgcttgggcaactaaagtagtgagtggcctggtcacttcaggccgaagcattatgattccaaccagagatgctctttgacc

SEQ ID NO: 4080 - DNA, 6000 bp, Homo sapiens
ctattattattattagggaggcttaagtgctagtgagaggtgatcatccatctagcagcacagaatatggccatcctaccgaagcccttgctcttcctggggccaaaaaaggaaatgaataaaagaaaaggatgaaaatgagaaaagcccctcatgtcaccgggcagctgccctccaggccagctatcctttctacaccttccctagaaatctgagtcctgcgcctttaactgtccacagcacgtgcagcacgtaccagaagtaacatctggacggcagccaccactggttaaagagacaggccccctttctccatgaagcttgggcagggttcaagtttcagcaatttggtgaagggaacaggaaacagataccaaaggaggagagggcaggctttgccagagtgaatcctttctcccagagaggccagcagcctccaagattgattccccctcctgacttaaaatgacttttgggcatgggactcccactgcccaaggggttttttcttttccttttttttgagacagagtcttactctgtaactcaggcagaagtacagtggtacaattacggctcactgcagcctcaacctcttgggctcaagtgatcctcccacttcagcctcctgagaagctgagattacaggcgcacaccaccatgccctcctaattttttttgtggagacgggaggtgggtgggggcggagggacgggtctatgttgcccaggctggtcttgaactcctggtctcaaaggatcctcccacctcagcctcccaaagtgttgggattacaggcgtgagtcatggcacctggcctcaaggttttgttttttttttctattcatagtacatcaccattgaggttctccttggactacagcaaatggagggttagagctgggttccaatgctgcctcccttactgtagttctgcatcagttgtgtggcgtcgagcagattgcttcacttctctgggtctgttttctcattttgcaaatggggcaatactgtttaattagcaaggctgttgcgagcagggaatgagggagagttttgaaaactgaaccaggggccgggagcattggctcacacgtgtaatcccagcactttgggaggctgaggaaggcagatgtcttgagctcaggagttttagaccagcctggccgacattgtgaaaccctgtctctacaaaaaaaaaaaaaaaaaaaaaaattagccaggcaaggtgcatgcctgtagtcccagctactcaggaggctgaggtgggagaatcacctgagcccaggaagttgaggctgcagtgggctgtaatcacaccactgcactccagcctgggcagcaaagtgagaccctgtctcaaaaaaaaagagaacatggaaccagccaacaaatgctcattctcctccctctgctcctcctggcatttcctcttcctccaggggtctggagtctgagtctgcatcctcctgaatccaaaacatccggtggattctggcaccaagtcctgtctccagatgctgaaactcccagccctggatcccagctgggaggtaggggccctggattctgctcaggcctcttccttttacttgccttgggaccttgagcttgctgccccatgcctatggatatcacttgtgctatctgtgcaatgagcacatctccatacaatgagatgatttccacacaatgagatgatttccaaggttcccagtgactgactctatctttgtttttttaatagagatgggggaagggttttgctatagtgtccaggctggtctggaactcctgggcccaagcagtcctcctgccttggcctcccgaagtgctgggattacaggcatgagtctctgtgccggcctggacctatattctaaaaatagcatgtattgattttgtttgaatatatatatatattttttcaagacggagttttgctcttgttgcccaggctagagtgcaatggtgcgatctcggctcactgcaatctccgccttccaggctcaagaaattctcctgcctcagcctcccaagtagctgggattacaggaatgcgccaccatgcccagataattttgtatttttggtagagacagggtttctccatgttggtcaggctggtcttgaaatcccgacgtctggtgatctgcctgcctccacctcccaaagggctggtattacaggcataagccaccatgccccgccgattttgtttgaattttacaaatagtatatatttattgaaaaaaaaagaaaaatataaataacaaaataaatacttggaaataatataaaacatcaaaaattgtctatataaatatgaaataatcccacaacctggaaataatcacagtaaatatttggccataattttctcctagcattgtctctatgcatgtatacatcgataagaatatatttttggctgggcgcgatggctcacgcctataatcccaacactttgggaggccgaggctggtggatcacgaggtcaggagttcaagaccagcctggccaagatggtgaaacctcatctctactaaaaatacaaaaatgagccaggcatggtggcaggcacctgtaatcccagctactcggaaggctgaggcaaagaattgcttgaaccagggaggcggaggttgcagtgagctgagattgtgccactgcactccaacctgggctatacagtgagactccatctcaaaaaaaaaaaaaaagaaggtatttttactgagtggaaccatactatatattctgcttttccacttaacatcatatgggtagtgtatttctctggctgcagcatctgaatgctattttgtttttatttttattttttggtttgtttgttttttttgaggcaggttctgactctcttgcccaggctggagtgcagcggtgtgatcatggctcactgcaacctccacctcccgggctcaagtgatcctccccagtcagcctcctgaatagctgggactacaggcacatgccaccatgcccagctaatttttgtttttttagtaaagaaggggtttcaccatgttgcccaggctggtcttgaattcctgggctcaagcaatctggctgtcttggcctcccaaagtactgggattacaggcatgaaccaccgcacccagctcatctgaatgctgttgatttattaatatcttttcccagcacagacgcatagcctgctctttgtcgtccattgacattcgtgacattccttctctcccacccctttgccccctgcagggaaccccctgccagcctagggttacacctgccacccactcctctggagcctaatcagctgggagaaggctcctgggtccctgtctaaggtcttttttttctttttttttttttttgagacagagtttcgctctgtcgcctaggctggagtgcagtggttcaatcttggctcactgcaaactcagtctcctgggttcaagtgattctactgcctcagcctcctgagtagctgggattacaggcgcgcgccaccacgcctggctaatttttgtattttagtagagacagagtttcaccatgttggtcaagctggtcttgaactcctgaccttgtgatccgctcgcctcagcctcccaaagtgctgggattacaggtgtgagccaccgtgcccggcctctgtctgaggtttcttccaaggaaggaaggatttttgttcagaggtggctgcccctgtctgacatctggtccaggagcccttactctagagaccgttgagttgtttgttgggctttgggtatctgtgaagaggccctaaaaactttcatcgattcgtttactcatttaacaattaatctctctagggtgtggtggctcagcctgtaatcccagcactttgggaggccaaggcgggtggatcatctgagggtgggagttcaagaccagcctgaccaacatggagaaaccccacctctactaaaaatacaaaattagctgggcatggtggcacatgcctgtaatcccagctactcgggaggctgaggcaggagaattgcttgaacccgggaggcggaggttgccgtgaccccagatctcgccgttgcactccagcctgggcaacaagagtgaaactctgtctcaaaaaaaaggtagaaaaattagccagggatggtggctcaggcctgtgatcccacctacttgggaggctgagatgggaggatcgcttgagcccgggaggtcgaggctgcagcaagcggtgatcacgccactgcactccagcctgggcaactgaaagcaaccttgtctcaaaaaaatgaaaaaaaaaaaacaaaaaacaaaaaaacctcagaagcaagactttccttggctcagaggtttgcctcccagggacacaaagggagatcaagtgattgccttttggggagagtggagacgggcttcctgcatttccagtgcctgggtgggccacgtaggggtgtccgtgtctctgaacgcatccgtgcccaccctcaccccttgggttttgggaaggactaatgaaatcatgaaaactgacttccttggggcttgacctggggctgctctaagtgcgctacaggtaacgccattaacccgtgcaagacccaatgaacagacgctatcataagccccacttttcaggcgagcaaacaggggctcgtggctatcgatgccatggagccttggcccagaacctggggtctagaaatcgtggcctctctctcctctcaccgccctctttctggtcggagtgaaccccccagagaagggagggagacggcagggcctgacggaagccccgggagctgcacagagaggcggagggagctgccctaataaggagaggcccggacttgggcatatctgcagaaaaacccttccccactaggcaggcgcgggggagggcgtggaggggcggggtggtgccgcccccggggcgggcccagtgcgtggcagcgggacctgcggccccgtcgcgaagtttccagccctgcgagcgccgccgggtcggccgatcgtcccccatacctcggccatgcggcccctgctgctactggccctgctgggctggctgctgctggccgaagcgaagggcgacgccaagccggagggtgagggagcgaaggccgggggcgggagcgcggatccgggcgggagggctggtgtcgggctgcctccctgggaacgacctgaatgggaggcctgggctggagagggagtctgggttccggctccttgtccacttaatcgctggtgacttgaacaaatcacttcccctcttggggctgcggttcctgcttcgggaaggaaagggtgacagctgagtcccattcagcacagaaaggctcaaataataatagttttcataataataaccgacaatggctattctgcccagtgctcactatgggccaggcatcagttaggcatgattgctaccctggtaagtgtttccttctattatccccgttttccagctgggcaaactgaggctccagagttcattcacttgcccaagatcatacaacttgtgggccttggaaccaggatttaccccacccacccaggtgtctggttccagagccaggaggcctcatgaccatgggaatgaggggtcttgagggggacaggggaggaatgggggtagaaggtgtggctcactttgtggataagtttgtgctttcatccatgtcccctgtggtctgcttagcccctgccagggtggtcttcctctctgcagtttattttttttattttacttaatgtattatttatttagttatttatttatttttgagacagagtcttgctctgtcgcccaggctggaacgcagtatgcgatctcggcttactgcaacctctgcctcccaggtaaaagcaattcttttttttttttttgagatggagtctcgctctgtcgcccaggctggaatgcagtggcacaatctcagctcactgcaacctccacctcccaggttcaagtgtttctcctgcctcggcctc

SEQ ID NO: 4081 - DNA, 6000 bp, Homo sapiens; identical to SEQ ID NO: 3565

SEQ ID NO: 4082 - DNA, 6000 bp, Homo sapiens; identical to SEQ ID NO: 3567

SEQ ID NO: 4083 - DNA, 6000 bp, Homo sapiens
ttggggaggtgctggcagggctctcccagcagcccccaaaaacacagaagtcacttacttgtttcgtctttggctgattgtacattacatgtcattgactccacctccagcctcaggctgggctgaggttctttcatggtgagggtcttccggtgggctaaggaaaattacaagcttgactttcacaagtatttatggagcagtggtagaggcagaggccagagagagacagagagagagatagctctcaaagctaagctcctggctttgggagcttaggatatcatcaaagggggcagagataaagcatagctgggaacacattgggctcaatcctttaactacagtggggtggcatgagacagccctattgctgggaggagatccagctccgcaggggtacagggcaggggccttcaaatggtagatgcacacagatttccccagaagaatgccagcaaggatgggtccaaggggatcaatttccaatgcctcaatgttcctaagttttcttctattttataattttttattttttattttgtagagacagggtcttgctatgttgcccaagttggtcttgaactcctggcctcaagcaatactcttgccttggcctcccaaaatgctgggattacaggcatgaaccactgccctggctcctaagttttcttttcttttttttttttgagacagagtttcgctcttgttgcccaggctggagtgcaatggtgccatctcggctcaccgcaacccccgcctcccaggttcaagcgattctcctgcctcagcctccctagtagctgggattacaggcatgtgccaccacgcccggctaattttgtatttttagtagagatggggtttctccatgttggtcaggctggtctcaaactcccgacctcaggtgatctgcctgccttggcctcccaaagtgctgggattacaggcatgagacaccacacacggccctggctcctaagttttctactgaaacttctgggaaaatgtagcaccttcccaataatccaaccccaatttacaaaaaaacaaacaaaaaaagcagattcttatccatcccatatcttcttatggagcatttcctggggtgaaaaaaatctctttagtcccaggttggcagtgtgaaactgtctttccccgtgccgtccagaaaaccaccaggatggctcatattagaaaggctaatattagtggcgatgtcagtttacaaatgagaaagagactgtctccagctggaccaaaggtgctgtcttcaaagacagcaggttgagttttctgccttccagggcctgtgttcctatgtagcaggtttgaaggaaaggctgtccatttacacgaggggagtcatgtgcgtgcacggtgggtaaacatgcttgtaacttacatctcatgttcacttcggagcggggttttagttaaaatgaggtggcatttggttctttacgtcaaaatgtgaactataggacacaaagacagttcgtatgcatcctctctcagctgctgaaactggcttgaggtgtgcagtagcttatcaggagagaatgtttgtaaggccagtcctctgtccagtcagagttgtagcggtctgggttataaatcagaattttggtcccactcaaacccgtaagtgtgttacttattcctgggccatagagctgcctttgctgtcagagattcagttgtgggtatctcagctctggaacatggcatattgatttttaaagttattattattattattatagagtaagggtctagctctgttaccccagcaggaatgcagtggcatgatcatggcttactgctgccttgacctcctgggctcaagtgattctcccaactcagcatcctgagtagctgggatcacaggtacgtgtcaccacacctggctaatgttatttttattttttatagaagcagggtcttgctatgttgcccaggctggtctcaaactcctcacctcaagtgatcctctcgcctctgcctctcaaagcattaggattacaggtatgaaccactgcgggttggggggctggtgtcccattgtgtgttgagaagcatcttcccagccaggtcagcccaggctgcctggagcagctcagccaggtgctctctggactctgcagagccctcagaaaaacacagagcttgaggagaccctgatgtgtcatctccagcatcccccagggtggaaggtaccaaactggcagctctggctcagctcctcattccactgctggtccacaccttttgggggtcctcttgcttcctaaaagcaatttacagacgtttcccacacagtcctgcaaggcacaggcacagtgctagtaacaggctcaactcctgctctgcaatggaaatgcatgaccccaccgctcctaccttgtaggatcccacacaatttgcatggtggcctctaaacccacagtcctcaaagtggggacccaggaccagtagcttcagcatcacctgggaacttgttggaaatgcaaattcttgggccccaccccttacctattgaatcagcactttggcagtggagcccagcagtcttgccttccaggcaagcaagccctccaggtgaatccactctcaacctcacttgtgtaggaaatgggtatcatcaatgtttggaagccaaccgttgttttggggctgaaaggaaatagtgcgtgttcctggcaggaagataaaggccagtatgtagcagctgctgttatctcaccagtaacgcatcatcattcatggccatggctttctgagcttaagctgtttgccaagaatggagccacataccctccttctttccctcttcccctcagctgagcagggtctcatgcttccagatcccctgtgtttcacttcagctcctttagctaaccgagtctcgctgcccaaggcccatattccttctctcatgagctgctggctctatctggtccaggagggtgagttctttcttccctctggtcttcaggttccccctcccaagacccagcttttctctctaggttttcagaccaacagcacccagagccgatccactaactccttcatcctggcccctctccccaccccaggacccccagctgaatgcaattccttattacctcccactcctccatcctgatcaaaaggtcatgtgaccaaccttctagattctagacacatccgggggtgtgggatagaaggcaggtgtccttgaatcatgacctagcctcagcatccctctaaattagttgcatgtaacccaatctcccccacctaggcttcactgtgtttcaatctttttgaataaagcgggccatctttctttctgtgtgtgaccttggagttacacataagcagaatagatgtgcatctattctccatctaacaggctcaacagacaatgcactattcctcctgtcaacagacattattgacactagagtcataaaatgcatctccaagatggggaagtcagttcaagaaagagtatctgtatcacgagttttctctttacatttccaactccttggctctaggggtgttgccgctacccctcatcttctaggttcaggtgctcagctcctgtttgtagccccaggacaagacgttacctgggagatctttagaaatgcagaatctctccctatcccacaacagaattgcacctgcataaccagtgccccaggtagatctggctgagaagctatgatgaagggcaaggtttgccaaatgttcatggggacaagttctccagcgacactggtttaaaataggaattccgaaaaggtctgattaatgagtttggggtggaacccaggaaactgggcatttatttaaaacaatctctcctgtgattcttagaaagtaaatttataatggggaggggtcaaagataagcatctgaaaacaattttcacgcaatgtggagctttgagacagcgttagtcttcaggttcttttgttgaatggaatttgtggcatctgggagtggagcagagaccacttcccaaactcctgttcttatttttttaaattccagcaattcagaaggaattaaagtaaaagacgtaagttctctggttgctgatatctggtacctgagatcaaggcaagatcgcttaaaccagtaaagtgaggattatgggagcaaactcaggaataaagagggtgaaccaggcctggaaggggacacaggtttggcgaccagacgggtcaccgcttggcccggcctaatccaactgcgcacgtcggtgggccacagcatcgcagcgctggatccccgggtcggcagaggcggatggagttcagcctctttttcaaaactgccaaagccacccggtctgccaaactcccccaccagccagctctggggcagccccccggagcccgcccgctccggtccccgggacaagggcgcaattgaccagcgcgggccgcctctggcccacccagatgacggccaactttttttgtttttaagccatcaaattcaatatttacaggaaaaaccccatgcttggttctaaaactactggccactcaagaaacagtttacttctcacttctgcccataacaagaaaaacatagacttgtgccttactcttaaaaaaataataataataaatataggttttttaaaatttatatataatttttaaaaccccgtttgttgcatgtggtccctttccctcctgttgttgagcagaataaaagcccattttgccagggcccgcagtcctggcggcccccgcagctgcggccctgtaactttaaacctggcctgagatcatcgttttggcgccggccaaacagagcccgagggcgggcctagcgcgcccggacggagaccaccttgcggccgaccccgctcccccgcctcctcgggagagataaatgctgactccgctcggaaagttctcaactgcaaagtttgctgtccggctgcctagggtctgggaagctcgggcaccctccctctccggggctcctgctcccacccctccggcccccccaccgtcgcgctcctccaggctgggcctgtggccgcggtgctttttaattttcccccagctcagaatcttgctgctcggcccccaggagagcaacaactcaacgggaacgatgtggaaggtgtcagctctgctcttcgttttgggaagcgcgtcgctctgggtcctggcagaaggaggtaagacccagcgcaagtggcttcctgccgtcgctgatggggacgagcgagcagagacttgctggaatgcccgggcctggtattcgaggttgtccaggggagcgcgggggagctgagggtgtgtgcgtgtcaggcggctgagcgccggaggaggagaggcagcggcttagtcggtgccaggtcccaaagacgcagctgcgcgggtgtgccgggaggagccccggaatccacaggctgcgaggtgggcagcacagggggcctccctccgagtcggcagcaccagagagatcgggtggaaggttcacagtaggcagccccgcttgctggcagcagtggctggggtttccttcccatagagcggtgtgttggaggaatacgcacgcctcgggagaagctggcctcgtagaatcaggagggacgttcaggagggcttgggccaaggggagggttccccgccctgcggtggccctggtcccccttgggactacctagtctggcgccctgcctgttggacacactcagcaccccgtcactggactggaagaggcctcctttatcctctttagagaggatagtgtgtgtggaaaggatccaagtggaggcttccgaggagtgtgagtgcatgaggattgttacgcgttacgaacattgaggtttaagtgggtttgagccacgtgttcatcttgggcaacaacatcagtggctgaatgtctgttggtgactccttaggctttaaatattttgtatcccatgttggggtgggggcgtccacagcttccattaccctttgtcctctcct

SEQ ID NO: 4084 - DNA, 6000 bp, Homo sapiens
ataagcccacattaagagtaagtgggggctgggcgcggtggctgacacctgtgatcctagcactttgggaggccaaggcaggtggatcacttaagcccaggattttgagaccagcctgggtaacgtagcaagacccccatctctacaaaaaaatttaaaatttaaaacttagccaggtgtggtggtgcatgcctgtagtcccagctactcaggaggctgagatggaagaatcactcgagtccaggaagtggaggctgcagtaagcagagattatgccattgcaccacagcctgggtgacagagaaagatcctgtctgaaaaaaaaagtcagtgggaagagagagtgacctgctcagaaccaagcaagggtaaagaatgacagatggcagagaacagagcaagcaagggaggatacagggacagataataggaggatatgctcctggtggacaatacaggtggtttccagccaactttattattaacacattctcactaaaaaataaaattacctccccaacacacacacaccccccctcagtttctaagggtaacctgtttggtttgattcctcccatagtctttctgtacataatcaaatatatgtatgtgtgtctacatctttttaaaaagtcatttgtgagccaggcatggtggctcatgcctgtaatcccagcactttgggaggctgaggcgggtagatcacttgaggtcaggagttcaagaccagcctggccaacattgtgaaaccccatctctactaaaaatacaaaaaattagctgggcgtggtggtgtacgcctgtaatcccagctactcgagaggctgaggcaggaaaattgcttgaaccgagaagtcagaggttgtagtgcaacctctgcaccactgcactccagcctaggtgacagacactctgtctcaaaaaaataaaaaataaaaaaagtggtttgtgtagtatcatcatatttagtgcctttctcggtgaatgatataacttggacgttcttccatgtcagatagctctacctcattctttctggtgacttcatagtgtgccagcatgagtctatgccacaatttacttagcatagctcctagtgctgggcattgaggttggtgaccacttttcaccgttacaattaatcagcaatgaaaacccttggacgttctgttcctgagcacatgtgtgagttgttctgcatgatgatctatttctataagctgattttccagcctcactttcattgatgtgcctggaaagtcagtagcatgacagactggggtcttggtcactaaccagggacagtcgaatattttaaaactgtcgttatttacccattcagccagaaagaataaaaatgtaatgccacgggaattctcagaacagcatcctctcctctttgaattcaggctttcagaactagacaggctaatgctcccacaactcatgttcaggccacactgggtactttgtcacatactagttcacctgatccccgagttggtcctggaaaataggtattattagcatagaaatgctaataatttttttttgacacatgaggaaactgaggctcagagaggacaagacatctgcccagggtcacacaactcacaaatagcagaggattcagaaaccaaagacaaaggtgatggaatcctgccttctttctaaatccgtgatgtaggctagatcatggtgcctcttcagaagtttacagtggacagttagccaaaaaagcaggtgaagtgaacatctgcctaggtgactgagtttgcaggatgtattagtttcctcccgctgctgtgacaaattgacccaaacttcatggcttagaacaacacagtgaactatcttcttacagttctggaggtcagatgtccaaaacggatctgcaaatgccttcccaccttcaaatcataaggcagacccaaacttgcctttttgtggatgccaagagctccttctggatgctctggctgacactccattcctttccttttctagctcctagaggctgcccacattccttggctactgacccttgtccagcaactgtatcattctgatctctacttctatcaccacatctccctctctaactctgaccctcccgcttccctcttgtaggaacccttttgacaacattggacccaccaggaaaatcaaggataacctccccgtcccaacatctttaacttgatcccatctgcaaagtcccttttgccacgtaaagtaaccagttctggggatcaggttgtgaacatctttgggcagccattattctgcctatcacagaagggggttcctagcttagtgatttagagcaagggccctgcaaagaccccagattcaaatactttgtcacttgctagcagatccaggtacctaacttctctgagtcttaacagcctcatctgaaaaactagaataatagaatcttccttctagggctgttttgaaaaccaaagaacacaatgtatgcagtgcacgtgaaacacagggttcaataaatggtagggaagattcagagaaactaaccatgtagagggagagggctgtggaggagaggaggataaggagaggcatgcttcctttggtagcttcttcagttttgcctgggcctcagctttgcctgagaatttcgtcagtctctccccagatcagccagggtgagcctgcttaaatggaacactctgaagatgatatcctgtgataaacaagacctgcccagttgagtctgcagcagagtggggcgggtctgggatgaccctggcatggaaaagtacagcagctctttgtcttcagattaggagctgggacagctgttctgacatgatcaccccccgcccccaccccaggcctctccaaagtccatcttgcagagtcaaatgaaaaccagattcctggtcttatctgagagctacgtgactgtttcctgtcactcctttggagcctgggaaggtccccacatgcattgtctaaactttgggatgaatacgcacagctcttaaatgggagcatattattataggtacctgcctacacaaagggtcctccctattcactaaaatcatgggttattatttagggctttcattcatccaacaaatgtttattccgcatttgcaggtggccaggcaaggtgaacattctctcagggtggagagtatgtgcagacaggaggaattatgctatgggagggagagcagaagctctggagtggatcatcttgggtctagatcctgatacttcccagctgtgttttcactgggcaaaatgacctcacctccttaagcctcagccttctcttctataaagtgggcataacaaataaccgcctcctaggttatgaggattaaatgagatggttcaggggatgtgggtggtaaccccgcccctggttcatagcaaggatgtgaggaatagcagttgctgtcatagacatggagactgtttccccaaatgccttcccacccccaaatcataaggcagacccaaacttgcctttttgtggacgccaaggttctgtcgagctgttagggtgcaagttaagaagccagaatggcgggctgaggggagaaatgcccgcatgttacaactctgcaggtgtacacacgtggacaccatatgtacccatgaattccgcctttggaagtgaacttgattgcagcctattttcgtctggaggcggtggattcccggtaggaggcgccttcagtcctcggctcgatcctgtgacgccagccagctgcctatcggcttctcagtgtttgaacttcaaagggctggacgctcacccaagaaggggaccccggcctgacctctctcggaattcaaaaaaatctaaggctcagagagggaatgggagctggctcttccctctgtgtttagcatccacgttttttggcggtctggctgaaaccagcccaccctagttcgggcgccagagcaacgcagttccgagggcagatctccaaggggcggaggcagagccgcgggtgagaggcttccgcgccgacttcgggtttgcactccccggagccagaactccgtggcggctccgggcctccgtggatccgagcagagactggctgcccgcctgccactcgcaggctgggaaaacgccagccggtgcctcgccgggaaagttctcggcaaagctggggatgagccctcagcagggcaggctcccggtgcagcgcgcccccatccattgcccgcgcgcaagaacccggaatgggccccacctgggccgggactcgggcgtgcgatcccgagggcgccctggggaccacgcatcgggtggggaccctggccgagggcgtgagctgactcagtttttaaaaactcgcttcctccttccctacttgtgccggtcactcacctcgctgggaaccagcccagggcagaagggggagagggaggcggtggcctccccaggaaggaggagaggtgagtatcccgccaggtaaaggcggggcggctggcggagctgtgcctcggcgtctgcgcctggtgtgggaggaaagcgggtctcccagctccacttaaacccctaaaacctgggacttctagcttgagacattccccgaccaccacccgtcacacacacgcgcgtgcgcgcacacacgcatgcacaccgattctctgggccctagggaggaggggggatcagggctctattttctcccgaccccctcttatccaactcggctggcaagggttggggagaacttaggcccagcccccggcacacgctcagcgcgctccagcggcatacgctggggagtgggtgcccgcctcgctcagctgcgatccctcgcctcgggcccgggggtggtgccgagggccgggagggagggtcggccggtgggcggtgcttctccgggctggaggccgctcctggccggcaccgccctccgcctcccgcggtccctccctcccgcacgccggcgctcccaggccgcgcttcctgcgtccccaacccggtccctgagagggcagtgcgccctctccaccactgcgttccctcggctaagaatcccccgaaccccagccccgcgatcgcggcgcccaccgaggaggccgcccgggtggggcgcgggggtcgcgaagcccgcagtcccggaccgcccagccgagacggagccggacccgccgcctcccgggtgagtctcagccgccgcgccttgcgcccgctgcttcccgcggcgcgctgtcggttccccacagggccgtgtaagggggccgaggcccgtttgggtctcctgtccgtccgtctgtccgccgagcgcttcccgcctggggtcgaccaccgggaggactccgcaccccgcaccctctgcggccgcgccccgccggcgcgggacgctcccgcctcccgggcaccgcgcctggccagctggcctcggctggggaaggcagctggccttgggggccccctgttggcgggaacaggtgctatccgcccggcgggcttcgaacccttggcttcgccagaagcgctttcagcgcgtggttaggagcagaacttcccagtaggtcccaggaaaccaccttggcgctttgctcgcgcatcccttactgtatggaagtcggggccttttagggatttagattcgtgtgtgtgtatgtgtgtgtgtcgctctacaagcaaacacgggggtaaagaatcgggcatgagcaaagtggattgaaactcgagtccttccctgagcgcgtcggtttcttcatctgtgaaactgacatgacaacgtcccagggtgcggcggggcattcatgcccagcacccagcaagcactcagcggtaagttacgttaccgggcctaggggagagcagagtacaaatcagatctcaaatcagcgcacaaacgggaggcgcttggcccggcgcgcctggtctgcattacaggataatggtctctttcccaaccagcggtgggggcgagagacctggcccctcccccacggtttccccagggagcagcccgtggggtg

SEQ ID NO: 4085 - DNA, 6000 bp, Homo sapiens
gcggtgagtagggggtggggggctcaccttctcagcccgcacctcgatgtggttgttggaggtggtgacaatgatgtcttcaggtgagaagtctctcacgtccaccgcaaactcataggcgtctcctagggtcttgatgttgcctgccccaccggggcgggctgtgggatgggctgctgtgagcgaggcatggagcaggccttgcatgcagatccgggggttctggctccttctcttggggcaaggggcggctcccccaggccctacctcccccctagctgtttctccctaagctcctcctcattcctacagcccaccttttctggggtgggggtggggcctcacccagcacagtgtgtgtgtatatgaggctaggtctgtaacaaccccaccccaggcctggagcctgggggctgccccccaccgctcacccatccagccctccagggctccagctgggattggctgtggttacagagcatgggtggccatggaaccatgtccaacccccagggccacaactgttccttagaggcccacctgttttcatggccacatctgtccctgtggccacatctgtcttggtggccacacatggctgcaggctgtgcagcacctgttccaggccgaccggcagccacagcgccttcggtggcgccctggagcagacgtcccctccctgtgcacctcccctcccctcagggcccggatcacttgcctgggaaggccaggggctccgagtggggccgcatgaagctgccaaagtcatcggaaaacatgctcagggccttctccatgggcgggtcctgggccgggagagcacgggaggccgaggaggaggtggaagaggaggaggaagaggaagaggaatggaaacttctctccgctcggaaggtggaagaggttctgtggctcatccacggacggcgccgggccctgcccaggcgggcgagggctggacaggagagggtgtgggcgcaggcctctgggcgagcgtgccaggctccgactgcggccgctttataaggccgactgtccctgggcttggggccagccccttgtctactagctaaatttaggcctctccatggcccagagggggctggaaatcttctcccgtgcgccggccctgctgacagcccgacacgcaggccgagagggctgagctcacagcctgacattccaggctgatcacagcagccccaggggcctcctcaccactgcacagggctggatcctgtctccttgccactcggacctcggtgcctgccccagaaccttgcaagtttggggtttattgtgtgttttgtttcccccgtcagcctgggggctcctgaggactgtgcctcccctccagactctggttctcctccacggctgtacctcctccatcagtgtgcaggctccttggggacagggtaggtggaagcaccaccgctctgtgacgtcaggagctccttccctcaaggcagacaaccttcacagcccatctctaaggaaaggttgagccctgccagggggtgtaaaatgtgcagctgtcccctgccagcccccatggggacctggattctgtgcctgcactccctctgactctcagaacattcagcagccccaagaggacaaagttggcagctttctccttaaaggtctagaaggttgtgttcccggcaactgtctgctccatctctgtgtcagaggtgatgcctgcgagcgccttaggtgggatttcagtcagaggtaaaagagaattccggaagacaattattctagccctgagttctagaatgccttctgggcatgggctcctggctgcaagctgtccagcacggccccgtttgatccccacacagctgggagggtggaggggctcttcccatgttacggacggggaagcgaagcctcttggaaagggcggggctcgcagttgcgtaagtggcagagctgggattcgaacctagatgtgttggacccaaagcccttcagaggccgaggtggtttgaacatgtgcctatggagacaggctggcccggaagagccagagaagcccctccctacccacctgcttgctcagcaaagctgggactgaccttgccctgggccagggtggaggccattctgagaggcggccaggccctctgctctgcccaggttgcagttaagggcctctgctgtcctctccaaatccgtcccttccgtcccagatcagctccaatgcctcctcccccagggaggcctctctgactgctcctgctcacatgggcccacacccagtccagatgcccccagcactgactgtctttgtcctcccacagcacctggcagtgtgacatagtcttcctgtgtgctgtgactctctgctgtgtcccttcttccctatccaactggcagttcccacgggggcgagggttcacctgtctccccattagattgaaggttcttgaagacgggcagtttctcttttgtctgagccccctacaacccagtctggagcttcatcctggagagctccttctacaggggtattagcggtgctggtggtatgtggagtggaagcagagcagggcacagggcacagcggcgggccaggctgttgcctggagcaacagggcctgttgcctctggcagagtttcctgcccgtgtcggggcctgtgacacccagcctggctgaggggtttctagggcagctgggaagccaccagcactgaggtgagatggagagagggtggggcggggtggggggcccagagcctgccgctcgccagggaaacaggagccggtggctaaatgcagacacactgtcatggtgctgagggcctgagtcactgcccctggatgtcagatcccgttacccacccccgcccaccattcctcctcccctttttcccccttcccgaggcatcacccacacaaatactggatcctctggcttcactgacccagagggacctcaaaaggtcatcaaggacattcccctgcctctaccttcagatcacagagacagaaggagctacaaagatgatgcagtcctttgaatcccagtcacccaggagagcttttcacaaacacagaccctttccttggaccccaggattttgatttgggatctggggaagggacctcacatctcttcccatcagctccccacacagccagctcataggccagtgatgaagccctcatcactcagtaggtattcattgaaaccttgctataaataggtgctgggcactgttctaggctctgaaggactcagagatgaataaggcagagacaggcccctgcttccaggctcacctcatcatacagaagaggaaactgaggctctagttgatgaaagagttagggtcagcagagctgtgctggcttcaaaccggtcatcctgctgagccaccctggctgccctcttctcagcctcctggtgcacacagggctggggggtgagggtagatgtggacgtgcagtgctggctgtgggacagtagccagcagctgccccagaccagacactggaaatcgggatgttgacagggcagccagttctggtgctgtgcagagtcaacaggtcggggtggccaaggtgaaggtgggctcgagtccatacagagcggcaactcccatcccacctcccacaacacacatctttgattttgatttgacttgcctggcatctaggggcaaagggtggcccagggtcccagattttaacaatcatccaagggctatcataagcttcagagggtggctttgtctgggtgggagtggaggcaattgtccccaacctcttgcccaaaagtggcatcagacacaactcttctgttctgtgcccaaaccattgccctggttcagcctcaggagctggaggagctttgggcaggggaagagctgcacagtgtggggctgggttcagcctctgctgtgtgaccttggatgagtgactcacctctctgaccatctacaaaatggcgaggctctccccattcacagggtgtgggaaggaggacttgagctgcagatgtgacgctcctgacacgtcgcaggcacacggcaggtgcttgttcctcgccatgtcccctcacacctgtgctgccatcctctgttggggtgggacaaactctgtggaattacccagaagtccccaccagagccgctggcccttggacgtgtgctttgagaagcatttcctgagcctggagggtctggacacaggatcaagtccgagttcctgaccccaattcactgccttgccccaggtgtcggcctcctcgccagccctggacaagatgggtcatcaggatgggaccgtgtggcacagcctgcgggctttggagccaggcaaacctgggctgggaatcctggctctgcctcggcctccgtgatcttagacaggcagccccagctccctgagacaccatttctctacaacgggatcacgctgcctgcctcgtgggatttccgtgggcactcagggtaattaatctgggagaaggctgactctctacctgacacacagggaggctgtggtcatgctggccccactcaccattgcccccctgccttctccttcccttcccagcctcctcccctctccctctgtgctttttcaaaccttccatgtccagctctgagacccctggaccctgagtctcagccttggcagatgacccctctctgtcctgctgtgtgcatgagctcccccttcccagccctcgtccagcagcacccaggagcctgagtacagctgggcaccaccctctgtgcagctgtgatgggtggggaggctcctgctccccttctctcttggcagttctgccctgcacagctctggcctccacagttctggttggtttgtcaaggacgtttttaatctccatggtaaaccccggccggcggggaaggggggtggcagggagagagtgatgattggtagagcatatacctgtccaggtgcactggagctgggagcaaaggaggctctgtgagaggagggccagttcagccgcagcaggaggactgacaggtgaggggtctctgggcgtggactggagtatgaacctggaagggccaggcaggcagggcataggggatggtaggggcagtagccagcacctcactttggctttgcagaggccttctggtcctggggttttcctgcctctgtgacctgagctgtcggggagaaaggagggtgctccgagattggcagggagagtcggagccatccatgggactctgcagtgagagagtcacagccctgggcagagactgctcccagtagtggaagcaccaagcgacccaggagggtgggagcggtgtccacagtctgctgctggacacagggggacacctaggaatcccaccctcatcccacaaaatgacacacacaggcacacaccctcagtgacggaacctcagggatgagggcacacacagacctagtgtgataacacacacacacacgcacaatccttcctcttcatttgggtggggagagcactggaagggcccagaggcagcgcgaggacgtgcagcagctcacccgggtccttccctccatctgcttctccaggggcctgatggaggagttggtggggctgcgtgagggcttctcaggggaccctgtgactctgcaggagctgtggggcccctgtccccacatccgccgagccatccaaggtgagagccaggtcctcttccctacccgcgggggaccactcaggacatcattcctgcctggctcccaccccacctctctgcccaggaaccaccctcctgtcatttgtccaggacatgactgcccaaagtctcctgggtggcagggagggaaggggtctgtctgtccagctgtctgtgggtcagatgggccaggcatctgccctctgcctttcaggagatacagcccaaggcctggtcactgtgcctatcttccacccaggcctctccctcacctacctgtgccaatgaggggacgtgggggttagctgctgggacagctgggggcac

SEQ ID NO: 4086 - DNA, 6000 bp, Homo sapiens
gtcaacatggtaaaaccctgtctctactaagaatacaaaaattagctgggtgtagtggcacacacctgtaatcccagctacttgggcagctgaggcaggagaattgcttgatcccgggaggcggaggttgcgatgagccgagatcgtgccactgcactccagcctgggtgacagagtgacaccatctctcagaaataaacaaataaaataaaataaaatttaaaaagtccagcctgtcaccatagtgtgccataattctggggtactattcatgctcccaagctgtggtgggaccagcttggtgaagctagactcctgcagagccccttccgaaggcccctctgcctcccccgctgcctgctggcttctcttgagggccattccccagggaatcacctgcacagtcatgcccatgtcaggctctgcttccagggaacctgaactaaggtgatgggactggcagagaggcagggagaccatgccagacagacatctgaaaaactctgccccaccccctcagagcttcttgagaacccagcagtttaacctgtggaagcagaaccctgagccactggtccccccgtgacccgcataacccagcatggactctggcatttagaacatggagaatccaacagggctgccatcctcccacctgcaactcagccatgcccttcccacagccagggtctagggtgggaccgtgcattctccaccggcaggagagttgtggccagaacctacccacaaggaacgaggtggccagggctgccacgttgtagttgccggggcaggacctggagtcggacaggtggccgttggtggtctggaagcacctctggaggaagtggcaggaggattgagcagggtgggccaggcttccggccgacatccctccagcaccaccacccatccccgtctcccagctcaccaagtcctctggccagtgggcagggacagggcagctaaagccagggagatcctactaactcccacgggacaacccccacccactgtttcatcagattctggtcttagggctagtgggactgtgtgcctgagctgggcacaggggagagaggggtggtggtgtcagctggggccggctagaatggggacacacaagtgcactgacctgccaaggatcccaacagaaatccatctgtttgtcctaaaacaagaggagagagaggatcaggcagggcctggcacgctgtgccggcagatggcccgagtcctggggccctgggtgagggtgggggtcagccttctggtgctccgtgaggtcggggtctgccctctcatgggtcatgctctggtgtcccccggcatgcagaggaagaaggtgggggcaacagtggtgctgggaggagaggcagcaggtgccgcttatagagcaggcttgggtgtgggctctgactttgccatttcccagctggtgtccctagactattcctaacagctccgaacacgtctcttcctctgcaaaatggcgacaatgtcattcacctcacgagttgtggtgaggactaaataacataacggaggctgagaagagctgagtgcagtgcttagcaggaggggtgtgccactggagagaaggtaattatatcatccagtgggttcatgccacagaccctggagcaagggcggaaattatgcaccagaatttggggcctctagtgaccctgagtgacatcttccaaatctatctagactgagaattctttttttcttttttcaattctttccaccccaaatcaccaccctgcctgagcctttgctcacatcacctccttctccaacaaagagcttttcctgctgcacttaagaccttctcgcccgtccatcccggactggctcccatccctgccctcccccggggggccttgctctctctgctgcggcatgaccgtgccatctctgctccatcagcccggaagcatcccgccagcatcgcacgtactgccatgtctcttgggctcgggactttgtcctgcagtgtctcccctctgtccccttaccactgggtcgggccgtcagcaccccagcagcccaagcatcttctttttttttttttatctttttgttttgttctttttttgagacagaatcacacccaggctggagtacagtggcacgatctcagctcactgcaacctctgcctcccgggttcaagcgattctcctgcctcagtctcccaagtagctgggattacaggtgtgcgccaccttacccagctaatttttgtatttatggtagagacagggcttcgccaagttggccaggctggtctcgagctcctggcctcaggtgatctgctggcctgggcctcccaaagcgctgggattacaggcactgtgcctggctccgcatctcctgtcttttcagatccttgtcatgaccactgtttccctccagcgttcctctgctcccttctcattggatgtgcagaagtctgtgtcagccccagcctctcgggatgaccttagcaggcgtctcttcctccccgacctctgtcccgtgcttggtgggtcctcagcccacaggccagtacacctaggctggcaccccaaggcacccggcatggagtggccaagtgaaggggaagggacctggtcactgaggaaacactcagatcccctccacctggagctgggcccagccagagactgcctagaacctttggggtttctggagccaccctcagactctgggagcctggtgttcctaaggaacccccagcactcctcactcttcaaactcccttcccctctcactgaagacagtgggaccaggtaaggcatgggaaggggctgtgggggtgagctggtaaggcctctgtcttgggaaggggtgggagatggggggtctgctagctccccagctgtccccacagttcctctgggaagccaggaataaccagagcctccctcccctcctaggcacctggcagtgggggtgtaaccattggaataaaagcagggcaggggaccctgcttcatgtcacctgccaggatgcaaagtagtgtggggactcagtgacctctgaatgtgggttctctgtaccgccccgctcccacccatacctgccctgtctctttcagcgtgccctgtcccccatcccgtcctcagctgctctgaggcgagggggctgtgcaggtcctgggcacccgacccccactgtcatgagacagagacccaggtctcaggctcagctcatttgacagaggaggaaaacagaggctccggatggtgatggtgttagggtcacagagccgccctgggttctcccctgctgtctctctactgagcccccgctactgctgccaggcgactaatatggaaggggagaaattagggctgatgtggaggcagtgggtttgggagggacctgcattgggtcctgcgccccctggctgccctcttctcagcctcctggggcacacagggctggggggtgagggtggatgtggacatgcagtgccggctgtgggacagtagccagcagctgccccagaccagacactggggatccggatgttgacagggcagccagttctggtgctgtgcagagtcaacaggtcagggtggccaagatgaaggtgggctcgggttcatgcagagcggcaacccccatcccacctcccacaacacacaccttcaattttgatttgacttgcctggcatctaggggcaaagggtggcccagggtcccagattttaacaatcatccaagggccatcatgttattcagagagtggctttgtctgggtaggactggaggcaattgcccccaacatcttgccccaaagtggcatcagacacaactcttctgttctgtgcccaaaccattgccctggttcagcctcaggagctggaggagctttgggcaggggaagagctgcacagtgtggggctgggttcagcctctgctgtgtgaccttggatgagtgactcacctctctgaccatctacaaaatggcgaggctctccccattcacagggtgtggggaggaggacttgagctgcggatgtgacgcttctgacacgttgcaggcacacggcacgtgcttgttcctcgccatgtcccctcacacctgtgctgccatcctctgttggggtgggacaaactctgtggaattacccagaagtccccaccagagccgctggcccttggacgtgtgctttgagaggcatttcctgagcctggagggtctggacacaggatcaagtctgagttcctgaccccaattcactgccttgccccaggtgtcggcctcctcgccagccctggacaagatgggtcatcaggatgggaccgtgtggcacagcctgcgggctttggagccaggcaaacctgggctgggaatcctggcgctgcctcggcctccgtgatcttagacgggcagccccacctccctgagacaccatttctctacaacgggatcacgctgcctgcctcgtgggatttccgtgggcactcagggtaattaatctaggggaaggctgactctctacctggcacacagggaggctgtggtcatgctggccccactcacctttgccggcctgctttctccttctctgcccagcctcctcccctctccctctgtgcttttccaaaccttccatgtccagctctgagacccctggaccctgagcctcagccttggcagatgacccctctctgtcctgctgtgtgcgtgagctcccccttcccagcccccgtccagcagcacccaggagcctgagtacagctgggcaccaccctctgtgcagctatggtgggtggggaggctcctgttcccctccctgttggcagctctgctctgctctgctccggcctgggcagttctgatcggttttcaaggacattctaagtgttcgccataaaccctgggcccaggcgggaaaggggggaggatgttgattgttggaacacacacctgtccaggtgcaggggagctggaggctctgtgagaggagggccagctcagccacagcaggaggactgacaggtgaggggtcgctgcaagatgctggggcctgccagggccagacaggcagggcgggggggggggggtggtaagggcaggagccagcacctcactttggccctggtgggatcttcttctgggcctggggttttgctgcctctgtggcctgagctggggtcaggggtgctcataggtggacagggagagtcagagccatccatgggactctgcagtgagagtgtcacagccctgggcagagactgctcccagcagtggaagcgccaagtgacccaggagggtgggagcggctgccaccgaaggggaaggggctctgagcagggcttgggctccggcctgtgcccagtctgctgctggacacagggggacacctaggaatcccacccccatcccacacaatgacacacacaggcacacaccctcagtgacggaaactcagggatgaaggcacacacagacctagtgtgataacttcacatacacacacacacacacacacacgcacaatctttcctcttcatgggtggggagagcactggaagggcctagaggcagtgcgaggacgtgcagcagctcaccgcggtccctccctctatccgcttctccaggggcctgatggaggagtttgtggggctgcgtgaaggctcctcagggaaccctgtgactctgcaggagctgtggggcccctgtccccgcatccgccgaggcatccgaggtgagagccaggtcctcttcccttccccctggaggaccactcaggacatcattcctgcccagctcccaccccacctccctgcccaggaaccaccctcctcctggcatttgtccaggacatgactgcccaaagtctcctgggtggcagggagggaaggggtctgtctgtccagctgtctgtgggtcagatgggccgggcatctgccctctgcctttcgggagatacagcccaaggcctggtcactgtgcccatcttccacccaggcc

SEQ ID NO: 4087 - DNA, 6000 bp, Homo sapiens
tacatgcatgagtcacagcacccagcctgcctctgtccatttatactgggttgtctttttattattgcacggtaaatgttctttataaattctagatacatgtcctgaatcatatatatgatctgcaaaaattttctcccattatgtggattacattttcacctttttgtcttttgaagcacagaagttttaaatttttgtaaaagtcccatttatcggcctggtgcggtggctcacacctgtaatcccagcactctgggaggctgaggcgggcggatcatgaggtcaggagtttgagaccagcctggccagcaaggtgaaaccccatctctactaaagatacaaaaaattagctgagtgtggtggtgcgtgcctgtaatcccagcactttgggaggccgaggcgggcagatcacctgaggttgggagtttgagaccagcctgaccaacatggagaaaccccgtctctactaaaagtacagaattagccgggcatggtggcacatgcctgtaatcccagctagtcaggaggctgaggcaggagaattgcttgaacctggcaggtggagggttgcagtgagccgagatcgcaccattgcactccagcctagatgacagggtgagactctgtctcaaaaaaaaaaaaaaaaaatacagatagggtgcagtgtatactgctcaggtgatgggtggaccaaaatcttacaaatcaccactaaagaacctactcatgcagggcaaggtggctcacgcctgtaatcccagaactttgggatgccaaggggggcagatcactcgaggtcaggagtttgagatcaccctggctaacatggtgaaatcctgtttctactaaaaatacaaaaattagctgggcatggtggtgcctgcctgtaatcctaggtacttgggaggctgaggcaggagaatcgcttgaacctgggagatggaggttgcagtgagcagagactgcaccactacacgccagcctgggcaacagagcaagactccgtctcaaaaaaaattactaatgtaaacaaaaaaaaaacaccaaaaaacaaaaaccttagtcatgtagccaaataccacctgtaccccaataacctatggaaaaacaaataaataaataaataaataaaaagttttgaaatcaggaagtgtgagtcctccaactttgttctttttcaaaattctttgggtattgagtgccccttttataagtggtttcctcatctgaaaaatgggagaatttctcttggaaatatctatgatggcaggaaaatacagcagataaagataagtggcatatcatatatatgtctggaggccgtcagggaaagcttgttcaccttacaccccaccttggccctgcacctaccagaaatcagctggatgagtcacagtgagattttccacccctgctcaccgccttgcacataggatgggctctgtctgagcctatactttgcctgttggcttgaattggatttgtttggtatacagggcagttaaactgggaatagatggcaggtccaattattctcagcagcagaggtttaggaatgcatttcaggaatatccagccatgtggttagggtttgagaataaggcaaggggctgtgtgacctccaactactggacagtgtcatttcccccagcttgtcactggttcagtggcccccattacacaatgaagataacaatcgttgccttgccaacctcacagtgattattgggccagggtactctctcccagaaagccttccctgactctccccagactgtgtggggtttcttctctttgctcccacaggcccctgtgaatttgcttcattacagtacctttcattctgctttgccaatgactgcttttctctctgtctcctccagtctgcgagctccaggatggtaggagctggattggccacatcccagtgaccccagtactcagcacctggcatagggtatgtgctcgatgcctgtctttgttagactgaacagaactgaaagtgctctgaatggctgggtgcggtggctcacacctgtaatcccagcactttgggaggccgaggtgggtggatcacttgaggtcgagttatagaccagcctggccaacatggtgaaaccccgtctctactaaaaatacaaaaattagccaggcatggtggcgcatgcctgtaatcccagctacttaggaggctgaggcacgagaatcacttgaacctgggaggcagaagttgcagtgagctgagatcatgccactgtcttccagcctgggtggtagagtgagacttagtctcaaaaaaaaaaaaattggaaaataaggccaggtatggtggctcatgcctataatcctagcactttggaaggctgaggcaggaggatctcttgaagacaggaattcaagaccagcctgggcaacatagcaagacccccgtctctacaaaaagtaagaaaaatagcagggtagggtggtgtgtgcctgtaggcccagctactcaaaaggttgaggcaggaggatcccttgagcccgggaatttgaggctgcagtgagtgatgatcgcaccattgcactccagtgtggggtgacagagagagaaagaaagagagagaccctgtctaaaaaaaaaaaaaaaaagaaaagaaaaagaaaagaaaagaaaagaaaaataaccaatatttgcaaaaatgtgaagaaattgaaacccttgtgaacgtaaatggtgctgctgctgtggaagacagtttggaggctcctcaaaaaggtgagcaaggccggacatggtggttcacacctgtagtcccagctacttgggaggctgagttgggaggatcacttgagcctgggaggttgaggctgcagtgagccatgatcatgccagtgctttccagcctgggcaacagagtgagatgctgtttcaaacaaaacaaaacaaaacaaaaccactaaacatagcattattgtataactcagcagtttcactcctatgtatacactcaagaaaatggaaaacaggactagaacaagtgtttgaacaccaatgctcatagtagcccgattcccaataccaaaaggtgataacatcccaattgttgacagatgaatggataaacaaaatatggtatatacatgcaatggaatattatccctccattaaaaggaatgaaattctgatccatgctacatgaaagaaccttgaaaacttgatgctaagtgaaataagaaacacaaaagcccaatattgtatgattccacttataagaggtatctagaaaaggcaaattcatagagacagaaagtaaaacagaggttactaagggatggagcagaaggaaatgggaagttattgctaatgggtgtggagtttctgtttgggatgatgaaaagttctggaaagcatgatatagttgcacaatattgtgaatgtacttaatttcacagcattgtacacttaaaatggtaaattttatgttatgtatattttacaataaaaatgtaagtggttagatcaatcctataataaaaagcttataaaaaatgagtagaaatggccagtcgtggtggctcacgcctgtaatcccagcacttgggaggccgaagtgggcggatcacttgaggtcaggagttcaagatcagcttggccaaccagatgaaacccccgtctctaccaaaaaaatacaaaaactagccaggcttggtggtgggtgcctgtaatcccagctactcgggaggctgaggcaggagaatcgcttgaacccgggaggtggaggttgcagtgagccgagattgcaccactgcactccagcctgggcggcagagtgagactttgtctgaagaaaaaaaaaaaaaaaagtaaaaaggagaaggagagtgagagagaaaaggaaagaaggggtggggaaagtttggggtattcagtgaatcagaagtttgggatcagcttcacccccacataggggctggcacattgcaggcactcaactcaatgagagaatggtagggaaggagggattttgagaatttggctagggtagacattgtatctcccagaatattctgggagaaatcgaagttaagactggaattcttcttcttctttttttttttttttgagacagagtcccgctctgtcacccaggctgaggtgcagtggcacaatttcagctcactgcaacttccgcattccgggttcaagcgattctagtgcctcagtctcccaactagctaggactacagacacacgccaccaagcccggctaatttttgtatttttagtagagacggggtttcaccatgttggccaggctggtctcgaactcctgacctcaggtgatccgcccgcctcagcctcccaaagtgctgggattacaggcgtgagctaccaagcccggcctggaattcttcttaaattacttgtgttactaaactttacttctttgaatacaactcgttgttgaggtttggccacacggggccctgagcatataagtgggttcccctaggggaagcatggagggtggtagggtaatggcatctatttagtctggtgggtcaggtgccagctgagccttacagtcaggagagggaaggatattcaggcagaggaggcgccgaggcaaaggctggaggacagagatactgcagggtgggctacagctttgcctctcggtcaactgggccccaggcctaagaaactgaagcgatggggatgatccacacccagaccacgggttacagaggggtctgtccatggcgggcgcagggcgctttctttgcgtcggagggtgtctggagggaaggagaagcctctggagggagggagaagcctccggaggtcgcccgccacgtgtcttgagccgggtttccagcagagggcgcacaaacgaggcggtgctgaggcccgcgagctgccgctctagccgaaacctggtcagagagtcgcaccgcttccgtccgtcggacagaggaacggtggaagtcgccggaagttcggtgggctccaggcgtcgcgatggaggagagcgggtacgagtcggtgctctgtgtcaagcctgacgtccacgtctaccgcatccctccgcgggctaccaaccgtggctacaggtgactacccaccgccagaccaggctagctccaatttaaccctttctccgccacccggacacacccactgcgggaaccgaggacagccctggccagttttggggcgagggggagctaatgctgctgcttcttccagttccaggcccgagcagggaggtggatccagagtttcgcccgtctcagttcgacgcacgggactcctggcggcggggagggcgttaaagccgtatctagcgcttagggaccccggtgggctgccgggtaccctaaacttggtcgggggtggtgatgtcacagacgcttctctttcagcgctaaccggtggccttgaagggatcctcgaaaagccttaagcggggaggtgccctatcacagacggaaatccccgagaggaggggagggagcccagagccggctgaaaggaccggtcccggggagctttaaggtgacggtcgaagcccagggaccccttcctacccagatcccttcgcacgaatttcacccttgatcacagcctggagcagttgggaggaccccttctatatttctctggtctctacctgagacgaataaacacacacgcttgtaaacatactgagtatctctgcaaaggaacacaggaaactgccctaggggaggggaaccgcccttggaaggaaacttcctttcccttttgtgctgtttgcgttttactactctttgtatgcgttatctatcaaaacgacgaaaaatattaaaagaaaaaagatacacttcatacagacaacctggcctatggctattttgtgccactgagtggtggtggggagtgctcgtatttgcgggggcctgggtggctcttgaaggcgatggttgtccaagtttttcggaaatacaggattggtctgcaccccaagaatg

SEQ ID NO: 4088 - DNA, 6000 bp, Homo sapiens
caccatgttggccaggatggtctccatttcttgacctcgtgatctgcctgcctcggcctcccaaaatgctggggttacaggagtgagccaccgcgcctggcctgggacttaaagtctttacaagggattaacactgatagcagcgcagatagcaacacaggtccctctctttccactttgtttgcctgtatggagccagctctcaactggttttcttcctctgctccaagcctctgaggagattgagtctgcttgggttcaaatcttagctggaccactgcctaactatagtcttgagcaagtcacataagatctccaagactcacttttcctatgtgcaaaatggggaataatggtcacacctacctcactcctagagtggcagtgagcgttatgtgagtcagcgcgtgtgtagagctcgggacatgcctggctttagtaagacctcagtggatgtcagctgttattatgattgagaatgaatgattggcccacgctgcagggtgttgcactgatagttttgttcatttattcattcactgaacagatatttattgagagcctaatatgtgccagagatccagcgtgaaccagacagacaaatccctgcctgccttcagggagtttgcccagttgttcagttgccttctggcacagagcagctttgggcaggctggcaacctccctggggccttgatttctccacctctgtcatgaggagcttgccccggtcccctgtgaactgacgggcatggaggtctggggcagatgactccctaaaactcagctgttccatagtggcacctgctatctcctctggggaggaagctctcatagctagaagtaaacaagcaaaagccgagtattcttgaaagtccctctttaccctgaaatttttttttgtttgttttttgttttgttttgtttttgagacggagtcttgcgctgtcggccaggctggagtgcagtggtgcaatctcggctcactgcaagctccgcctcccgggttcacgccattctcctgcctcagcctcctgagtagctgggactacaggcgcccgccaccatacccggctaatttttttgcatttttagtagagatggggtttcactgtgttagccaggatggtcttgatctcctgacctcatgatccgcccacctcagcctcccaaagtcctgggattacaggcgtgagccaccgcgcctggccaaccctgaaatgttaagaggtctaggacttcgttatttcatgacccaaatgacagttataggagagcacacatgaagcgtctataaaggtcccagccaggtgcgggcctcatgcctgtaactctagtgctttgagaggctgaggcaggaggatcacttgaggccaggagtttgagaccagcctgggcaatacagcaagaccttgtctctacaaaaaacttaaaaaatttagctgggtgtggtagcgcacacctctagtcctacctacttgggaggctgaggtgggaaggtagcttgaacacaggagtgcgaggttacactgagctatgatagcatcactgcctccagcctgggccacagaacgagactcttgtctctaaaaaagaaaaaaaaagtctcaagttcaagataataacagtatggccacaaggtggcaccataaccctggcccaatcttaaaataaaattttaaattttagcacagagcgcattataacaaacatcagcggatccatcacccagaatgaacaaatgttaaagttattgccaggttttctttagttagtttgtttgtttgagacactgtcaccgaggctgaagttcagtggctattcacacgtgtgatcatagctcactgcagccttgaacacttggcctcaagcaatcctctcacctcagtctcacaagtagctgaaactagagtcgtgcaccaccacgctcagctaatctttaggtcttttttttaaaataaaagatatcaagtattgtgggaaaagtgaaagcagaaagactaatattctatgcactacctacagatttttacaaagcaacatttatcaggcaaaattttttactcatctcattcacagctccactgccttggtttcatagcagcagagaatttaagaggctttgcacaacttcacagagcaagtggcagactctggatgatgaacccaggatgctgggctccaaaatccttccacacagcacctctcagggttgcagctgttcacgtcagaaatccctgggctcaaggagttagcacagagctgaatgcattacgattgtgctgatgggaacactaaagccaagagctaggttttttttttgtttttttgtttttttgttttttttttttttagatggagtttcgctgtttttgcccaggctagagtgcagtggtgtgatctcagctcactgcaacctctgccttgtgggttcaagtgattctcctgcctcagcctcctgagtagctgggattatgggcgtgcatcactacacctggctaattttgtatttttagtagagacggggtttcatcatattgaccaggctggtctcgaactcctgacctcaggtgatctgcccgccttggcctcccaaagtgttgggattacaggcgtgagccactgtgcccggccagctagtgttaacatagtatcaaagacacagattacatcagtgtcatttaatcccctcagctactctgtgaggtgggtgccatattgttctgctaactattacagaagagaaagctgtgacccaaggagatggagccactggccctgtaatcccagagctgggatggagcggggatcccaagccatgtgtttctgactctctgcccaggcttgctgtactacgttctgttccttgggggcatggcagaaatcgtcacagtggtgcagtgtggtggcaaggaggaaggacaggcctcctctatctgcttaaaagatgcttctgtgggcaaggctggggctctgagcaccaaatagcagcttagagttggcgggtgggtgctgcaggctctgaggtgcctgaggggaggtttttgaccatctgtaatgggctctctttgccatgggcatcgagcagatctgggtttcaggtccacttcaccacttgctgctggtgatctggggcaaggcccttggcctctctgaaccccagtttaacgtctacctctcagcattattgtaggggtcggaataaataactggaggagtaggaaccgtacaacaaagcccctggggacagcgcaggagccttcgatttggaaagtattatttttctgtttctgtggagaaaaaatgatcccaccccgttctctttatactacattttctttttctctttctcttctttctttctctttctttcctttctctctttctttctttcctttttttttttttttttttttttttttttgacagagtcttgctctgtcacccaggctggagtgtgcagtggcacaatcttggctcactggaacctctgcctcccaggttcaagcaattctcctgcctcagcctcccgaatagctgggattacaggctcccgccaccacgcccagctaatttttgtatttttgatagagacggggttttaccatgttggtcaggctggtctcgaactcctgacctcaggtgatctgcccacctccgcctcccaaagtgctgggattacaggcgtgagccacctcgctgggcccactttctctgttgattatgcttattgtttattgtctgtttcttccactagaatgtaagctccatggaggtgcggatctttgttttggccactgtagtgtcctgatgggtcagaacagtgcctgacatctagtggatgcgccttaaaagatgcattgaagtatctgttcaatgaatgaatgaataacagtattaacctgcacagcagtgttaggcagagactcttctcagccagaggggagacgtacagagggaggtcacacccaggggaaaccacaccccacgcctctgcctgcagcgactcttaacacacctggcctggggattctcaaatctgttcacgctctgttagactaggagcgccaacagctcagggacttcatccttagtacctggcccctttggggatcgggatggtttctgcgggaaaggccctggggaaggttagcttcttgctcaaactaacggtgaagaatgcccagaattactaacccattttacagatatggcaactgaggcccagaggggtgtcaggcgatttgtccaatatttcccaactcctggctcccctgaaagcccggtgaccccgttgtgagtgggcaggcacccattagagagcagcccctggataagggcaggtcacagccccctgctcccagttccgcctgcgccgccgccacgtgtgggttgggaggggcatctgagggtgtgggggctgccacagcccgggaggtgacccctcgcagctggggcgctctgatcttcggcccacaggcccggggtgccgggaccccgccctcctgcagggccagggctcggctctccccgcccaccgcgaggcggggcgcacgctccgcggcgcggggaccgcgcgctccaggctgcacccggcctctcctccgcgcgtgcgggcccctcgcggcgcctcccgggctcgggagacccggtcccgccgcccgcccggcccgcggccgcctcttcctctcgcagccccgcggcgcttgccgcagtcgcaggcggcggagcagccagagcgccccaggtaccagtgcgggcgggagacggaggcgaccctgctgccgggtggggagggggcgccgcgcggccgctgccctcctcttcccgcggggcctggcggccccggcgaacccccgcgccgcacaggccgtgtgcgccggatcccggtgcctccgcgccagctgagacctgcctttcccaggggcggctttgctccggcccctaggcccccgccctggtaccccacacgcccaccggccgcggggagcctgctccggcccgagagcgcccattcacccccctcacccacctccccgcgttcccacttccccgcactctgacccggccggacgcccctcccctatcttgccgcccgccccctccagggggctctgctcccaccccagggagcccatccgacctctgcttgacttcccgccgcttccttcaggggcctcggctcatcgggtgcccctccccaaacttccaacccgtttgctccaggagttcctgccccatccccgagggcgcccaaatagccacactgtgtcctcctgtagtcgctgccccctgacctagcgcgacccagcgcccccgcccatgtccccccactcacctcccccggggggcgtggtgagtcgcggtctgttctcacggacggtccccgtccagcctgcgcttcgccggggccctcatctgctttcccgccaccctatcactcccttgccgtccaccctcggtcctcatggtcccagagccgggcccaaccgccaatagcaccccggcctggggggcagggccgccgtcggccccggggggcagcggctgggtggcggccgcgctgtgcgtggtcatcgcgctgacggcggcggccaactcgctgctgatcgcgctcatctgcactcagcccgcgctgcgcaacacgtccaacttcttcctggtgtcgctcttcacgtctgacctgatggtggggctggtggtgatgccgccggccatgctgaacgcgctgtacgggcgctgggtgctggcgcgcggcctctgcctgctctggaccgccttcgacgtgatgtgctgcagcgcctccatcctcaacctctgcctcatcagcctggaccgctacctgctcatcctctcgccgctgcgctacaagctgcgcatgacgcccctgcgtgccctggccctagtcctgggcgcctggagcctcgccgctctcgcctccttcctgcccctgctgctgggctggcacgagctgggccacgcacggccacccgtccctgg

SEQ ID NO: 4089 - DNA, 6000 bp, Homo sapiens
ttttaaatttttttatttatttatttgtttatttttaagacaacagagtctcgctctgtcacccaggctggagtgcagtggcagaatctcagctcactgcaacctccacctcctgagttcaagcaattctcctgcctcagactcccgagtagctgggactacaggggcgcgccaccatgcccagctaatttttttgtatttttagtagagacagggtttcaccatgttagccaggatgatctggatctcttgacctcgtgatccgcccacctcggtctccaaaagtgctgggattacaggcgtgaacaccctcgcccggcctatttatttatttatttatttatttagagacagagtctccctctgttgcccaggctggagtgtagtggcaccatctcggctcactgcaacctctgcctcccaggttcaagtgattctcccgcctcagcctcctgagtagctgggaatataggtgtgcaccaccaaccccagctaatttttttttttttttttggtatttttagtagatacggggtttctctacgttggccaggctggtctcgaactcctgacctcaagtgatctgcgcaccttggcctcccaaagtactgggattacaggcgtgtgccactgtgcccggcccctgttatcttactaacttacttattaatgtttgttgtttattatctaccttcccaactaaagtgtcagttccgtgaggataaacattctgttttgttcactggtatgtccagttcctagaagggtgcctgctgcagagcaggcatccaataaacatttgttgaatgaataaggttgccaagtctgcctgggataacagcctgctcactggaaaggtgacgatgacaacagtgatggtgctttggtgttgcagggaggagcaagttaaatctcacctataaagatctttccatcaggctgcagacacagagggagtccccagcaacaatagctcatatatgcttcagtttcctcatccgtgaagagagaataaaagtccctacttttattagcgtccaattgccctggccacggcagcattgtcggtttaatgatgctgcttcggctgtcgtagtctcttccacctcatgccttttggttcattttttaactgagttaaaggtggggctgtaggtggcactgggaatcaaatggctgaacttgtgctcaggcctgggcttgagataaaatgacccctttagtccaagcatcaaaacagaccaaggtttcaggcccccttgcctttaaatagatttcagggattattttctccagccctagaccacagctgactcctcaccgcctctccacgaacagacctcagagttttgttttctctgtctctctcctttctttctcctttatctctgtctactgaggtcctggctgtccccctgccccaccctaccctatgctcttgggcttctggcctcatctctaacttagcttctaattttttctcttcttttcctttctttttttgaaacagagtctcactctgtcacccaggctggagtgtagtggcgtgatctcagctcactgcaacctctgcctccagggttcaagcgtttctcgtgcctcagcctcccaagtagctgggactacaggtgtgcgtcaccttgctcggctaatttttatgttttcagtagagacggggtttcaccgtgttggccaggctggtctcaaactccggacctcaggtgatccacctgcctagcctcccaaagtgctgggattacaggcatgagccaccacgcccggcctaacttagcttctaattctaatgcctggtgaacctcttaaatttttttttcccaagacaaagtctcactctgttggccaggctggagtgcaggggtgtgatcatagctcactgcagactctaactcctggacacaagagaccctcccatcttggcctcccaaagtgctgggattacaggcgtgagccaccatgcctggcctgcctagtgaacttgaaggtctagcttgcggcacaggctcatggcatgcacttaacagatacggaataaatggatgaatggaaaaagccctggactgggaatagtaaacctggtaaccaaacccagctctgaccctgacctgtaagtaactactatctctggccttggtgtaccccatgtatagtggggattgtaaacacctgccctgcccaccttatgatactgctgtgagactcaaaagacatcattagctcttaggcacagggagcttggaggttaaatccaatttgtttagttttcaacaaggaagtggtgccccagggacaatgatggagagaaatcgaatgtaatgagctgttgccaccagctgagtggtcctgaaatcatggcatctgggttgcacttagagattgtccagttcaaaaggccagaaggaatctgaacctcgatgggaaaagtgacttgctcagctccccagcaagccagggcagagctggaggatggactggagtctcctggttccaggtccaggacttctttccgctgtgttgacagagccaggaggaggggcacccggggagcaggggaggcaagggctgctggatgccccatctcagttgaattctccttgagggacccagcccaggagcagagtaagagggtttgagggtggaaggtggcagggctggccaagcagtatagtccctgctgctgataaccaatccctgaaatcccgaggtggagggacttgagggcaaatcacagacatgggggacctaatgctggccatgtggctcaaccagaagtgcccgtccctcatagctttggggagatcagaagtcagggatagggtcgggtgtggtggctcatgcctgtaatcccatcactttgggataaggaggcagggggatcacttgagcttaggagttcgagaccagcctgagcaacatagcaaaaccctgttctttacaaaaaaatacaaaaattagccgggcgtggtggtgcacacctgtagtcctggctgctggggaggctgaggtgggaagatcacttgagcccgggaggtcgaggctgcagtgagctgacatcatgctactgcattccagcctaggcaatagagtgggaccctgtctcaaaaaaaaaaaaaaaaaaaagtcaggggtgctggccccatgataggtgcaatgggtgcctccaattccctctggctctgcctcccagcctctgtccaagcaacaggcagattttccatgcctggggacttgcccctggctcactgatgatgataccatcttaagtctcctggaatccttaaacccttccttggcatttgtgagcaagtattgagcccctcccatgttttaggcccagtgctgggtgctttcacctgcaatttcttacagaggatggtatttcctaaactccattcatttgctacctccatgatttttgccatatcacccaacccatgaaatacataaataaatagtatttactcaatattttgactcacttttaaaaaacataaacttatctgaaaagggaacctatgtcacgcctctaaataaacagtatcaaccaaaaatacaaaagaaacaaaaataaatacaaagacattcttggtttctggcaccaggccccagttctggctccaaccttactgagaagtcacatgatctctctgggcctcagttttctcctctggaaaatggagcttttggaagttaatgcatgcacagtgcctggccctgagactggcatggagtgagtggaagagaggttgcctgacctggctaaaattggttctctgggcagacattttcccaagggccactgagaagaccctcctgttaggagtcagtgagctctgtcgctggaggcattcaaacagagcctgcggacttctcactgcgaagttgcccagagaattcagtgctcagaggaaagggagtggttattccatcagagctggttccccaggagcgggagcagggcctgtagcacccagcctctgtccctggctcccgtctatccgggattttagcgtttcctctgtagttttcaagcactgtctcatatgactctcgcaccagcgagaggccaggggagatggtgtctgcctgttaaagaggggcaggctggtccacataggtcaagtgacttggccaaggtcaccagagcagagttttgaacttgagctgtctgactcaactgcctgggaagtgcctgcccctcctctggcatccagggagcatgtcctggggctctggctgggacatagccggacacctgcgggccctttacgtctctaaagagagaaagagggaagggcccctgtctagggggtggtttccctccagatgccacccctccgaggtccccttctgcttcttcttgcggtagccagggaggcagcccacgggcagggaagcgggggtgggggtgcagagtcagaggtgcacgtggacagagacagagagacagggacacgtgggcagagacggataaagacagagacccagagaaagccagatatgttgacagacacagagacagacgccagagaggaaggcagacaaagagacgggtggagacaaagactcccaccaagagacgcagaaggaagatgccgacggtaaagacaaaacaggagacgcgcgcaaggagcaggtcagagcccaggctcgctgagagaggaagggctgggctggggcagcccggaggcagagagaccgagagtgcggggcgggcgagggacgccagggccgcgtcaccccagcccgttcctagctccgctcccggcagggggcgccctggcctcgtggcacgaccggcccgcggggcgcggggctcgggccgggggcggggccggggccgggctggggaggggttggggccgggggcgggggagggggcgggctgcccgggcctcactcgggccccgcggccgcctttataaggcggcgggggtggtggcccgggccgcgttgcgctcccgccactccgcgcccgctatcctggctccgtgctcccacgcgcttgtgcctggacggaccctcgccagtgctctgcgcaggtaaggattcgacgctgccccgcgccctggttccccagggccccagcggacgtggtccatccccttctgcatcctccgctggccccgtggttgaactttaatggcagggccggggtctccagcgccacgccgcccacagcagcccattcgggacgccctgcaattggtcctgcccctgtcctcccgcgcatcccaagctcccggcgcgcgctctgggcgggacaggagattggacgtggcgcccgcggagccggcgaactcaggggaccgcgctcgggaccgccctgcagtcccagggtctcctacctcccgagccgctgcctgggaccctgcgctctgtctgggcacctgcccttggtgccccgtgactgagcccctcctggtgcctccttagccgtagctctagagacctgggctgccaaccccaaggcctcgtggcctggcgccctcccaggcgtcccacctgacccggtggggtctaaagcagtttggtttgggaggaggagagggcaggaggcgcttggaatggggggcgtggcgggaggagacagaggacacccgcgtgggtgtcaaagtgtgggcacccactgtgggcaccgcagctgtggggcaaagctctggagcccgcgaagccgaaggagcctgccgccccctttaggctttgcgaggtgggcctcccagggctgcttccctgcccagtcttggtaagaaagggttaaacgcaggtctcagcagaaaggcaggaggccgaggaaagcctcccccactccccattgtgccttatgactctttttcaacacataatggggtcgaaggcggggcctttacaaaggcctctgggtggagggtgaaattccttgagatcaaaagagggggcgattcttgggccaggaagggctttgggccctgggaaaaagtcagaccgctcaggtgggcccag

SEQ ID NO: 4090 - DNA, 6000 bp, Homo sapiens
ctatttctttctttcttttttttttttttttttttttttgagatggagtctcactgttataacccaggctggagtgcaatggcacgatcttggctcactgcaacctctgtctcctgggttcaagtgattttcctgcctcagcctcccgagtagctgggattacagatgcccattcccatgcccggctaatttttgtatttttagtagagatggggtttcaccacgttggccaggctggtcttgaactcctgaccccaggtgatcctcctgcctcggcctcccaaagtgctgggattacaggtgtgaaccaccgcgcccagccttctttttactttttaatgtgatgctaaccacattttaaattacatatgtggcacacaccactgtctttctatcagacgggacagtcttagacccttctgccctgactctagaggcaaagtacaaagtttaaacacattccctgtggtctgcgtggaactctcccacgcaacataagctacttcctcacttgtttctggctgggacacttcaagggcaaagtcagaacttattaccagggaaccccagcagcagcccggtggagtgccagtgccaagctccattccccttgcaactccggaaaacagctggagaaggaaccttataggtggaaaagcagagtccctaagcgggaaagcaacatgggcctcgtgttaggagtaggtctcttccaagatctccgatgactccaccttccagccagaggagagggagagatttagatgccagtgtccggaaagccctgtcccctttgagacccctcacagagtgaaccaagcctgctctgggatgtggggtgggagtttcgagacagcttgggtgggcaacaggagatccaggccgagggcagggtggctcaaggatgggtgaagatttaaccactcaccactgccccgacttgacccctcacactcctacacatctgtcttctaccagaacatcttttctacctgggcctaaaatggcacccggcctagttcgcccgcagagcgcagagccgctgggcttcagtcccctcctctagcacgtaaccatgccttccaatcttagatctcgttataggtttccaaacacgtttgcatctgtgaactcacttacgcttcacagcaaccctgtgagttgttggcattatcctcattttataactggagaaactgaggctcagaaaggtgaagtgaggagagatacatctgggagcgtctgcacatagacgaggcttgtctgatgttctttgcaattactcttcccccttccagaaggaaaagacatgggtcagggaggagttgaaagtggggaaggactgactcagaggctgccctgctctgccaagcccagctctgcccaccgctgcccccagcttgcctgttttgtagaacaaggtcccgatgtactgatgggagagggaaagcactgttcagattcacctctagggttcaggccaaacccacttggcaggtacagctagcacacctgaacagctatccaactgtcctgtaactctagccatgctcacctggcatacttggcctgcagagtgtggcccttttagacagctgctcattcagtcattcagcaaacgttcctgcagcgtctacagtgcaccaggaggacccagcgggacccagccaggaccctgccatggactctgctctcaagcagttcagaatccagttggggagaggagacaaaagaagccgcaagcatcagggattccacccatgcacctcacagggctccctgtccatcagtcctctcaaatctcattgcgcttctctttaaaatgggtgaaatctatgcattgcggggattcaatgagaaaaggcattccgagtccagcctggatggtgttcgcagtgctgtggtggagctggggaagattcgcctcagcggggagcctgccccagtcctcctctgaggctctccccacagccctgtactgcttgacccttcagggaggatggaaggtcaagtaaacagatgcaaggtcaactgtcttcctatggaactgtcatgtccccaagagcccagtgagatcacctgcccctctaagagtttcttccttcccattggcagatgggcaagttgcccctttgaaacccagaacagcagaggggaggggtgggagagagagaccccagggagagggcacacctcggctggggcatcctgggagtttcacagggggcagggagacagctgaaagcatgctgctcttagcattccacggaacattggcaaaatgaattccttattttgctaaagagctttggaatgtagagcagacttctgactcagaaccatccctcatgcccaccaagtccctcaaggactccccaggtccagaaaacttggctttcttcagtttcctcacctacagaatgggcaaaacccagatttggttggcttcacatacatgtggggatgcagatccccaaccgccagcaaagcctctctccaccaacaaatctttctgtgagcctgggatggagtaggggatgtccaggagtgcttgtgactgtgttctgcatactgtctgcatttttttctttttcttttcttttttgagatagggtcttgctctgtctccctggcgggaatacaatggcacaatcacggctcactaatggctcgctgcagcctcagcctcccaagcaatccttctgcctcagcctcctgagtagctggggccacaggtgtgcaccaccacgcccagctaatttttaaacaactttttgttgagatgaggtcttgccatgttgctcagattggtctcaaattcctaggctcaagcgatcctcctgcctctgcctcccaaagtgctgggattacaggcatgagccaccgtgcctcgccttgtctgcgtttttccgcctctcatctgcccacttctctgacaccccaggagtgagttcccagccatggattcttccatctgatgagccttgaagcacagcccggaggcctgtgggctacggccaccctactcacaggtctgcctacactatggtgttattaaaatgtttacattagctgccaaccttaaaaatcaagacgtaacacaaataagttccagatagacaactttttcttgaaaatgcagaaaactggacacacatctccaccagcaatgttggctggatctgggtacactctcctagcaggctctgtaagggtgcctgcctatctcatgtaggcatttgagtttgccactctgggtctagtccaatctgctttgtactcacctgccctcttacagcatctctgaacaatttctagctagtatctgcttaaatgcctctggtcacaggagtctcactacatcagtgaggcagtccacctgagctgcgaggaaggggctcctatggaactgtcttccccctttctgtagcaaaaaaaaagacacagaggaaagaaacgggcgttggagccaagcagctgtggatctgagtacctctctagcattcaaccagctgtgtgatctaaggcaaatgatggcctttctgagcttctgtttccttaggtgtgccagccctgcaaggctgtgtgaggcttaaactggagcgagtttataaagcccctagagcagggtctgactcagggcacatgttccccaaatggcctttctcatcctatgtaacttccagccatggctccaattctcctcaccccccagtgaccatgagagctgggaacgaaggaagaggggactggacgatggtctgtgccaggcggcagtgggaagcaatcaggcacttgctcccgtgggcatccaccctctcaggaggctgcaggtctcttgcctgcttctcggactgcttggcccaccaggtgtgtgagggacttgagggtggcagagcaggccccaggatgcagccctatatccctgtcctcccctcacagcccaaagccatccctggatgagacccctagtcctgggggatggaactggagacagggaaggtcaggggagggaaaagcagggaatgatagtccccctcactggataacagctcccatgaccggccacctggctgtgtgcccggccgtctgccaggagttccacctgggccctttcacgccaccctaggatatcgatactggtattcttgttttacagacatgaagttttagactcagagagcttaagaaacttgcctaaggccacacagcaggacacttgtcttcctggtccctgagcctgccctcctgaccactgcaatctaaggcctccttaaaatcccgtggtccctaaatgccaagttgttggggtggggaaagggagagagttttggttttggtgtttttttggtttttcacctaaaagtgcctctgagtttgccgctgagcccatctctgagcctctgcccatgaactagtgtgtatccatcggagtgtgtcaccacgcgaagcactcggtgttggggtcatgcgggcaggagcgagcatgcggtggatgtgcggcccgcgcgtgtgtccacagagggaatccctgggtgggtctggtcctggtgtcgccgggacgtcccgatggtggcttcgcgcactggggccctgagccctgagtccaagtgcgcagcgcggggcgcgcccccgaaggtgcccgccgggggagtgtgggcgtgcgcacgtgcggcggcggtggccgcgggccgggtggccgcggtgcgggctccgtgtcccccacccccccgcctcggtgctgattggctcggcgccgtgacgggccggcccccgcccggggcggcggcggcggcggcgggcgcgggtgcccgcgtgtgcgctgggagccgcgtgtgcgccggggtgtgcgcccggccgggtgtgcggagagcgagggagcgcgctccctcccgacgcgcgggccgcagcggccaagcccgagggtgcgtggcgcccccgcccgcccggcccggcccggccatggcccccgcccggggccgcctgccccctgcgctctgggtcgtcacggccgcggcggcggcggccacctgcgtgtccgcggcgcgcggcgaaggtgagcggcggcggcggggcggggcaggggcggccgaggggcgcggggcgcggcgcgcgctgcctgcggctcaacttcctttgcatggaccctgagctccaaggcggccgggatccctcggcccggggggcggggtggcaccgcggaagagacccgggattaagggacagagcggtggagatgggaacccgcgagcttgaggaagacggacaggtaccggggactgggggacagtgggaaaggacaggagacaggactgagggatgtgcagctggggacagaatactgagggtcggacgccggggacaaggggacaggactggacagaagacaagagaagaggtaaggaggagagggtacagtgaggtagggcaaggaacagggttggggacagaggacaggggggtaggcactggggttggagggacaggagaatgggggaggaggttcagagggcagaaggcaaagggggtggggacagcattgagagataggagccaggcgctgagaaacgggaccccggagagcaggactggctttgaggggaggcaggaaggaggggtgcggaatgagagtctgggagaggggtcagggcccgagggccacagtctggcgacgggctggggagaagaagggagggcaggggagttccagctggaggagaggcagcttcgtgggcagcgggagcggcttggggaggagagggctgggggatggggaggccacagagagattgaggcaggcaggccccggagagcaaagtcttgtcagagaaggctgggatggcagggtcactctggggccctgtgtgggaggaaggattggggtggggaggtgcactgagtcgttgggaccaaaaaggtctgggaaatgacttctggtggtgggggcacaagaagagctgagagggagcacctaagcctgccacccacacacccgttagc

SEQ ID NO: 4091 - DNA, 6000 bp, Homo sapiens
cacttttacaccgttggtgggactgaaaactagttcaaccattgtggaagacagtgtggcgattcctcaaggatctagaactagaaataccatttgacccagcgatcccattactgggtatatacccaaaggattataaatcgtgctgctataaagacacatgcacacatatgtttattgaggccctattcacaatagcaaagacttggaaccaacccaaatgtccatcaatgatagactggattaagaaaatgtggcacataaacaccatggaatactatgcagccttaaaaaaggatgagttcatgtcctttatagggccatggatgaagctggaaaccatcattctgagcaaactatcacaagggcagaaaaccaaacaccgcatgttctcactcataggtgggaatggaacaatgagaacacttggacacaggtggggaacatcacacgtcagggcctgttgtggggtgggggcagtggggagggatagcattaggagaaatacctaatgtaaatgacgagttaatgggtgcagcacaccagcatggcacatgtatacatatgtaacaaacctgcacgttgtgcacatgtatcctagaacttaaagcataataaaaaatatatatagtaaaaaaaaagaaattccccctggcctggcactggctgtagggatggtttgacccacaaatggccatgtgaccccatcaatcctgcatcagtcagcaaagccactgggatgggagtcagagacttgggtacaccgagaggggatgtctattctatgttttctctgggctctgccactcagtgtaacatgtttccccccttcaagagccccactacctttcccctcaggaagaaggagcctcagggaaagcaaagggagcctagagctcattggcatcctctggtatggctgagatcctcaccaaggtcctgttgcccccactgaatccacgacaaagagagggctgaaagtggcctcagagaaaccaccttggccaatgccctcatttggcatttgtggcaagtggggcccagagacggtgagtaccctgcccaaggtcacacagtaagttaagggagggctagggagttaagggagtcaagttaagggaagcaagttaagagagcccctggtgtctccatctaggggctctagaggccagcccagccccacagaccgggaggatggtggcatgggttaacacatggggtcccccaggccctgctcagccaagttcatgctatttcctctacctccaatctatccagtctcaacttataatcctccatgactcccccattgaggttaaactacaatccatattctccctccctgatgtaacctcctccacgctccagttgattgccgtacttcagctcctattcccagagggtacccagtgtgttcccacctcagggcctttgcctctgcagtttcttccacctggagctctcttcccacatgttggcatggtagactcctcgctgtccagcttttagctgccatgttgcctaagaggccttccctgattcccctggccagagcagccccctgccctccgtcaatcactgccccatcaccctggtcattatctttctcgcacttaccattatcgttattagcttgtccctatataggtctctctgcagcagaatataggctcccagagagcagggccttgtctggcaggtccacagctgcgtccctgcctcctcagtgcctggtatgcaggaggtgcccaactaatgtttgtcaatcaactctgattgaaagagacctagacaagacaggtcactgaagcctcactccagctgcaccaaaaacaaacaaaaaaccccaaaccttccacatgtctttgggcaagtggcccctctttgggccccaatttccccgtctgaaaaatggcgttccctggctgccgggctggctcgcaggataggctggttgaattagcatgagtcgagttgatgggtgtgaacgctgctttgtaaactgttaaagcgtgattgcaaattcgagtagctgttgtcattagacaaatgaagcttaaaccgcctcctcctctgctgaggaggggattgggtcagatgctccctggggcctcctgccctggcagtgtacagtatagttttgcatccaggcactgccctcatggagctcacagtcggctggagttgtagagataacgtgcaaatcagaaacaatccatcagagaaaccagcaatggaccatgtggggctgattatctttcagggaacagataataggcaaataggtcagtcagagaggggtgaggcgaatgtcaattaagctcttggtgggggctggggtgaggctgaatccaagtctttagagccaagaaggcaaccaggtggagtgcacagctgggacaaaagcacagctaaaggcggttgccaagaaatcagggaggagagcctggccagactgcagaacccagccaccccaaatggggaataaaatactgtttagagagaagaggatgtgagagaaggggaacttaattatgatcagtaattttctatttttgccaggtaaaggccctggatagatgtctatttcatcagataacgttgggtgagtcactttcctttttaggcctcagtttccttatctgtgaaatagcctgtgggaagagccctgagctctgtgcttctgtgaaaggtacaaggaggtcagcactggggtcggacggacatggggttgaatcctagcccaatttgccatgtgactttggacaaattacttatctggtcctcagtttcatcatgtgaaaagatcagcacctggtgcacagagtaggaaagattaagggggacaagaaataaacaaagcccagcctagtgcctggtaccatgtcctcaataaagcagagtcactggtcttcctattttgagacaaaaaggaagtaaccactggccctgggtaggtggagtcaagggtcccaggaaatagaaacaaagcaaaaaagctgaatctgcacagtacataataggtgctcaataatgacttcttgaatttggaagtgtctagcacctggatgcactggagggggccagagcttagagctgctctgtccaggagagggaggattgcctcaagatgggccaagcttggggtccctcaaaccctgggtctcctggaaggtctgacaggcaagaactgaaaataaaggctagccccaccccagtggatcttgaccctggtgaggggtctgtagacttaaaagggggaatcttcgtttctcctctctccctgctcactcaaataggaacggtagtggctctgccagccccaccccactggctcttgaccctggtgaggggtctgtaggcttaatagggggaaatctcctgtttctcttctctccctgctcactcctgttctgtctccctcccaggctgcctcctcctggtggccttccaggatgacacccatttcaactggactcttggagcttcaagagacgacccaactttccaaaccttagatggattcccaaagcctgtggtaccccattttcttggtatggactgaaggggagggattgctgggacattttgatagtatgtgggacaaagggacacaggagatgtgggtagcatagacttaaactgccttcgacttaaaccacctgctcctgcactgggctcctccactcactccacagagttccgagctcctgatgaagtctcctcagtcaggagtgggctcccaactgccaggggttcagcctgggtgattgccgcaggccccctgcagccgcccaccatccagacttcagtaaagtctgttaatgatgatggtgatgaaggctgtcagagcagggcagggcccacagggttggggctagggttgtgttctccctgaagggacggccatgcacaaaaccacggctgcacagacaggtccattccacagcgtgggggtggctggggctttccccagattcacccatggacttccttcaccccatccccaaactgcactgggagcaagatcaacagagaaggagaaatctaatacagacatagacgagtctgcagtgaggggctcgcgggccagctcagaacaacggggcagggaggggaggcctggggtctgcctgcaagggcccagcccaccagtgccgagtgaccaccctccccccagccccaccccaggccctcgggtagcgccaaggcccagtctcccactcggaggccccggcccagccccggtgcctgggaaagccgcctgttttgttcccagatgccacccccccacacacacccttttttttttttttccattcattgcagttcggtccctttcgaagccgcagggacccgggtggcagggctgaggcgagggggtgggactccctgccctgacaggtagtgccggcccccgctttgggaagccccttcccccgccctcccctccgtccgctctccctgcccctgtcagccgcgccagacgctctccggctttgcagcattcaataaaaattgagaaacatttgggctgaaatcgctgctttatctggaggagccacagcgccgggagagaccactgctgcgcggggggagcccggggtctcagtggcccgggcacgcggggtcgccgcgctccagcgcccgcgctgcccccgggtgaccctacgggcgcggtgtggggacccgggctcgcggcggcgcgcggccgccgggggccgggacgcgcgcggggggcggtggcctggcgaggctccccccgcgcccgcggctcaggtgggccgtgcccagcgctggcggagcccgggtccccgttctgcccgggctggatggctcattctgctggctgcgcggtggcggcggctgtgtgtgcgccgcgccttgccgccccccctggccccccgagcccggggcgcgcgctcccgcccgggccgtccgggccccgcggcgccgcggcccgaggccccgggaagcgcagccatggctctgcggaggctgggggccgcgctgctgctgctgccgctgctcgccgccgtggaaggtgagcgagcgggcgggcgggcgggcgatgggggcggggagcggccgggcacgggcggccgccggcgcccacctccgctccgcggcccgcaaagtttgcccgggggccggcgccgggcgcaggtggccgcggggaggtgtgtccggccgcgccgggaggagcgggccccgcgggcgcccggggagcggcgggcgctgattgactgtgccaggaggaggcgaagggaccatcttgccgaggctttgtagccagcccggcgagcgccgcccagggctgggggctgcccacgcgcgctcgccgcccccggctcgggcagccgcctcgcgccggcctggtcttgctccgcacagggtggaggggcgcgggcccggccgtggcggggggcggggggggcgccggcgctcggtcggggctggaaagtttggcagggagcagagggagggaggcaccgcggccggccggggtgggggctcccggcccgcgcccccgagatggggcccggcgccccggagagcagggactggcagagtggaagggagcgcgccagcccccgcgtcggtgcctgcccatcgcccgcggcgtacaatggggtcccctccccgagaggactgcgcgggggatgggtctgtgggcatctctccgccgcgcaaggtctccgggcacccccgccggccaccgccccgcggccgcggcgctcagcgtggcggctggagccccgggaactctccagctgccgccggggccggaccagatgctcttgccatgtgttggccttggccagggtcgcgggccctctccccgtggcctcgtgtattggtaccactcgacccccaggggggcaagggtagttgctaggtctcccgagccagcttgctctggagggaaagttagtgcggtctgggtgtgtccaccaggaatggccgagcttgcagggcaagaagcgaacgtgaataatg

SEQ ID NO: 4092 - DNA, 6000 bp, Homo sapiens
agactagcctggccaacatggtgaaaccctgtctctactaaaaatacaaaaattagccaggcgtggtggcacacacctgtaatcccagctactggggaggctgaggcaggagaattgcttgagcccgggaggcagaggttgtagtgagccaagatcctgccaatgcactctagcctggctgacagagcgagactctgtctcaaaacaaaaacaaaaacaaaaacaaaaacaaaaacaaaaaaaacttgccagatggaggattttatatcttgctttacagcagcacattatattttctttaccaaggcaatgcattttccccaataattgctgccttttcaaaaagacctattatatgccaattacttgacatattaataagcctcaggatatctatacagtaggaggaaaaaatttcagcaagtttaagtaacttgatcaggagccatggctagcattggtggaattgggattggagcccaggttgtcactaagctccaagctttgttctttacaccaccatccaagcaacttcagatgctgcctacttgctaagatagagtggcagacctctcggcagaagaggtccaaggaggaagcccgcttgagccaccatgcctcacttagcacactgtcaggcccgcagaatcttacttgactgttttatgaaagggctcctctctgctatgaggacaagatggttgattttttttttttttttgagacagtttcattcttgttgctctggctggagtgcaatggtgcagtctagctcactgcaacctccatctcccaggttcaagtgattttcctgcctcagcctcccaagtagctgggattacaggcacccgccaccacacccggccaatttttttttttttttttgagacagttgttgcccaggctggagtgcaatggcgcagtctcagctcactgcaacctccgcctcccgggttcaagtgattttcctgcctcagcctcccaagtagctgggattacaggcacccgccaccacacccggccaatttttttttttttttttttttttgagacagttgttgcccaggctggagtgcaatggcgcaatcttggctcactgcaacctctgcctcctgggttcaagcaattctcctgcctctgcctcctgagtacctatgattacagacaggtgccaccacgctgggctaattttcatgtttttagtagagacggggtttcaccatgttggccaggctggtctcgaactccggacctcaggtgatccacccacctctgcctcccaaagtgctgagattacaggcatgagccactgcgcccggcctgaaaatttttttaacttgtctttcagtgttttaaatctctctaatgctagccagcctaggattactcttttccaaaattaaaatacctttaagttattttcattataaaaatagaccagactgggtgcagttgctcatgcctggaatctcaacactttgggaggctaaggcgggaggatcacttgagcccaggagttcaagaccagcgtgggcaacctagtgagaccttttctctacaaaaaataaaaataaaaaaattagctgggcatggtggcatacacctgtagtcccaagctgaggcaacaggattacttgagcccaggaggtcaagactgacagtgagccgtgaatgtgtcagggcactccagcccgggcaacagagtgagaccctgtctcaaaaaaaaataaagtaagggctgggtgcggtggctcatgcctgtaatcccagcactttgggaggccgagacgggcggatcacgaggtcagaagatcgagaccagcctggctaacacggtgaaaccccatctctattaaaaatacaaaaaaaattagccgggtgtagtggcgggcgcctgtagtcccagctactcaggaggctgaggcaggagaacggcatgaacccgggaggcagagcttgcagtgagccgagatcgcgtcaccactccagcctgggcgactgaacgagactatactgagtagactatacttgctgcaaaaattcaaaaaagtgtacggagcagatgagagcctccttgcccatcctcctcccctagtatagccttgaattcatctcccaaacagaataggatgggtcttttagttactctcgcagagggctctgtagtgctgataagagagctgaggagcccctcttaggttttcagatgacacgtcaggctagccttatatttaataatttaaatttaataataattatttcagttttcaagaaacttactgaatctcacctatgtgctaaatgttgctgattgaagatgggtaaatagcctctgaccttagggatctcattcctgtgttgaacactcgtgtgtaaaccaagggttacaatggtaatcccccagtgaatacatacagagtaccaattttagaagtggttgaaaagtttttttaaaaaatcagagaattacacatgtataattagctgctcatcctagaagtcatatatccagaccaggcgtggtggctcatgcctgtaatcgcagcactttgggaggctgaggcgggtggatcacttgaggtcaacagttcgagaccagcctggccaatatggtgaaaccccgtctctactagaaatacaaaaattagccgagcgtagtggcgcatgcctgtagtctcagctactcgggaggctgaggcagaagaattgcttgaacctgggaggcagaggttgcagtgagcccagatctcgccattgcactccagcctgggtaacagagtgagactctgtctcaaaaaaaaaaaaaaaaaaaagtcatatatccaaatgtaagagtactttgcaggtaagcctgactcagtctgacataggggtggctgtctgggagcagcacacccactccaggatcccccagaagcattcgttgtttctttctgtttttttttggttttgttttttctgttgcccaggctggagcagtggtgcgatcatggctcactgcagtcttgatctcctgggctcaaatggttctcctaactcagtctcccaagtagctgggaccacaggcacgcaccaccatgcctggctaattttaaaatttttgtattttttgtagaggctgggtcttactacgttacccaggctggtctcaaactcctgggctcaagcagtcctcccgtcttgacccccaaagtgctgggattacaggcatgagccactgtgcccaacctcattgtttcttttcattttggttattgagctctctctggataacatctgcagaatgtttcatgtgtcccgagtatgtgccaggccaattactcagcaattctgcttcaagaatcagtctgtattccattacaccagtggtacattttcaaaatggaaggaatataaaatgtaaaagtatttgctacgcagaggagggagacactactgctgggactagaatcgaagttttctcacacccagttcaatgccttttctacaacatccctcagttgagccttagggtaccaagtggatggtcattagtcttgtatggactttatatccaatgctgattataaggtctagatgatgctaggtggcagagattcaaagttggacaggtcggttactgtacttgataaataaacagcccagtggcaagacagataaataaactgaccatttacaccctgaaaaggtggtcagttgcttagggaactgggggaggggcgccaaatggaggagtagggacatggtagagagggcttttcagcatagtgagtgaatgaatgctcatttgaagaaacaacttgtgtttaagatgtttttctttcttccagagctagaatctggaagaatctctgggctttcctgctttgagggagagatcaggctaggtgcattgccaatttgctgctgaagatctgattaggttctgctttgatgtgatcaaatgagatgtaatcagtgctggtactttaagtgagtttgcaactatttagttgctctttttagtagtagtattagtaatggtaaaacttagtgcttttaggatgagagtagacggcctgaagaataatatcttgggctcttctaatcaagccatacggctcattggcaagtcatcagaggaaacatctatctatctatacattcatgcaataagtatttatttagtgcctatgtgccagacactgtttgtggggaaaacaagacacatgggctattattgcctcatggaaggaactaagctgtttggattttgaaaaatccctttctctgggcctcaattcctcgacctgttcagaaatgtgcgctcacaatggtcctagacatcttagattcaggttccattttcagttctttcctgtcctgcggccatctgcaagttaatttggtctccctgaacctcagtttcctcatctgtaaaatgaagatcatacaactcgtttcatcaggttgtactgaggctggaaaagatagtctaactactgacgcatcgtgtgctcagcctagggtggctgctaccgcgggtgcctgcggactcctaggacgggcaccagcccgggacccctgacaaggtgttgattagggtgtggctaagccccaggcgggagaaagcgttggcatttataaggccagggtctggcgcggtggcctcattccgtcttgaagtagaccctggagaggtcttccaggcttgggctcagcacgcgagcacagggagcgggggtgccggcggcggaggcgcgtacggcccgagcagcccccagcccccagcgcgcacacttgggccaggggcgcgaggagtgcgcggccgccgggtgggcgctggggagcgggccctgggggcggagcctgcagcccaccgccccccacacaccccagccgaggcccggaaggggccaggcgcgcttccgtctccgccggggatgcacggagggcggagctgcggcccgaggacgcgacgcgagcccagttccggcgaggaggccgcgccagtgacagcgatggcggcggagtcggcgctccaagttgtggagaagctgcaggcgcgcctggccgcgaacccggaccctaagaaggtaagcgagggggcggcgcgtagcgggatgggcgttgggtcggtgagggccccgtaacggtcgcggcccgagcgtggcggggttcgggggctgggaccctgagccaggccccgcggggctggggtcgtgaagttcgcggccattgaccgctgcccgcgcgttgggaccccgtgcgtcgggcgtcgggacgcggggccccggccgctccccctccctcacgggcccgggatgggggcgcgcccggtgcggacaccgcgtgcctagcgcttcctcccagaggcgctccgtggcgtcccgagccagctgtttcctgcgggagagcgtgcccggggcgggagggcgctggccgccgcctcgttggcctcccggtgcctgcgctggtgcccggctccccgcggagcggcgcggactccccagcgggtgcgtgttcgctgggaggagaagacgggcgcccgaacgctgcggagcctggactcgcggtctggtccgcgcctctcggagacgcggttactactctccggctggatatcagagcgtggacctttcgctttctcagtgaatccctttcaaaacagaataaagcctcgcgtcacctaagcatactcctgaaaacttaggttggaattgaaaaagaggcgggggcccggggttggaagtcgcagctaggtttccttttggccattaataggaaggtaagagctaccgtttctcgttgttcgagtgatggacaaccatttttaattgtagttaactagtttttgttgtttattgtacaaactgaatattaagttaaacgcgttcttgtaccttttcatctttctgtcactcacttctctggtctccaggagacagtctggtggttgtcaggatttttttttttcttttttttttttgaggcgagtcttgctctggtcgcccaggctgg

SEQ ID NO: 4093 - DNA, 6000 bp, Homo sapiens
ctcccagaggtggagctgcggggggcgggaacaggcacggagaaaataaacaagactaaaaagtcctgagtagcgctgtgtggccgcaaacctgaacccaccttttgcaccacgcgggacccggcacgcttcctgccacccacccctgagagggctgcgcggccgaccccagtactagaaaacactcgtcacctcaatcaagacgggtacgaaggccaacggacgccttcctttagaacgctcagcacacagagcaacttctcacgcctactctcaaatggcgtactccaaactagcactcccgacgtccagctgtgaacccagagcggcggaaagcccctgaacccagcgcccgggcatgcgcagacgcgttgttgtggtgggcgtggctccctccggacccggcgccccgccctccgccccgtgtccgcatgcgcgactgagccgcgggggtggtactgctgcatccgggtgtctgaagatccgatgaaataacatatgcaaaatgattgggtccgtgattggcattccagaaatggtagctgttattcagccaacaaatatttattgagcacctactatggacttccctggtgctgaggatacaacagcaaccacagcagtcaaaagtccctgtcttcatgttgctcagattctcataggggaaagcaaataatgaacaaatacacggccgggcgcagtggctcacgcctgtaatcccagtactttgcgaggccaaggtgggcaagtcacctgaggtcaggagttcgagaccagactagccaacgtggtgaaaccctgtcactactaaaaatacaaaaattagcgcggtgtggtggctcatgcctgtagtcccagctacttgggaggctgaggaaggagaatcgcttgaacctaaaaggcagaagttgcaatgagccaagatcgtgccactgcattccagcctgggtgacagagtactccgtctaaaaaaaaaacctaaatacacaagtaaaaatatagacctcgtcagatgctagtaagtgctgtgaaggaaactaaaaggggaacacaaggaacccttgtcaaggggagaagaaaggggagttgatgctgtccttttaaatagggcagtcagaggccgggcacagtggttcacacctataatcccagcactttgggaggttgaggtgggtggatcacttgaggtcaggagttcaagaccagcctggccaacctggtgaaatcctgtctctactaaaaaaacaaaaactagccgggtgtggtatcacgcgcctataatcccagctactcgggaggctgaggcgggagaatcacttgaacctgggaggtggaggttgcagtgagccgagattgtgccattgcagtccagcctaggcaacaagagcaaaacttcatctcaaaaaaaaaaaaaaaaatagggcagtcagggaaaactttcctgagaaggggatggtggaggatccagggaggtgaggtggggagcaagccagtacagttgttccttgactttcgatggggttatgtcctgataaagccatggtaagtaggaaatattgtaagtcaaaaatgcatttaatacatctaacctacggaacatcatagcttagtctcacctaccttaaacatgcttagaacacttacattagcctacagttgggcaaaatcctctaacacaaagcctattttatgataaagtattgaatatctcatgtaatgtactgagtactgtacggaaagtgaaagacggagtggtgggatgggaactctaagcgcggcttccactgcatgtgtgttgctttcgcgccatcataaagttgaaaagcgttaagtcaaaccatcgtacgtcggaggccatctgtatctggtaggaggagtgtttcagacagagagaacagcaggtgcacagagtgcttttttcccagcattttattatgaaaaatttcaaacatctaccaaaaaaagttgaaagacttgtacagtgaaaagccatacatctcacagctagaatcaacaattaacattttactgtatttggtttttgacttatctatcctagatcccttgtgctttctgtagcaggtgacctgccttgaagatttaaagacagaatatcaggaaatgtagtcagaaaatggggccttttataagagtcagaggggaagagcaaaacctctgcttttgacaaatctgttgggagaggccaactgcagggatacctcccttttttaatgaaagcatttctgttctgcgaggagcgggatcctcttgtcaagcagtcagtccctgctgcttccttactggggcaggatcaggacgcacagggatttggagtgccttggaaccaaccaccacccacgccgtttgccagctggtaaacatgcccatcaggtccgggggttggcattgcctggacatctttagtgttcatcttgctgacatctggtgccctcgggcaggtaggtgcagttggctgcctggtttacagagcttgtactgggcccaggttagcagaggtcacatccatttatcccactgcgcagaggagttccttctcaggaaacccagtttataagaagtactgactgccagaaatagagcagaaatgagaaccaggaggcaattgtgagaggaatggagacttctgacctctggggattggggtaccctcccccttaattgctgttggggtagcagagggcttagaagcccatgttcctagacttttagaattggaagaagacttagaagtaatctaggctgggggtccccaacccccaggctgtggcccgttaggaacctgaccgcacagcatgagggataggccagcgagcactaccgcctgagctccgcctcctgtcagatcagcagcggcattagattctcataggggcacaaaccctattgggaaccgcgcatgagagggatctaggttgcgtgctccttaggagaatctaactaatgcctgatgatctgaggtggaacagtttcatccccaaaccatccctccaacctcaccccggtccatggaaaaattgtcttttacaaaacccgtccctggtgccaaaaagcttggggacccctgatctaggctacagttaagtggtcaaacacccaggtcctgaagttaggctgcctgggtttaaatcccagctctactgcttactagccctgtgaccttgagcaagtcacttagtttttctgtgcctcagttcactcatttgtaataaatcctaatagtacccatcccagtgtcatgaactaagttcatatatgtaaagtacttagaatggtgcctagcaagtacttaataacagttagctctgaaaatgtataaagcaaaattaaccaatgttttagtggtttgcagccaacttttttctatgcgtgtgctaacatattattttataagagtgggaatatattgtacatgctgttatataacttgctttttcactaaacagtctatcctctgtgtcagttttgataaaagcgttttcctcttgcttttcctgcatatgttcagaaccatcatattggtagcaagtttcatgtcctgtagttttcttaaccaaccccctgctagtggacatttaggttagtctcagttttttccttctgtaaataaagctgcactgagcaagaagtgactgatgccaagtgactagatgaccttaggtatgacctctctgggtcttggtttcttggtctaaaaacaaaatgacaggattcgactgggtgattaaaatctcctctgatctacataggaattgttttcaagacatttctgcattcctctagtgacagggtgctcactacctcatgagtatttcagtggacaactgtaatggtcaataaagtatccactttccacctccctgcagctcctggccctggctttattctctggggctccacacattcagtttacactcagtggccagtggctgggaccattgtagaaaataaggaaactccaattccttccttcttttcttcctctttcatctcttcctccctctctacatccctctctctcttccttccttcctcgacacttaccatgtaccagaccttctgccaggcacatggatgggagcacaggggaagttggctgcagggttagaactaagtcccaagccccctaaagctcatgccaggggactggactgtccagtactgagggatggggatgctgaggctggtggccttcctcaaatgcactgtagtgccccaggcagagtcctgggctgccctgtgaggaggtgaccagaggtagagcaacttcaccctaaggctggatcaggatcccctccaggtttttactagagccaaacccacatctcctttctcttctgccacccccccttaaaatgcttagaaacacatagatttaaatacaaattcaaatgtaagtaatttcaactgtgtaactatgaggagtcagttctacgtgggtcctatctgtatcctccccagggctcagctccattctttgctttcattcattctcattcaatacattgttgttaagagctcactgggtgccctctctgtcatgtagtaaggttttaaaaagaaagcctcttctgagcttcagtttccttattcataaaataggagtattgatccattccttgcttttcttacaaggatatgctgaagatgactgaagtacagagtaaagaaggattatgtttgggtgtcaaaggaatagaatgccctctttcaaactgagcacagcaggaacctgtaacaggaacacagcaacttgttgaatgaatgacaatattggaaaacatacatttcctcccctccccatcatagtccctctgcttccgtgttaactccatagagaggccagcacaaccagccttgcagcctgagataaggcctttggcgggtgtctcccctatcgctccctcaagccctcaagtaggtgttggagagaggggtgatgcctggtgctggtggaacccctgcacagagacggacacaggatgagctctaagtacccgcggtctgtccggcgctgcctgcccctctgggccctaacactggaagcagctctcattctcctcttctatttttttacccactatgacgcttccttagaggatcaaaaggggctcgtggcatcctatcaaggtgagagttcattggaaaagtggtcacaggagcaaatagcaggggcaggggcgggggaggcctgtggttctccaggggcacagatgttcctttctacaaaatcccaaggaaaaagattcccccatcttcttccgtagattgcaccgaaattcagccaacaatgtaagctttcctttagaagcagcctgggcatgccctcttctgtgaagcctgccttgatttttcagcacagtgagaggcatcctctttggtgttcctcaaattccctctaccaaatggtcttcataattctctgcttctctgcttccccttctctctcctcagtggcaaggaatttttttatttttatagatttaggggatacaagtgcagctatcttatgcaagcaatttcatgttgttgggtttttggtttttgtttcctttttgtggcctctcgctcatttcttatttctttttgaggcagggtctcactctgttgcccaggctgaagtgcagtggcatgatcatggttcactgcagccttgacctcctagtctcaagcaatcttcccacctcagcctcccaagaagctgggaccacaggagggcaccaccatgcctggctaattttttttttttttttttttggtagagatgtgggtctccctgtgtttcccagactggtctcaaactcctggacacaagcgatcctccagcctcagtctcccaaagtgctggaattacaggcgtgaagcactgtgcccagctctcttgctcatatctatactagttttcttttggaagcttcagcctgttgctaccccccacccccacccccaccgaccccagctttcttctcacttaggggctgg

SEQ ID NO: 4094 - DNA, 6000 bp, Homo sapiens
gaaggaagggctctctgaagaggttaatatctgagcagagacttgaatgaagtgaagaagtgagccatgtgggtatggggaatacaacttccaggtagagaagacaagtgtggtgtgtatcacggtcagcaaagaagccatgtgacagagaagggtgggccagggagagacggataagtgatctaactcctgaggaggtggcctggccaggagctagagcatgaggatctcgtaggattttattctgcaaggtgaaaagccattgtattagtctgttcacaaaccccagactaggcaatttacaaaagaaagagaggtttaatggacttacagttccacatggctggggaggcctcacaatcatggcgaaaggcaatgaggagcaagtcacgtcttacgtggatggcaggcaaagacaaagacagcttgtgcagagaaactcccccttatagagccatcagatcctgttagacttatcactatcacgagaacagcacgggtaagacctgtccccatgattcagttacctcccactgggtccctcccacaacgcatgggaattcaggatgagatttgggtggggacacaaccaaaccctatcattccacccatggcccctcccaaatttcatgtcctcacatttcaaaaccaatcacaccatcccaacagtccctcaaagtcttaaatgatttcagcattaactcaaaagtccacagtctaatgtctcatctgagacaaggcaagtcctttccatctatgagcctataaaatccaaagcaagttaattacttcctagatacaatgggggtacaggcattgggtaaatacagccattccaaatgggataaattggtcaaaacaaagaggctacaggcccatgagagtccaaaatccagtggggcagtcaaatcttaaagctccaaaatgatctcctcttgactccacatctcacatccaggtcacgcagatggaaggggtgggttcccatggtcttgggcagctctgcccctgtacctttgcagggtacagcctccctctcagctgctttcatgggctggcattgagtgtctgcaacttttccaggtacacggtgcaagctgtcggtggatctaccattctggggtctggaggacctcttctcacagctccactaggtggtgccccagtagggactgtgtgtggggtctctgaccccacatttcccttctgcactgccctggcagaggatctccatgagggccctgcccctgcagcaaacttctgcctgggcatccaggcatttccgcacatcctctttaatctaggcgaaggtttccaaaccccagttcttgacttctgtgcactcgcagtctcaacaccacatggaagctgtcaaggcttggggcttgcactccccgaagctacagcccaagctctaccttgcctcctgtcagtcatggttgggagtggctgggatgcagggcaccaagtccctaggctgcacacagcatgaggaccccgggcctggccaacaaaaccattttttcctgatatctctggacctgtgatgggaggggttgccataaagacctctgacatgccctggagacattttccccattgtcttgggaattagcatttggctcctgttactcatgcaaatttctgcagccagcttgaatttctcctcagaaaatgggaatttttcttttctatcacattgtcaggctgcaaattttccgaacttttatgctctgcttcccttataaaactgaatgtctttaacagcacccaagtcacctcttgaatgctttgctgcttagaaatttctcctgccagatactctaaatcatctctctgaagttcaaagttctacaaatatctcgtgcaggggcaaaatgccgccagtatctttgctaaaacataacaagagtcccctttgctccagttcccaacaagttcctcatttccgtctgagaccacctcagcctatggactttattgtccacagtgctatcagcattttgggcaaagccattcaacaagtctctaggaagttccaaactttcccacatttgcctgtcttcttctgagccctccaaactgttccaaaccctgcctgttacccagttccaaagtcacatacccatttttgagtatctacggcagcaccccactctactggtaccaatttagccactgaagtagttggagaacagaagtaatagactctggtttacattgtaaaagcttctctgtggctgctgtgtgaagaaaatatatgagaatgaagccccaagatgaagcagggacacagttgcagtggttagagtaagaaatgctgctggctggcactgaagtgatagcctggaggtttgtgtgtgcacatgcatgtgtatgtgttttacgatagtaggcccaacagatactgtaatccacacttgtttttttttttttgagacagagtctcacctgttgcctagactagaatgcagtggcacaatcttggctcactacaacctccacctcccaggttcaaacaatccttgtgcttcagcctcccgagtagttgggattacaggtgtgtgccaccgtgcccagctatattttttgtatttttagcagagatgggattttgccacattggccaggctggtcttgaactcctggcctcaagcaatcctcccaccttagcctcccaaagtgctgagccaccacacctggccgcaactgatttttaatcatgaaatgacacatacatttaaaaaacccaatacctataatattcctggctagtactcttcacatctatatcatcaaaaacaaagaaagtatgtgaaactgacacagccaaggggagactaaggagacataacaattaactgtaatgtggtattctggaggggatcctggaacagaaaaagacattaggcaaaaaactaaagaaatctgaataaaatgtggatgtcagttaataataatgtatcatattagtccagtaattgtaacaaatataccacaataatgaaagccattaattatagggaaaatggaggggttaatatgggtggctggcttttgctatttctagcagctccattttatctacaaaagacaaacattcattaagtcccaaaaaggtaaagaatgacaaattaagcatgtatcttattagtaagagtaatataaagatgctcactcatatttataaatatttgacaatcatgttaaggccagaaaagagaaaaaagggtaggggcaaaaaacgcaaagagaaaggagttagtatcttttctcccgcactcattagctattaaaagaggatgtttgtttaaagctgctcagagctggtaaactaatgttaagtcactaacgggaatttaaaaggtttcattaagaactgcctgcactagattcctccaccctgagacattaaacaatcacgataaacctcctgagtggtaagaacgtgtccatttaaaaacaggctatagattgtcatgcagttttatctactaatcggctaatgcaccgccaaaaacaaacaaaaaaacccaaagggatgaaagtttcatccatcaaaggaaacaacagtcaccttggttcccatcccactcatatactgccgccgtacatgtcaatcagatgaacctgtgcgtatctcttaacgacaattgacccacctttttaactgaagtgaaggggggttctgctccgcgaccacttcctggatctctcccttcaccctctgtgttctttcgggtgcaccatcgggtcaaagccgcagcaacgccgtctctgtgtgatcgcatgtgcccttctgcacacgaccttcccccgagagtgaccagctaccggacaggcaccaaggagggctaccgagcacctcccggaccggcggctgcaggatcgcgagcgcctccgctagggagaccgcacgttgcgcctgtgcttcctgcggtggcgccttctgcaaggagacctcgaccctgctccctctccggggctggatctgactccttgacggtgattccagacgcgagacccaaactgacggcttctagaagaggggcgagcccggccgcaagtctttcacgtagctaagtcatcgttgcttccggcttcttaccgttctcccctttgtaaacggttacctcccgaaaacccaggctctcctccaacagtggttctcaagcgaggcgatcttccccgggaggggatatttggcaaagtctgggggcatttttggttcactggggctgctacttgcatccactgggtagaggcgggggatgcagctacacaacctgcgaagcacgggacagcaccctccccaacccagacagaattagccggcccaaaacctcagtagtgcccaggctgagaaaccctgccttaaacaaacaacaaagaaaggccaagtcccataagtgggtcaccgcgccgagactggggtccacgggacaccccagccacgccaagccgggaagtccccgcctcctggagctgaacccgcccctctcccagaggtggagctgcggggggcgggaacaggcacggagaaaataaacaagactaaaaagtcctgagtagcgctgtgtggccgcaaacctgaacccaccttttgcaccacgcgggacccggcactcttcctgccacccacccctgagagggctgcgcggccgaccccagtactagaaaacactcgtcacctcactcaagacgggtacgaaggccaacggacgccttcctttagaacgctcagcacacagagcaacttctcacgcctactctcaaatggcgtactccaaactagcactcccgacgtccagctgtgaacccagagcggcggaaagcccctgaacccagcgcccgggcatgcgcagacgcgttgttgtggtgggcgtggctccctccggacccggcgccccgccctccgccccgtgtccgcatgcgcgactgagccgggtggatggtactgctgcatccgggtgtctggaggctgtggccgttttgttttcttggctaaaatcgggggagtgaggcgggccggcgcggcgcgacaccgggctccggaaccactgcacgacggggctggacgtaagtgtcgggcggggagtgggggtaagagagtagcggccgcaggctggagaggcctcggagccggggccgtctgacgggctggtgcccacagcacaggctcgttgccgccaccctcccggaagccgcagacccgggctgagccgccgcggacctctcctctcctgggtccggcggcgccaggagaaggcgacggcgtccagaccccgccaagacggagaggggaccgcgccctcccccgggacaccccaggatccctggaaaatcccccgatcccccacttcacagctggacaagccgaagccccgagaaaggagcgtgacccggccagctccctcagcgaggggtgccccggctaaaggtggctcccccatcttccagcggcgtccctcgagacctaaaagtcccagagtttggagggcggggtctggcttgagcgtaccagtcgtcgtgcaaagaaaaatggattcggggtggggccattgggatgaaccgaaaataacacttattgaattgcagttcttcccggggaagaatcaaatgagtgaatttcctaaattgaacttgtcccaaaggcatcttagcattggctgtaatcatatattttaatatttaatttttaaaagagaagttaaaaatgggagacgttgctctattgtagggtgtcatatttttggacaaccataattgctggctacaaagtatcttaaggaagtcaagttcgctgtaggagtttgggtgttgttattcgcaagttatatgtatttcaggctttttcatactctgaaatagagataacatggctgtatctcaggtctctactgctcggcttacaggaatgttttatataatttgtaaagacagcttgggtcggctatatttaaatagcagttggatttttgtaatctgaattactattaa

SEQ ID NO: 4095 - DNA, 6000 bp, Homo sapiens
gggaggtgacttgctcaggcctgcacacctggcaaagaggtgtgcagcaggtcacagccaggcttgtctgcctccaacgcccacattccctgtttcctctgcctcagggactgggaactgcccaacaggcaggacctcctattcaacttaccttgtgcagcaacacatggtattggcccaggtggcactttttggggtatttggagatgataaacagcaaaacagggtctgtgtgtgtgccattgattcaaagggcgtgcgatgtgcctctgttgaccctattcatcttcacccttgtgtccctcctcccttgttaggctttaaaaataaagccatgatttggagcagtggctcacgcctgcaatcccggcactttgggaggcccaggcgggtggatcacttgaggtcaggagttcaagaccagcctggccaacatggagaaaccttaactctgctaaaaatacaaaaatcagccgggcgtggtggtgcacacctgtaatcccagctactttggaggctgaggcaggagaatcgcttgaacctgagaggcagaggttgcagtgagcctagatctcaccgcggcactccagcctgggtgacagagctagatgctgtctcaaaaaataaataagtaaataaaagtaaagccaaattagttagttacatcccccaaaccaagaaggataaaatcccaaacacccgagaggaggctaatgcatgacgatcgccggcctaagaggatgtccccgtggggctgcttagaaagaacttgagcacccagatggaccagggcaagccgcttctcattcttagccagagctgacagcagggcccacatcgcccctggcagtgtggcttcatccgaagggccttgaattcccaggacatgaaactcgcccagatccagatgtaagtacaaaagtgggtcccacagtcagtggagaggcacgctccctgggctctcccaggctctgagggtcggggctgcagctcttccttctcctccaaggagcaaagccaggcagctcctcagggcccatccccccaaaacataccagagtctacagctcaactcactgaaatggggaggaagcaaaaccctggagggaggatcccagggatttgaagcagttaaacagaagcacaggctttggcaccagggggcctggttcaccattttctggctgtgtgacctggggcaagtgaattcacctttctgtgcctcaatttcttctggaaaaataggaattatagtacctacctcatagggtagttgtgaaaatccaattagttaatacactgtgaagggcttaaagtagtaccaataaatagcagtggctgtcatcatgattaccattatctttaccattagtattgtcaaagctgcccagggaagcaggagagttgggtggcatctttgcgtgccagtgactgcctatgtagcgttggacaaatcactttcctcacccttccctgggactcagactctgtgaattgaacagtttggatgaatttgtgctgctcttcgccaggaggaagcatcagaattgcctgcagggcttttgcaaatgtagacttccatgttccgtctccagaaattctggttcattgggtctggagctggcccagggatctgcattaaaaatagcatctctgttgatggttctgatgcacaacccaggttgggagccacagttaaccgggttaggatcctgaagtgattggtccccttccctcactcccattagctcaggtggtgttttagcaaaggggaagctcctgccctctctgtgggtgctgaggctgttgcctgggtgggggtcccactttactaggtgtggcaggtcaccagttccacaggaagcagtggtggctggagaacagccctgaggcgtgagtggagccggcacatctaggagttttcattcagctgatgtttggtgaaagtgggatctgtaggctgggcgcggtggctcacacctgtaatcccagcattttgggaggccaaggcaggcagatcacctgaggtcgggagttcgagaccagcctgaccaacatggagaaaccccatctctactaaaaatacaaaattagccaggtgtggtggtgcatgtccgtaatcccagctactcaggaggctgaggcaagagaattgcttgaacttaggaagtggaggttgcagtgagccgagatcgtgccattgcactccagcctgggcaacaagagcgaaactctgtctaaaaaaaaagaaatgaaagtgggatctgcagatgggaggagaacaactgtgaaaatgaggtgtcctctggccatgtgatgcctgggggctaatcctaccttcaaggtatcacaggagattctcctcactgcttctgaagtgtgattgaaaggggctgaggtgtggatggatgtcagccctgctttccttcatggccacccagaagcttttggatgctttgggtaggacaaacctccaaggagcttttgggtcacaaagggcccaccttcttgggcactggcgggatctgtctgcccagttcctggttgcccaagcccatcccatcatccagcctgcccacagacgcccctgccacatgcttctggctgcctgtcccttcatcccggctcctgtctctcctcgtctccctgatcaatagcaaccagccaggaaagcagtcccgcagtgtttcaggcccactcctttaatctctcccgaggctgagaacagcctctttctagccacccagcccctttattaaacttccttcctgcccccagtcctgctgctgcctttgtgaggtaagttggacttgtgtttctgtctttggagaacagctctgcaatagaaatggcttcctgaaggcaggagctgcctctgagctgcctccaagccagcctggggcctgcagtacagatgctgggaatgggcggccgacagaaccaagccatatcctatccttagacccaatcccagacagcaggaccatgtggctcccaatgtggagataagagggaagcagtagcgacatctgggcatcacttggcagcgtggctttggctgctcagcacgtgcttgctagagaatccctgatggctgttatggcttacacatttaaccacttccctttggtacatgtgtagaggtgctgggtaagcatcttgtcaactttaacacagctgacaaagttatgacaccaagaatgcttagactttgcagttttccccgaactccggctgatcctgttaaaatgtctctccttacagagagctgatttgtgcccccaaattttctcatctcagcaggcagggtctctttgccagaaaaaagaaaaatctgttgtcatccagatactctgatttagcattatctgagaggaaggcatgtttcctatctggtttgttgctgattttccagttggtttccgtgggacggagccatggagaaggatgcaggaggatagctggagacacttgcatttttaagctcctctcctccaatgcaaagccttaaaatgcgtgggattttccctcttgttaaggctgcagtcttcatgcctcttctcagttggagagtgataaagtttgaacaaatccctttatttatgttggaagtatctgagtgtgaaaatccttttctgcccttaaaattactcgatccgtttttttctcttttttaaatgatcagtttaatacatgcccattatagtgaaattagaaattacaaacaagaaccagaaggaaaagttgctgaagttccactaccgtgtatccctgcagatgcgttcccatacagatgaacagatataaatctgtattttgaaaaaaaggaagaaaggaaagagaagatatgtatttctgcatacacagaatcatttgataaatgccgtcttgtgacctgcagtttcacttttcagtattttgggatcttctgaagctgtcagatggtaaacacctgaagtgtcatagtcgatggctgtccagtattctatcacatggatggactgttgttatatagtctattatattgcatttactggacatttaggttatttctgattttgggccaatctaagcactggtgagatgagtgtcttaatttgggtcactaatctttacacatttgccttagtgttgtcttaggataagtttttagaacaggactagctaacattttcaagcatttaccacgtgccactctgctaagggctttaagtatattatcagtcaggcatggtggctcacgcctgtaataccaacactttaggaggccaaggcaggaggatcatttgaggccaggagacctggaaagtctacgacttagggagaccctgtctctacaagaaatttaaaaattggctgggtatggtggcacatgccagtagtcctaggtattcaagaggctaaggtggaaggatcacttgagcccaggagtttgaggctgcagtgaactatgattgcatcactgcactccagcctcggtgacagagcaagaccctatgtcagataaataaataaataaataatctattgaatcttacacatgattctatacagaaatatccacattttacagataaggaaactgagtcatggagaggttgggtaccttgtttggggtcacacagctggcaaactgcagagccagtattggaacccaagctctctgaccccagaagcttctgatgcaaaaggttaggtctgtttagccttgctgcatggtataaggatgcctgtcccttgcttcctctcttccagctctttaccctgtggtctcctggagtcctctcacacccacacttgcataacaggaacagggaaggaagaatcggcagtgtttgtgccatgcctgaaggatcacaaagcattgtcccacatgacccagatgtgcatctagcaccccttcctggattctcagtccctgggaggtaccttctagggaaccatccagagacgggaacatgtggccactggagacctgccttaggggagttgtgggcgtgttggtcggggctcagccaagttgtgctgggagagtctgtgctctccctagaccaggttctttacagagactggactctggcgggggggaatccttgcaggccattctagggagagttggacatgcgcagggcagcctgggagtctgagtcctcagcagagagtgttctgggaaaagaagaatgctgagtgagatacaatgctagacaggggatgtgggtgatttacttggtgagaatgcccctagactgggcaaatctaaggccagggccctgaagcgggccacctgttttgcacagactactcacctgcaagcacttaagacaggcttgtggcccagaggtaagagcagagccctcctctcatgaccctactaggcctggctgtttgtcagtggctctgtcctttggggataatcagagttccagctgcctgtgccatggggaacagggtgtggctggttccagtacacaggcagaatagggcataccatctccaagcagcaggggctgtaggattcccaccttagttgccttgcagggaatgtcttggtccagcagaagagacagaatggggagggcttgccctccacttggcccagttatctcttcccgatttatccatagattgagcttgatgatccagactcatattcattcaactaatcacatgagttatttctgcaatttgggtcttcaaataagtacacttggttgctgaatatgtgatcagccacagatttcttattctttaaaactcagggagcggaaatgccaacgtataaagccatcagcacgaggcagagatttccaaagcactaaaatcacaccattcaaagtgctggcccctggacttaccgtcaagctgccacttggcccatcagtgctctgtgcagagcccaggtaggggggctttatctgtaaaacccagggaggaaggcaatcaatacgtaatcttttcacattctttttacttaacaagagaattggtttgcctctgaag

SEQ ID NO: 4096 - DNA, 6000 bp, Homo sapiens
acctcatttctttaatctccttcccagtaagcctttagggaaggagctattattagcatccccattttactgataggaaacagaagcacagagaggtgaagtaacttcacaggaacacacggcttgttaagagcacttgagctgtgctcttaaccacagcattctatagtgctgggtcccttcctctgagggccagggccattccttctgcagatttcaggcccagcctgaagcgggagggagggaaggaaggccaagcagggtgcagagaggaaacacttcaggtgaaacacggtattgttagcccccattttctgcctgggcatcctagccaatatgacacctggtgcttcaggcaggaagcacccccatgcccaggcagcccccaggcagctgtgacaccaccgcagctatgacacacgctgcagtgctcagagctctgcgatgcctccagaggcatctgtgtcctcaaattcacacaaaggcctgcttcaatcctgtcctgtaagaaacaagtcctctgcctcctccaggaagcctccttcattgcacctgaggccagggcctctcctcccactcagtgctgtcctctccttcctgctctggctcattcccgtcgcccaaagtgatcatttctgtcccactgatcagagcccaggtataggatggaggctcctggtggctttgttgagcactgaaaagcccgacggaggcccctggcagatccctgacctcagtcctgcctgccaggatgccctggccttctcttcctccatccaagccccagggcaaccacgtgaatcgcaggctagacaagcccagattccagctggcctgagagcctcctccacagggatgaaggtaggagaaggcttatgtgtgtgcacaaatatgggcatgggcaggagccagccagcatccccagggctggggtgggagacacatagagctattaatagaacgggattaggtattcctccaaaccccaaaccagctgggcttggcttcctagctatctcaactttgtccgtccctccattccttcactcattcaacaagtatttgttggatacatatatctttaaaaaaataaataaataaagacagacttgctatgttgcctaggctgatctcaaactcctgggctcaagagatcctcccgctgaccttccaaccttagctacctgagtagctgggactacaggtgcatgccatcatgcctggcttatttatttatttatatttgttttatatttttaaagatggggtcttcctcttgtgcccaggctagaatgcagtggcacccatagctcattacagcctaaaattcctgggatcaagcaatcctcctacctcatcctcccgagcagctgggattacaggcatgagccaccagctccagttaaaaaaaattttttttttgtagagacaaagactcgctatgttgcccaggctggtctcaaactcttgggctcaagggatcctcctgcctaagcctcccaaaatgctaggatcacaggtgtgaaccactgtgcccaacctggacatttattttattattgctggggataagaaggatatatgagaaccagacttctgatcttcttccctaaaactgttcccctcagttttccccatctcagttaatgacaactccaccctgtctgtggtgcaggccggacctcacatctaatctatcagcaaatctgtcaatttgccctggcttaaaatatacccagaatccaactacttctattcatcccacccctgccatcctggtcccagccaccgcagtggctcacttgcactacagcctggcccagcagggctccctgctgctgtccctgaccctacagccggcctcttccctgcagcctgagtcgtgctgtgaaaacaaggtcagagcgtaccaatcacgtggcaggcacactcctgcctcagaacctgtggcccggctgttcctcttgcctggagcgattttcccctagaaatatacttcttcactcactccctcactttctcagaaatttacacaaatgccagagttttttttgttttgttttgttttgttttttgaggcagactcgctctgtcacccaggctggagtgtagtggcgtaatctcggctcactgcaatctccacctcccagcttcaagcaattctcatgtctcaacctcccaagtagctgggattacaggcgtgcgccaccacgccgggctagtttttgtatttttagtagagatggggtcttgctttgttggccaggctggtctcgaactcttggcctcaagtgatctgcacactttggcctcccaaattgctgagatgacagatgtgagccactgcaccaggccacaaatgccagcttttttttttttttgagatggagtttcgctctgtcccccaggctggagtgcagtggcacgatctcggctcactgcaagctctgcctcccgggttcaggccattctcctgcctcagcctcccgagtagctgggactacaggcgcctgcaaccacgcccggctaattttttgtatttttagtagagacggggtttcaccgtgttagccaggacggtctcaatctcctgaccttgtaatccgcctgcctcagcctcccaaatgccagcttttttatgaggcctcccgtatttctgtctaacattgcaacccatcccatctccccagcagttattgtcaaatagtatgagatatttattcattttgtttcttgcctatttcccctccctggagggtaagttccaggagggcaagattttttctgctttgctcactgcccttaagacctgcctggccccacaataggggttcagtaaatagctgttgaatgaatgagagacttgtggggtgacagaccagtcaaaaagctgtccctgcctccagtcctgccatttcctgtctgatcccacacagacagccacagcgatttttctaaaaaccacattgctgtctttcaggtcttagggtaggtatcacttcctcggaagccttctctggccccctgggctaggcagcccctctgtgtactctcagggtcccctcccctcattctgtaattgcctgcaattgcctagttctataattgtcttctccaggacagcgagctctggagggtggggacgcgtctgtctccctccctgttgggagctggaatggtgcagcggatataggagcacactacctgggtccaagtcctggctaagccgtgagaattcaggcaaattacttaagctccctcggcctcagttttcccaactgtaaaatgtggatcatcacagtttctccctcctagggttggggaaaggatgaaacaagctgatacaaaagagggatgcttggcacgctgtaagtgcaatacgagtgtcagctatgattactcttactcagggttgtgttcctggcctagctcagaacctggcccatattcaacactcataagtgtttgttagatgaatggatgactgtgtatggggatagagggatgaaggaatgacatgaggacctagacgggggctctaacccagcctgcggagcattggagaagcttcttgtggggagggagctttcagctgactcctgcaggatgaggagttggctgggcacagtgaaagggggggcgtgcgaagcagccagtggcctttgtggatgcctctcagtgtgggaggactgagttatgcaggaactgcagttcatcaccgagtggctgagccattagtgccaagaggcaagtgtcccctttgtgggccatttttaggactctcacactggctgctcactgagggcaaaacatcccacggtggctccctggtctgatcagcagccctccaagatcaaggggaggcacgcaggggaaaggaggccaccacttgttgagggacctcaggggacaggcctgcgtcaacctggcaacccattcctggctgacattatgcccatcccagagataaggggacagaggcccaacacccccgaggcagtcaggggaagaggcagaacccactcaagtctgtccactccctgtgccttccctcatcagcccagaactcctcatggccagagtgtgtctcccccgtcaccccagagattcctcagtggctgacatcacccactcctgactcccctcacagggcactgaccggggaaatccctccatggggcctggactatggaagagtcaagtgcaggaagaactttccataaggactggagcaaaaggctgggaattggaggagattgggggtggggctgctgaaggaggagagaccaatcctggggacagttgggggcaccttacccaattcctccacccccgccccttaactcctcacttgtctcacctgttgaccttctcatgtgccgattcagagattcctcacactcaggctctgacctccactgactctgatggcccacagcaggtgcagggtctagtttttctccagccacagggcccacagctggggtgaccaacgaccaggagctcaggattgaaatccccaccctgccacttcttagctgggtcaccttaggaagagttcatcccctctctgagctttcctcatctgtaagaaatgacaggtaaatctctgccttggagggtggctggaggactgagagacagaggctgtgataactcatggccagctgtgagttgcagtacttgctggttggattagcaattgaggaaactggtttggaaggggttaaatggagaccctgcctcccagccaggagcgaatcagggctgggaggggaggagccaggctgctgctaaggaaagagatcaggatgggccagttgccgactggagagggatgggaggagataccatagggtttggggggcttggcacagcggccctggcctctgcactgtgatagctccaagccagatggtgcaaggcagctgctgggctgcggggaagaggggctgcacttcctgagctggtgcagcggcagagtggataaggatcaggaccccgagccctcctggccctccaaggcagggggacaccggctgcacccaggctgtgacctcagctgacgccgatgatccacatgggatgcagggtctaattttagctccagccacaggggccacagcccagaagcgtctgccagcgggcacaggggcagccagggctgctcaggcaaggggaggagtgggaagaccagcccagctccctccagcctgtccctggccaagccgcctcctgtgggagctctgactggtccccatggcctggcagacagccctcctctcagttgagggcaaggtcaaggggtgcagccaggagggcagggggacacggccctgcattctggacaggggttgcgtcagccagagcagtgcccaggggcaggggtccctgctgggagggaaaaggctggcttggttgtccaaaggccgagaaggcagagtcctgagagcaggggggccaggccagcaagctgggtcccacctggcctcctcctgcctggctggtgactcactatctgaccttagacaggcggcctggtctcgatgggcctcagtcttcccatctgtacaatgacagcacaggactagcaggtcggtcccagctctggtctcccgccccaggccctgctcttcctgcttgctggcagaggcctcccagcttccctagccctgactgtgggtggccacatgcagtcgtggaggagaagaaagtccctgtggctggcactgtcagcctcctggctcctgcttgtcctgctgggaggcttctcccttctccgcctggcattgcctcccagacctcggcccggggcttcccaaggctggccccgctggctggatgcagagctcctgcagagcttctcccagcctggagagctcccagaagatgccgtttcacctcctcaagcccctcatggtggcagctgcaactgggaatcttgctttgatacctcaaagtgcaggggcgatggccttaaggtattcgtgtacccagcgg

SEQ ID NO: 4097 - DNA, 6000 bp, Homo sapiens
aaagtttcttcagggacttccctgccctcagcttgaaacaataataaaagcatatctgcatataccaattaaggaagctgcccgtgatacgttaaaaatagtagtcattgttctaagcacttaacttgtattatttcatttgctatcgattatctcttaaatgaaaaagtatggctgggcagcactttgggaggctgaggcaggcagatggcttgagcccaggagttcaagaccagcctgggcaacgtggtgaaacctcatctctaccaaaaaaaaaaaaaaaaatttagccaggcatggtggtgcatgcctgtagtcccagctactcaggaggctgaggtgggaggatcacttgagcccaggaggtggaggctgcaatgagctgaggttgcaccattgcactccagcatgggtgacagagccagaccctgtctccaataaaaataaaaaagaaaaagtacaatttgcagaatagtatgtagactatctgcagatatagaaaatagaagaatatcccaaatttagtagtggcccccactggggaacatgatagagacacactggggaaagggcacatccttctttcacttaacctattacctttgaaatgtatacagcaaatatgtagaactttatattcataaagctttttaaaataggctgggcatggtggctcacacctgtaatcccagcactttgggaggccaaggtaggtgaatcacttgaggtcaggagtccgagaccagcctggccaacatggcaaaaccctgtctctactaaaaataaaaaaattagctgggtgtggtggcgcacacctgtaatcccagctacttgggagattgaggcacgagaatcacttgaacctgggagggagaggttgcagtgagccaagactgcgccactgcactccaacctgggcagcggagcaagactctctcaaaaaacaaaatgaaaccctttaaaatagaagttgtcagccgggcgtggtggtttacgcctgtaatcccagcactttgagaggccgaggcaaggagatcacttgaggtcaggagtttgagaccagcctggtcaacatggtgaaaccccatctctactaaaaatacaaaattagccgagcatggtggcacacgcctgtaatcccagctacttgggaggcagaggcaggagaatagcttgaacctgggaggcggaggttgcagtgagccaagatcatgccattgcactccagcctgggcaacaagagcaaagctctgtctcaaaaaaatagataaaaataaatagaagctgccacttactgtgttcctaactgcctaaccctggcagatgctgggagcgtagagtaaaggcgccgtggttcagggagagagggggctggttctcacctctggtggcagctcaggaaagatatttgatgaaatcaagatctgtctaccgaacactgataaaggctctattagaatttactggacttccccagagtgccacagggaggctgctgcatgaagaggcaaaaatgttaaacgaggatgcagcacggagtgttcaagggacacagacctgaggcaaaagacaaagctggagacgggcattttgcaaatttgaagccaactggctcacaaaatgaaagaggctgttaataccaagtgtgaaggtgggatggcatcaccagagctggccaagttcagagaagctggaaatctcaatttggatgtgacgttattaaatgatgacaacacacgtacactacatgggccaaccatgggcgaaattcagactttgggtctctgggttacaggtaaggtcgtgacaggctttgatgactgggggtgctgcagaaattctgaagtaggtgacaacaggtagctcctccccacagaattaaagcaataataactcatatctaccccatgatacagatttcaaagtacttaatgtcatcacagtgctaaggcctaggaatccccttctggagacaaagaaacagattcagagagctgtagaagttgggctgagtcacatagcagttgagtatggaactgattttatctgattttttttttttttgagacagagttttgctcttgttgcccaggttggagtgcagtggcgcaatctcggctcactgcaacctctgcttccgggttcaagcaattctcctgtctcagccttccgagttgctgggattataggcgcccgccaccacgaccggctaattttttggatttttagtacagacagggcttctctatgttggccaggctgatctcgaactcctgacctcagatgatccacccgccttggcctcccaaagtgctgggattacaggcatgagccaccgcgcccggcctttttttttttgaggtggagtttcacttttgttgcccaggctggagtgcaatgacgcgatctcagctcaccgctacctctacctcatgagttcaagcaattctcctgcctcagcctcccgagtacctgggattacaggcatgtgccaccacacccggctaattttgtatttttagtagagatggggttgctccatgttggtcaggctggtctcgaactcctgacctcaggtgatccgcccgcataggtctcctgaagtgctgggattacaggcctgagccaccacgcccggctgattttatctgattctaaagtcctgggagtcccctgacctgatgatgatgatgaaaatgaacatttactatgtgtcagatatttttctaagattaaagctcttgctctgaggttcagaattcaggggatccataaacttggatgggaaaaaattatatttttatttttgctaaactctaaccaaaatttatgatttccttctatatggattgaagcagtagcagtatctttggcttagtcaccaatagaaatcacatattttcatatcaaattgtagttattgcaagtatctcaaaatatttatgctcaagtgatttcaaaatcacagtggttgttaaaccaccactaaattgttcgtgagcaacttctgtttcagatgctcctgtgatgtagccgccattaattggttacctccaggcttagcagtggttcagtgaccaaagggcgaatctgcctgttctgagtagggcttctccactcttctgcattccctgtctttttttttttttttttgagacgaagtcttgctctgtcgcccaggctagagtgcagtggcgcgaactcggctcactgcaagctctgcctcctgggttcacgccattctcctgcctcagcctcctgagtagctgggactacaggcgcccgccaccatgcctggctaattttttgtatttttagtagagacggggtttcaccatgttagccaggatggtctcgatctcctgacctcataatccgcccgtctcgattataggcgtgagccaccatgcccggcccagcattccctgtttttagttgtttgctgatcaatatgtaagaggaggggcgtcaaagaccaccccacagtttaatgtccttattcaagctggtcgacaacacactgaggtcattaaaaaagaaaaatttaactttcggccagtcttattaatgttagtaaacacataatataaatttctggttttatttttttgagatgggctcctgctatgttgcccagggtggctttgactcctgggcttgagtgatactcccccgctcaacctctcaacctctcgagtagctgggactacagtcgtgtgccagcactccccagctccaaattttttttttgttttttgtgggttttttttttgagacggagtcttgctttgttgccaggctggagtgcagaggcgtgatctcagctcactgcaacctccgcctcccaggttcaagcgattctcctgcctcagcctcctgagtagctgtgactacaggcgtgcaccaccacacccagctaatttttgtatttttagtagagacggggtttcaccatgttgggcaggctggtttccatctcttaacctcatgatccacccgccttggccttccaaagtgctggaattacaggcgtgaaccaccatgcccggccaaatttgtttttaaatatagttttgataattgttctcattgtaatcctaagcattttgttttgtgcatttatttatttatttataatacagagttttgctctgttgcccaggctggagtgcagtggcacgatcttggctcactggaacctccccctcctgggttcaagggattctcctgcctcagcctcctgagtagctgggattacaagcacccactacgcccagctaattttttgtatttttagtagagatggtgtttcaccatattggccaggctggtcttgaactcctgatctcaagtgatccgcccacctcggcctcccaaagtgctgggattacaggcgtgagccaccgcgcccggcctgttttatgcctttataagcagctattctgagaaagcattcacaggcctcaccagatgccagagtccatactgcaaaatccaagggaggctaaacaccccagttctaaatgttttcaagccattcagatactgtgcacagctgccctttgaagtacggtctattatatctcttttacagacccagaaactgaggcgcagaagttagggtcagccccaggtcacacagctaacaagagctggcctaggcacccagggacctggccccctagcctctgtgctttgctactgatttcagcgctcctcttgtggctttttcttgaggagcccaagggtcagggtcccaccccgcgatatgaggccagtggcactgccccctagcaggcgcgagatgccagagccctaggatgtctgaagggccgggcaggaggcggacgggcgtgggccaatggctgtcgcagtgcctcatcttgccgtctgtgtgagcccaggtatgcagtaggctccgcccaggacccagcccggcccctccttaggcctgggctctgggagcggaaattccggcgacagcagggcaaaacaggagctgattcgagctggcagagctgggccatggaaccggtagagacctggacccccggaaaggtggcaacttggctgagaggtgggtggggctggggtagagttgggcttgaaggggactaggtgtggtgtcccaccgggaagcgggaggagaggaaaaggaaaaaaaatctgcggactgggtgcgctggttcacacctgtaatcccagcactttgggaagccaaggtgggtgggtcacctgaggtcgggagttcaagaccagcatggtgaaaccccgtctctactaaaaatacaaaaattatctgggggtggtggcaggtgcctgtaatcccagctacttgggaggctgaggcaggagaatcgcttgaacccaggaggcagaggttacagtgagccgagattgcaccgctgcactccagtctggacgacagagcgagattcagctcaaaagaaaaaaaaaaataataaactgcgggctctatcagtcggtcagtcagtcaacaaatatttacagagcacctaacatgttccaggaaccgtgctgggcagagagacagatgagatgaccctggggggcccaaggacccagaagggggcccctcatcatggcagtagcccaagaggcctctagggtgataatggggaggcggtgtcatgaaaacaggagggaggcctgacaggcccacacccactgtatctccttcatcttccctggccccagggccagtgggctgttgttaaatccgtttcttagagtcagaaactgacacacagagccaggaaatgatttgctcagtctctggtgtcattttccccgctccacaccctgagctcctagtgacagaagcagaagccctaggccagactgaagaggttgacacagccccaccctggggctcctatccaaggggcaaggtgctgtccaggctcagcgagcccacacagatgggaagcaacacaccccacaggcagactcagagaaggaagggcctcctgacacaca

SEQ ID NO: 4098 - DNA, 6000 bp, Homo sapiens
aaaagagtgaatgagcaaaagactgaatggataggtgggtgcgtggataggtgaatgaatgggtggatgaagattcaccttggatgctgtatgatgctactgaatcccagccctgtctcagtgaggatgaaaaattcaaggcggatcacactgtgacgtgtgctataactctcttctccttcctccctccctgctgtattccattctatcattgaccaaggacatttggagaacctggcctatgtgagactgtgctaggccccagggacagtcatcaaaagacactgtggaactgggatggaattgtgatctaaggtgctttgcatgcctggtcttctcttgttctgcaggtctcagcacacacatttcctctgagtggtctttcctgaccactgacctagaatatatcctccccacatttcacttcttcttcttctcacattacccccttgatttcctgatgccatttgtgaacatctgaaattaccattgttttttattagtcttcccccactcaaatatcagctccataatagcagggaccatgtctttatgtcactgttgtattcccagtgcctagttcagtacctggtacacagcaggcacccaataaacacattctgctctaataatactttcttacgatctttacttcacttcactaattttctcttcagttgtgcccaatctgatgttaaacctatccactgagttcctaatttttattaccatatttctcagttctagaatttccatttggttctttactataattttttttcttttttttttttttttgagacttagtcttgctccatcgcccaggctggagtgcagtggcacgatctcggctcaccacaagctctgccttccaggttcatgccattctcctacctcagcctcccgagtagctgggactacaggtgcccgccaccatgcctggctaagtttttgtatttttagtagagatggggtttcactttgttagccaggatggtctcgatctcctgaccttgtgatcgactcgcctcggcctctcaaagttctgggattacaggtgttagccaccgcgcccggccggttctttactataatttctagttctcaatcttgtcctgctgctcagagggcagaagaggaaaatgtctttaagtaagcatagttatttgaaaatttgattgattattccattatctggatcttttgtataactttctattatctgtttctgctttttggtcatgttgtcttcaatttctttgagggttgggctgttgtttcctgtttactctcactccccgtggtccaacccaaagcctaggtggggggagtttgtcagggctcccctttcttagagaatctagaactatagtttttctcccatacatttgtaagtatgtgaagatgagaaagctcagctcagtttctcagctgtcccctctgcaagtggcatacttttaggaggaaagcagctccatataaagggcttgcttctctcagtcccttatttcttttctgcattggtaacttttcagtactgactttactgttgccccatagtaaatatttactggatgaataaatgcaggactactaggctcggaggtgggaatagatctagatgaatacacgcactcattcttccggcagtccctgacacctacactgtgccatgttctgtgcttcgctgagtaagagaagtgacaaaatctagtcccaacccacaagggacagaccatattcttggtagacacaatctttagaacagaggtcaacagaaagggcccttcgaacatttaggaactttgagtttcctagggaaagtggaaagtttccctggggaaggggcttctaagctaaatcttgaagaataaagaagagtttgcagtctgggcaacatagcaaaactccaccctccaccaccccaaaaattagctgggcatggtggcatgcacctgtagtcccaggtacttaggaggatgaggcgggaggattgcttgagcccaggagttcgaggttacagtgagctatgattgcaccacttgtactccagcctgggtgacaacggcaagaacctgactcgaggggaaaaaaaaagagtttgccaggtaaaataattggagaagggctttccttgcagaggaaatacatggactgtagaagatactcctcagggtgtcaggaggtgaaaatgaagcttctgaggtttgcaagaaaatgtttacaaataagagtctggcatttagtatcctcgcatgcatctccagcatgggaaactataacacggctggccccaggctcgtcctgtctggctgcctctttgtaagaggggagaagattgcacagtgtgatggagctcattttcagcagagtaatctcagacttcaacacgggtatcctgtcttctgggctggtgcccttctggcacaggacacctccctgactctcatgaaccccagaatcactcacccccacaggcacaccaaagacagctgagaacttgagtcaagggtgaggagagacctctgggtgaaagggcagggatggggaaagagggtgatggatggctggggactcctccctcttctctccctccccgcccctccctctccacttcctggctttctctcatcagctttgactctcagttcttcttttcttctcttctctttttttgaaatggagtttttctcttgtcgctcaggctggagtgcaatggcacgatctcggctcactgcaacctccttctcccgggttcaagtgattctcctgcctcagcctcccgagtagctgggattacaggcatgtgccagcacacctggctaatttctgtattttcagtagagacagggtttcaccatgttggccaggctggtctagaactcctgacctcaggtgatccacccacctcggcctcccaaaatgctgggattacaggcgtgagccactgtttcctggcctttttttttttttttttgagacagggtcttgctctgtcaccctggctggagtgcagtgccacaatcatggctcattgcagcctgggcctcccaggtgcaagcaatcctcctgcgtcagcccccaagtagctgagactataggtttgtgccactatgcccggctaattttttttttttttttttttttttttgagagatggggccttcctatgttgcccgggtggtctcaaactcctgtgctcaagttatctgcccgcctcagcctcccaaactgctaggattacaggcgtagcccctatgcccagcctctgtttttttctttggactcagcctcagccagatctcccctgggcttgcaacacaaggcccaaaacaatagaagagaagtgaggggagttttccctttactacctagcatgtaaatgaggcctaaagtagactaaggaagggagagtgtgaagggagagtgggccagagctggggttgtggtgaccaactcctggggcctggggggagtttgtgtaggggagggggagggagtggcagggaatcaagacttaatggatgaattctagggcagccccagaggttacatacatggctgtggcttcagacagacctggattcaaggtcaaatgagactggctccaccatttacgaccttagcaagtcacttaacatctaagcctcagttttttcaccagtcaaatggggataaacataacacctgctgcagggcaccacagagggtatcaagtgagggaatgcataaagcatggagcactatccaggcagctgtgggattcctctcatccccccacccctccctgggccctcacagccactctctcaccccagtccccttccactgtagcttagtcacccacttgtcccttccctcgctcccctcccattcatcctcagctaatacaaacaacccatctgcttgctactttctctaccaaaatcacaaaattctaggtcttggctgggcgcggtggctcatgcctgtaatcccagcactttgggaggccgaggcaggcggatcacttgagatcaggcattcgagactagcctagccaacatggtgaaacccagtctccgctaaaaaaaaaaaaaaaatacaaaaaattagccaggcatggtggcacacacctgtagtcccagctatgcgggaggccaaggcaggataattgcttgaacccaggaggtggaggttgcagtaagccgagatcatgccagtgcacagagcaaaactctgtttaaaaaaaaaaacaaaaaaaccaacaacaacaaaacaaaacactaggttttaacaaacttcagaaataatctatttcagtcttcccagttccttgaaatgaggaactgaggcctagagagggaaagcccaactgaaaccaggcttcccgattcctcacctccagcaccttcacagaaatccaccaacccttccacaatctaaacatttcccaagctttcattcagaacctgcagcccatctacaaccttcccttgaaacataaatctatcccagcccttctccttcagctcctataccctgccccaatcttctttaaacaacaaactcatttacggaatatctgctatgttctggctctttttaaattggttattattacatgtaatccggcagttcttttgttaaagggtcagagaggtagagtttctggcccagggtctcagagctggtcagtgattaaaccaggattcagcctgcaggatgcatgattccaggccttgggccctacttactcccaccgttgcctctggattgacctctctcctatcttgtacgatctagcctgctcccccagccagggccttagaacctagagcctggtattatccacccccagatctgcagaaaggaagccacacccctcctccaccttgtaagccctccttcctctccctacctcaccccgcctcctctgcctcctggttcaaaagcagctaaaccaaaagaagcctccagacagccctgagatcacctaaaaagctgctaccaagacagccacgaagatcctaccaaaatgaagcgcttcctcttcctcctactcaccatcagcctcctggttatggtacaggtaagagcaacgcctggcaccactgccaggactccccaaagttgcttggcatggagggagggcatacaggatgtgagctcccagagacccagccttctctcctgagagcacagcagatggactccaacaggaaaactggggacacagcgggcctggccgcccagccttccagctcttctggctggggctgcactgcttgcgggctgccctgagagaaacctgtatccacagctggggagcacttacagggtgctaggcgcgttggggcacccaaggggtgttgtggaataatagagaactaagagacttgggaagacaaccctgagtgaggaaggcatcggcccacagggagtctggggagatggtcctttggggagaggccaggagatgtccaagtggagcctgctgtggttatggaggtgacaggggacactctaacccccactcccctgccagagagaagcctggatgttcaggaatgcaaagaagacaggactctcccatttcagaaacaactggagtctcaaaagcgactgctattccaggaggcagctttggtagcatcccaggtgcccagaggggagtcagtacagcagaccggagccatcaagttcttgatcaagaacagcttgatcaccatcaaaaccagcttaatctccatcaagaacagttctagttgcagctccatcaagcattaaggacagctcgatcaccatctggccacttccccaccccacatccagccacccacgctttgccaagtgctttctcactcagccctggctcatgtgaccttcacaactgtgatgaacttctccccactcagaagatgaaactgaggctcagggaagctaagccctttgccaggctaggaaggtcaagggccagggctcccctgtctccctctatgccagaagggctggtcgctg

SEQ ID NO: 4099 - DNA, 6000 bp, Homo sapiens
agcaatactcccaccttggccttccaaagtggtgggattacaggcgtgagccactgtgcccagcccttactttttatataaattgacaattatttatttataattttattttgctcaaggaactcagttcaagtatttcttttctttttttcttttctttttttttttttttttgagacaaggtctcactctgtcgccaaggctagaagtgcagtggtgtgatcatggctcactgcaacgtccaccccgctgggctcaagccgtccctctgcctcagcctcctgagtaactgggaccacaggcacacaccaccatgttcagctaattttttttttttgtattttttttaatagagataggatttcaccatgttgtccaggctgcaaataattctttttttttttttttgagacagagtctcactctgctgcccaggctggagtgcagtggcgcgatctcagctcaccacaacctctgcctccagggttcaggcaattctcctgcctcagcctcccgagtagctgagactagaggtgtgtgccaccatgcctggctaatttttgtatttttagtagagacagggtttcactacattggccaggctggtctcgaactcctgaccttgtgatcctcccgccttggcctcccaaaaatgttgggattacaagcgtgaaccactgtgcctggccaattctttatattaaattatttctgttcaaacaactgggatggtttctgtctcctgactagagtctgactgattcagacaccaacagtggccaaccatatcctactctgattctttccaactccttcccttatagttgcagggtgagtgggcatagcatttaccttccacattattgaagatgacaattttaccaaatattttgctacagcataatagagatctccagccatccagcctggtttacttaatctagtatatggcactgaattaaagatcaggcagtaatccactgcctggccattaattcagtgccatatatttttgtttttattatatcgacatcccactcctgatacaactttctgtattaataaggatcagttaattgctgtagtaaacaacctctcaaactcattggcttatataacaaaactgtatttcttgctcacttcagtgtttaatatgttagtcatagtagaggaaaggtctgctctgcacaattatgcagggacccaagttccttccatcttgtggctccaccctcttctaggttctcagaatctcctctactctgctagcagataggaaggagggcaaggatcagcacctgggagatttgtgggccatcctgggagtagtacctttcacttccactagctagaattcattcgcatggccacatctgtctgttaaagaagccgggaactataggtattggtgagaacaagaggtttatactacattaaatggctcattggtgacatttacgataagttttaggggagtgatgtagacaggggccaacttgtaaaaagttaggaaatcataggggatgagggattttgccatgatgcccaggctgatctcgaactcctgagctgaagccagctgcctgcctcagcttcccaaagtgctgggatggcaggcatgtgccaccatgccctgcctggtagcaactctttaatatgatcctaatgataatgagaaagataaatctgaactaaggtgagaaggtagccaaccatgggaagctccattgggttttttagggttttcttttctttttttctcgagacgaagtcttgctctgtcgcctaggctggagtgcaatggcatgatctcgggtcactgcaacctccgcctcccaggttcaagcaattctcctgcctcagcctcccgagtagctgggattacaggcgcatgccaccatgcccagctaattttttgtatttttttagtagagatgaggtttcaccatgttggccaggctgttctcgaacttctgaccttgtgatccacccgcctcggcttcccaaagtgctgggatgtgagccaccacgcctggcttttttttttttttttttttttagacagggtcttgctctgtcaccaggctggagtgcagtggcgtaatcacagctcactgcagccttgacttcctggactcaggcaaacctcccaccacagccttccaagtagctggaactacaggtgcatgccaccatgtccagctaatttttaattatttttgtagaggtggcatctcgcaatgttgctgaggctggtcttgaactcctgggttcaagcaatcctcccaccttggcctcccaaaatgctgacattatagatgtgagcactgcgcccagccttgctttttaattgatgtagaattgagcatgtgtttgcggtattaatgaacaggaagagagataggacatgagtttggagttctattgggcttaaataaataaataaaatggagttccatcagccttacttaaaaaaaaaaaaaaaagaggccaggtgcagtggctcacacctgtaatctcaaccctttgggaggccgaggcaggcggatcatctgaggtcaggagttcgagaccaacctggccaacatggtgaaaccccgtctctattaaaaatacaaaaattagccgggcatgatggcacatgcctgtaatcccagctacttgggaggctgaggcaggagaatcacttgaacccaggaggcagaggttgcagtgagccgaggtcatgccattgcactccagcctgggtgacaagagcgaaactccatctcaaaaaaataaaaaataaaataaaataaggatatgagtggagggttggccatggacagaaggaggcccacatcttctaaaaaagaagaaaggacagatgcaaataaagagaaattatgagatagagaggaggtaaactgaaaatccagtaggattgctttggtttctgtaaagtgacgagaaaaaagaaaaggtttcaggttgcaagaggacccagttaaggtgggacaacaggaatctgtactggaaccagtatgtctagttttgtgactttgttccacagccaaggagcaaaaagggaggaagctcaccatgtggtttgctcaagatggggctcatcatattgagagcctttggcaccaaaggcacggctgagcagcctttggcatatatatcaattattgatccttaaggtcactgttgtcggcttcctactcctccccattgtatatttttacttccttttttactttctcctagtctccagttctttttttccttgcacttttccttaggttttacagtaaccacagtgtgacagacataccctaagctgacccccaatgattcctgcctcctggtatttacgccttgtgtgattcccttttcttgagtgcagatggctcctgtgctttgcttttaaccataggagatggcaatgatgatgggatgccactctgtcacatatatagtaagttatataaaactctatcatcatagtctggagctagagaccctcattgtcagtttcaagaaactaagtggctatgtaggagaaacctgcatggcaaggaaatgtgataatctctaggaactgcaggtggcttttggatcctgagagaggcctccagcagacacccagcaaaaatcccaggccctcctcagttatacagtcacccagcaaaaatcccaggccctcttcagttaaacagtcgcaaggaagttaattctgccaataacccaaatgggcttgcaagtggattcttccctggctgagtctccagatgagaatgcagcctgattgcagccttgtgagactaagcagaggacccagctaagctgttctctggctcctgacctggaacctgttagataacgtttgttttttgttttttttgagacggagtcttgctctgtcaccaggccgggtgcaatggcacaatctcggctcactgcaacctccacctcctgggttcaagcaattctcctgcctcagcctcccgagtagctgggactatagatgccgtgccaccatgcccagctaattttttatttttagtagagacggggtttcaccatattggccaggatggtctctctcgaccttgtgatccacccacctcggcctcccaaagtgctgggattacaggcgtgagacaccgcgcccggccgataatgtttgttttaagccttaaatttgtggtaacttgttacacagcagtagaaaatgaatactcccagaattcctgaaaaaacactggggccctcaggcatgacccctctacattatgtgctacctaggaaaatctgggcctgggcccaggacacagaacttggtgaacgaggccagagggtgtgccacacacctccagtgggcactctggacttcaaggtagaagaggtcctggctttcaaagcaaatcgtgtgccccacctccccgcgcctgcctgcctctgcaaatgcctgtcagttcgaccctcagagatgggcgaagcctggggaattacagactgccagaagtagatcacgaagtccaccacctgaatctcggcgtttggcaccgtgcctggtacacagtggacgcccaacaaacggcttgcttgcagaacagaaagagccctcgagtgcgcgtctgctggccccctctttgtgcagaagggaaaagggagactgggagggccggggacctgcggggccccgccgcgggtcagagctgggcctccggccaagcgccatcccgggcccaggcggagggggcgctgcggcgggaggccgcggcgggcggtggcggcgggccgggggcggagcgatggcggggccgccccagtgagtgagcgagcgagcgccgcgcgcgccgccgctgccacctccgctgctcggcccggtcccggagtggcccggccggcccgcggggcgcggagccgaggcccgcggctggctgcatgaaggactgcgagtaccagcagatcagccccggggccgccccgctgcccgcctccccgggggcgcgccgtcccggccccgccgcgtccccgactccgggccccgggcccgcgccgcccgccgcccccgccccgccgcgctggagcagcagcggcagcggcagcggcagcgggagcgggagcctcggccgccgcccacggcgcaagtgggaggtgttcccgggtcgcaatcgcttctactgcggcggccgcctcatgctggccggccacggcggcgtcttcgcgctcacgctgctgctcatcctcaccaccaccggcctcttcttcgtctttgagtgagttccgctgcctcggcgccccctcccagccccctgccgcgcaccccaccttcccaatccctgctgggcactccgtgccttccccttcgcctccctggtcctcatcctccccgcccctttgggatcctcctcgggcctcttgtctgcccccctggcccctgcgcacccccatccccgccagatgccccatcctccttggtccatttgggtaccccatccgcgctggtgccctccaccctcccagcccctccattctccctgaccccaccctggcacctgtctgcctgccactgccaggaacaccagcctccatgcccctccacggcccccatcctcgctgccctctcagaacctgccccagggcttcttgaacaggcccctcctgctcacccatccctggaccatctcttgccaaccccccaagttctttctgacccttgtatcccttcctgaccacttctagatcttgtgtgtcctttggctgtgcacacccaccataaacatcctagtcatcctcgctgccctctccgggtccctccagggtcccctccttttctctagtctcagacaccaaccccgcttttgcttcccctcagccacgcacaccctaggccccaaggcatcttttctcaaaatctttgggcctctcgggccccctttccttctccagaaccttccttaggttctccagagcttcctgtccttccctcagatcccgcccgcctccacc

SEQ ID NO: 4100 - DNA, 6000 bp, Homo sapiens
tccccacttcagagcagttccatttacttttcttttttttctttctttcttatttatttattttttggagacagaatcactccgttgcccaagctggagtgcaatggcacgatctcagctcactataacgcctgcctcctgagttcaagtaattctcgtgcctcggcctcccaaatagctgggattacaggtgcccgccaccacgctgggctaatatttgtatttttaggagagacggggttttaccatgttggccaggctgatctcgaactcctcaggtgacccacccgcctcagcctcccaaagtgctgggattacaggcataagccattacgcctggccccagcaattccattttcaaaaacctgttttgcatattgggtccatccgagagttggttgaggggggacaaattcaatactgaagacaggccggttgcggtggctcacgcctgtaatcccagcactttgggaggctgaggcaggcggatcacgaggtcaggagagcgagaccatcctggctaacacggtgaaaccccgtctctaataaaaatacaagcacttagccgggcatggtggcgtgcacctgtagtcccagctacttgggaggctgaggcaggagagtggcatgaacccgggaggcggagcttgcagtgagccgagatcgcgccactgcactccagcctgggtgacagagcaagcctccgtctcaaaaataaaaattaaaaaataaaccaaagacagccacagtagaatagatagaaaaaaggcttaaggcctgcgttagcctagcagaatttaaaatttgcctgggggaaacaggacataaaattgtgccatagaagtcaccaacagggtcagccacagtgtccagcactttgggaggccaaggctggaggagggagggagcccaagagtttgagaccagcctcggcaacaaagtgagaccccatctctacaaaaaattaaaaaataaaattagctgggcatgatggtgcgtacctgcagccccagctactactcaagagactgaaatgggaggatagcttgagctcaggaggtcaagggtgacagagcaagaccccgtctctccctctctctctctctttttttttgttttgtttttttttttttttttgagatggagtcttgctcttgtcacccaggctggaatgcaatggcatgatctcagctcactgcaacctccgcctcccggattcaagcgattctcctgcctcagcctcccgagtagctgggattacaggcgcctgccaccatgcccggctaatttttgtattttcagtagagacaaggtttcgtcatgttggccaggctggtctcaaactcctgacctcatgatccgcctgcctcggcctcccaaagtgctgggattgcaggtgtgagtcaccatgcccggcctaaggccccgtctcttaaaaaaaaaaaaaaaaagtcaccaacagttagcgagtgcttactctgtgctaggccttgtaataaaataccatcttagcctcacaacagccctgcaacaaggtaagtgccatcatcccattttacagatgaagaagtaagcagagaagtagtgatttgctccgggtcacagaggtaggaagagtggaactatggttcaaacccagcagctgggctccagagcccccactcagagccaccctgtgcgatggcctcactggagcacaggagtggaaatgagaggtgctgtgatgcgaaaggagaatggccgcggaggtgaaaaacaagctctcctgacagcagcaggcctgtgagatggctattgtccccacttcataaaggaagagagtgaggcttacagggattgtcattgatcccaggccacagggaaccatgcggcagagccagattttaacccagatctgctggcctctaggaccctgcctcttaatgtccctcttaacagagggatgttgcctagagactggctgcagcgcaggggcactgaactctggaggaggctgagctagtcctggagctggggaaaagtattcccacagggagcacagaaggcccaggggtgttgaaggacaggaaatagcccacagctaaggctctacgggtataggtgacgaaggggagaaagccagagtaagggcagcaatcctgagggtcaggctgagggccaggctgtcctgggaagtggtgagacttccatctcaggacgtgtctaaaggggactggactggtttagaaatgtatgaatgggcccgagggatggcctggctgtctgctggcaccttccaaaccagaggatgacaaagaaaagtacgtttgaaagttgtgcaacatagggccagagtggccttgtgtggccgcaaggaggcaggagaagaggaggcttccagaagaggctgagcggggactgagacctgggcagggggaggacagcagagacacacagatgggagggcacctggagtgaagtgtggacagcatctggaggtggcaggaagcagcaggaggccaggggccaggatgatgggggctggttacagaggtggaaacttggaaataggtttcaagtggggaagaggccagaggaatgcaggttgagacacagcaggagagatggctggaagtatcagcgtcagggagtcacagctataggaaggacaggagagcagagaaaggaagggaaatttagaaacccgaagaccagataatgaagtttcatgccttccaggaggaagagctgctaaggaggtgagaggagggcagagaaacatccttgggggcgccaggaccaggatggcaggaaggggtgtggatgttcttggccactctccttccattttgagggccttaatgaaggaggcagcatcacagtaatggtcccacagcagctgctccatgggtattgcatgtgtgggtgcataaatgcattaatcaagagtactggggtctgggcaaggtggctcacgcctgtagtcctagcactttgggaggctgaggcaggcagatcacatgagaccaggagttcgagcccagcctgtccaacatggtgaaaccccatctctactcaaaatacaaaaattagccaggcgtggtggcgggcgcctgtagtgccagctactcgggaggctgaggcatgagaatcacttgaacccaggaggcggaggctgcagtgagccaagccagcctgggcgacagagcaagactccatctaaaaaaaagaaaaaaaaaagtctgcaaggatctcactgaattttagtgaaaaccctctaaggagagattacccccatttaacagatgagaaaaataagattaatttgcaaaaaataagtagggaagcctccactgtggttctgaggtggaggagggtcctctgtctctcagtggtggtgggagtcggttctgattacaggaaggaagagtgggtgtttagttttcttttcttttcttttctttttttttttgtgacggagtctcgctctgtcgcccaggctggagtgcagtggtgcgatctcggctcactgcaagctccacctcccaggttcatgccattctcctgcctcagctactcgggaaatagctgggactacaggcagccgccaccacgcccagctaattttttttgtatttttagtagagatgggttttcaccgtgttagccaggatggtcttgatctcctgacctcgtgatccacccgtctcggcctcccaaagtgctgggattacaggtgtaagctaccacgcccagccttgtttgcttttctgagacggagtctcgctgtgttgcccaggctggagtgcagtggtgcgatctcggctcactgcaacctccgcctcctgggttcaagcgattctcctgcctcggcctcccgagtaactgggactgcaagcacctgccaccatgcccggttaatttttgtattttgagtagagacggggtttcactatattagccagactggtctcaaactcctgtcctagagtgatccgcccacctcgacctcttaaagtactgggattacaggcatgagtcactgtgcccagactggttttgtttagaatccaccccttgtcctgcctctcccaggggtctatgaggagcccactaatctttaatccatggccctaggttcaggggagggggttgggccagggcaggccatgggaagtgaagtggacttggggggagtcagaaagctttggtgtggcctcttgtgcccaagacaacccaggaggttcatggtcctgaagccaatgtaatctagggcccaaaccttctaatctcagggtgggcagaatctaggtgtagaatggggtgagttcaggggggctccacatagacagagggtgtgggaccctcaccttggcactagaagagttcaggcctcctcaaacagatggggctcaggacagcagaggggacagagagggctgctctgccagcatgtcccagaagtgcatgtggatatagagggcagcagctgctgagatggccgtgggcattaggctatgctggagtggggacacctcaccccgactatgccagctcgcaccgggcactttcacttcccttagtataggctccttgcactctgctacccacagtttgcatcagaagaaatggaagagacctgcttaaggtcacatcacacacccactggcagagcagggactctgcacagggtggtctaactgcaaagtctgccatcctgccattccccttggggctggaaaagaaaggtttctaacttgctttcaaagcgagttcctatcagccccgttgtgggcaaggtggggctgctacccgttctagagggcctgctcagtggagctggggccaagctgggcctctccagtcggctgcgggggcgcacccccgggcgctgggagtccaggcccggttttgcatcaggccctgccgaggtgtttcctcctcctccgtgtggggcagctgctggctgggctgcctgttgagtcagccttcttccctcacggctcttctcccggtccctgaaactcggctgccaggggagctggagccacctgcgaaggtgtcctcccatactggacccctacaggtaacacgtgtcggtgccagggtcccctgccagggtccagagacgcaggcactgccacctggtatcctgagcaccctccagcaccttggggttgggggaggtgggcacatgtctggaactggaacagctggacagatggacagaccctcctcttgaccaatgggtctgtcccaccgtgtcaaaacagcagagaagaccaaactcctacctaactctggtaggagattctgcctctggttggtaggagaggggacttcagggagggggcactgctgaggacgctgggctgatgcccatggcccagctcaggcaggcctgaaggacagaaataggctcagttctgccgaacgtccccccggcctccatccacactcagacacacacacctggtggcccccaaggcaccaggggacaccccacagcacacagcccagtcacacatacagcacaggaggaaatgcacaatgcatactgtacacaccccacacggcgctgtcacctagaaagtcactgaacacaccacacagacaatatagtcaccatgcagcatcacactgcaacaggacacaaagacacacagcaactacacagctcacagactcacgcaacgcagacatgcccaccagactcggacccacacagccacacaacagggcacagagagggacgtgggctcacaccccaatccacaggggaggccgaacgtgggctcacaccccaatccacaggggaggccgaacgtgggctcacacgttggccacagaagtccagggaaactgctgttgtggagcacacaggtatccacagagtgaatgcacaccgtgcagccgtgctgaggccttctgctcctgagggtgtcaagagggatcgctggggctcggccactgactcagctgggaggggacagagcatagcaggcggcggacacaagccag

SEQ ID NO: 4101 - DNA, 6000 bp, Homo sapiens
caggcctgtgccaccatgcccagctaatttttgtattttttgtagagacagggtttcaccatgttgtccagggtagtcttgatctcctgagctcaagtgatccatccttttggcctcccaaagtgctgggattgcagacatgagccactgcacttggccctattctgacttttaataacatagatttaatttggccagttttgaacttaataaagatgaaatgatacagattgtactcattttatgtctagcttcctcttctcctttttttttttttttttttttttttttttaagagacagggtctcgctgtgtcgcccaggctggagtgcagtggtgcaatcatagctcactgcagccttgacctcctggcctcaaggatcctctcaccttgatctctcaggtagctaggactacaggtgtgcaccactgtgcctagctaatttgtgtctggcttctttagctatgcattgttgggaagaggtcacctatgttgttcacacagcagtaggccatttatttttgtgctttataatatctgtttatacaaacctctgttgatggatattcgagttgtttacagtttggaactagtaaaaataaatactgctatgaacttcataataacaccaaattggaaacaatgcaaacatccatcaataagagaatggataatcaaactgtaagtatatttatatgaggaaatactaatgagtaataaaaaaagaccaaactactgatatatgtgacatcatggataaatctcaaaaacattgtgttaattgaaaaaagccaaacactaaagaatatataaagtatgaagtccaagagcagacaaagctaatctgtagtgacaaaaatcagaaagtaaagtccaggtgcagtgtggctcatgcctgtaatcccagcactttgagaggctgagccaggcggatcatttgagaggccgaggcgggtggatcattcgagaccagcctgactaacatggtgaaaccctgtctccactaaaaatacaaaacaaattagctggacatggtggcgcatgcccatattcacagctacttgggaggatgaggcaggagaattgcttgaatcacgaggtggaggttgcagtgagccaagatcgtgccactgcactccagcctgggcgacagagtgagactccatctcaaaaaaaaaaaaaaatcagtaagtaacttccagtgatgagggaaatggattaaaaaggagcataagtcaaggaaactttctggggtgatgataaaaatgttttatctcttgatttgggtgtggcagttacatggatgtgtacaagtgtcaaaatccattgagctgaacacttactatctgtgcattcgattgtatatcaattataactcaataaaaattaaatgtaagggctgggtgtcatagctcactcctgtaatcccagcactttgggaggccgaggtgggtgaattgcttgagcccaggagtttgagaccagcctgggcaacatggcaagaccacatctcaacaaaaaaatacaaaaattagccaggtgtggtggtgcgtgcctgtagtcccagctacttggaggcctgaggtaggaagatggcttgagccagggagattgaggctgcagtgagtcgagatcacgccactgcactccagcctgtctccgaaaaaaaaaaacaaaaagtaaataagtatagaaaaatgctgcttggtcctaaaaatgctcctatgaactatacctgatttttggaacacgcatagttgggtatatagttaggagtagaattgctgggtcagaaggtgcatgggaatcctggctctgtcacttaacagctgtatgacattaggcaagtacccagaatctctagtttctttatccgtaccaaggagctaatatcgccttgatgggtgcaaacccatgaagactactttcgttaattaacaaaagtatgtagagctgagagacattttctctaaagccatagatttttagaaaatttgttgctcaaattatcagtaagaatggaatatatcactcttacctggaggatcagttactttgatgcagaagagcagcctcaatttctaacgcaggtgcagagcttcagataaggggtttccagacacaacattccacatttatcttggcatcatggtttccaaggaaacaggatcttgttagctggggcctgatgataatccctttacacatagcctggtgtgtttgggggctatcaaaacactgcttctttaaaaatttatctacatttctttcccccaaatcctggaataactcactgtcttcctgtgttttgtgacatgctccatgattcttttggtgtgcagtttcccttgcagcagcaagttaataaacttaactttgtctgactacaggtggtctttatcagatgggctttatcttggagattactgataacgtacacaaaatgtgttcatactgcctggcacctaacaggcatttaagcaatgataaaattattatttttattattcatgtgttaattcaataaatgtttgtttgacatccagtatttgcaaggcacagatttactgctatgagagatgctcactgcaacctctgcctccctggcttaagctacactcctgcctcagcctcccgagtagctgggactacaggctcaggccactatgcccagctaatttttgtatttttggtagagatagggttttgccattttgcccaggctggtctcgaactcctgagctcaagcaatgatcagcctgcctcagcctcccaaagtgctggaattccagttgtgagccaccgcgcccagcctaaaaaccacttttattttacatggagaaagaaaacaatatttttaattcctaaaagaaaaatatctttactgaacttcactttaaatagtgtcaaatgtaaatgaaaaaaatcatcagtactattatataggtaaaaaagtgcaatttacatgacttgcttaagatttgacataaaactacagattctaagaaacggtaaggttttataataataaccaaaacaggctgggtgcggtggctcacgcctgtaatcccaacactttgggaagccgaggcgggtggatcacctgaggtcaggagttcgagaccagcctggccaacatggtcaaaccccatctctactaaaaatacaaaaagtacccgggcgtggtggtacacgcctgtaatcccagctactcgggaggctgaggcaggagaatcgcttgaacccaggaggcggaggttgcattgagccgagattgcgccattgcactccagcctgggcaacagagcaagattctgtctcaaaaataaaataaaataaaataaccaaaataagagtccccaaatgtcatccgtctctttctagagacagggaaaaaaaatgctctcataaattctccaacgaaaaatagagatagtcacccttaaaaaatcctaaggctggtgggtggattgcttgagcccaggagtttgagaccagcctggacaacatggccaaaccccaacactacaaaaaatataaaaattagctgggcgtggtggcgcacgcctgtaatcctagctactcagaggttaggtggtaggacctcctgagcccaggagaaggaggatgcagtgagcagagatcgcgccactgcactccaacctgcgtgacagagcgggaccctgtctcaaaaaaaataaaataaagaaaaaatcctaaggccatatacaggctcattcactttgggtctcctttcatccaggcaagcagctttctgtctttgcattttccaaagactacaaagcaggctggggtggggtggggtggggtgtagaacacaggaaacgcagccagttccccttcacttctcactatcttgatctcctcccaaaccaaaatcctatgtctttccttttaacataggcttacaaaaatgcagttttctgtgggaacattgaggtcatgcattccaaattacttaagggaacgatttttaaattttaggaatctagttctccaagatatcccggcttgggatatagatgaacgagctatttgggagagatttagacgagaatgaattttagagaagtagcgaggtgaggagagagtcagcttagcgtttgggttttgcagtcaaatttcagcaaggcgaactaacctcgctggtcttaattttctcatcggtaagagggaaaataataatgcttactttgatgaattactttacttcaacatttaaaaaaccgactctccgttatctattctaatgataaaaatatagatagagcatcgtcccctgctgtgaaaaatcttatgaacaagtgaattgcggtgaggattcacatagtatgtgctcaataaacattattttattgtttagattagaagaggggtggagggagaaatgaaagtggtttggaaaccccaaacactaccaaagccctggggatggaagtagagaggaatttcgggttacgatttggttccgggtctgagtttcaacgttgaattctcccatatttgggcctgaattctcagaacagaataggatgtaagggctgagatcatctggtacagttttatgcaaatcgaaaattcttgcctcttgtcactgtgccctggcgagaaacaacacctccacccaagctcatccaatctcagccccaactaggtgacgtcatctccccgccctgcatccccaagcctcggggagtcctgtctctaagctacagtcccagctccagtcccagctccagtcccagcggcgcctgcgcactttggaccggggcggggaggacgcgtgcgcgccgcgtgagggcggggctagtgcgcacgcagccttagctccttccccgcccttgctcttcccagtttctccgtcagcctgcgggtcccggctggcggctgcttccggtaggagagcggtgtagagcgagcaggtctcagctcctcgtcatgtcatacggtcccttagacatgtaccggaacccggggccctcggggccccagctccgggacttcagcagcatcatccagacgtgcagcggcaacatccagcggatcagccaagccagtgagccggggtaccgagctggggggcgggagctgtcccggggacaggcctgggtgaggctgccgggacgcagggcccggctggggctacggccgaggccacacctggggctgtctcgggctgtccaccctgggggcggtgggctgccatcccccaatctgtcaggcccgggttgcccgagggtccccggccccagctgaagcttgagctgcttctctggagttctgcccccacggtgctgggaccaaaacagccgacttgacagcccgagggtgggaaggggagtgtgtgtcacctcgagagctgtgagtgcgttgacttggcgcagtggtcagccgagtttctcctgtcacccaccttcctccccacccacctcgctttcctcttagaccagtttggatggggttgtttactgatttagcctttaggtttacattctgctcagcccctggctcctcggaaatcagcaactttcaattaagggaagtggagagtgcatgtgtttgggtgacttcatacacagttcttcctgtaatgaattcggaaatcagacacaatgactggtatttgaaaggtgggatgacttcattttaataaagagaattcaccaacagcatttcaatttacattattttgtcttttgtaacaaataattggggtgtatttttggatttcaggcagatgaggcttttgttttccttccctacttagctgctcttgaacaaatctggtacacagggaagctaagacacttagccacaaccacatagcaagtaaggcatggtagagttgttggtggaattcagaatgctattgcttgtcttaaaactccctcctccccattagggtctgagtgaaactgtagctgaatgagtcaaatacagggtgtttcttgtgcttgaaaatcatcttggagccttat

SEQ ID NO: 4102 - DNA, 6000 bp, Homo sapiens
gcacgttgtttaggacattatgcggatgatctcaggtagcagaactatggaaaccccggctcagtagcgagtccatcattctcaaaaccccaccagctatgtgctattccagatgagaaaacagcagctcagagaggtgatacacagctggtgtctaagctgcagtctgactccaaaactcatacatttaactctgtcccctgttctaactcctgccatggtggccaagtgcccaggtgttgtcagatgagtgactcaaggaatgtaagaaacgaatgcacattaccgtgtagcatatcacacaaccacgcaagaatggtttcgttgcagtgttcaagctctccaagagaagagtagtctttgaaggattaggaaagcttcatgggggaggtgctctttgaagtgtggggaggatttacagaagtgaaaaggagaagggtactccaggtggcaggcacagaggtgggaaggtatgtggtgcattcattgcagggcacagggagaaagtgggacatggaatccgggaggccttcagggaggagatacatttgggcctgtctacctgcctttggggcaatttgcaggttttgagaagtagaaatgagggtctggagagggcatctgtgagcctcttctgggaacccctcccttgtaggtgtacattgtcggccacgtgcccccggggttctttgagaagacgcaaaacaaggcatggttccgggagggcttcaatgaaaaatacctgaaggtggtccggaagcatcatcgcgtcatagcagggcagttcttcgggcaccaccacaccgacagctttcggatgctctatgatgatgcaggtattcaacctggagggcaactgccagctccctccctccttctctccccagacccgctcagtcctgctgtctctctcctgacaggtgtccccataagcgccatgttcatcacacctggagtcaccccatggaaaaccacattacctggagtggtcaatggggccaacaatccagccatccgggtgttcgaatatgaccgagccacactgagcctgaaggtcaggagtcctgcggaggccagaggaggagggtgggaggggcttaaatgcatcaccaccttccctcactctcagcttatccaccttcccctgaccactgagcctcaggaaggttgagctccttccacccttctccagctcaggatcagaaccctggaggcacctgccaccgagtcagggcagtgcctcaccaagtcaccttttcccctggatgactgtcacagcttcatacctggtctccctgcctctggccctgccctgctatggcccatccgctacacaagagagaagaaactaatctcctatagcaccactttcatcttgtctccgtcctgctcaaaaaccttcagtggctccccagtgccttcaagataaagttgtgtctccttgacctagtactcaaggcttcccacagtctgacttcaagcccattgtccacattttccgtacacagacgaggctccagcccctaattctttgggcagtccctcacctcgtaggatgagcttgtggttgttgagatgaaaaatattattcctttatttatccaacaaaatgcattaagtgtgtgccattggccaggccctgttctaatctcagaagatatgtaaatttaaaaacaaagtcacccctctcctggacctgacatcttacaggagagggacaataaatatgtagaattaattatagtactgagagaagggctaaggagaaaatcaaaacagtgaggcgacagggtgacagctatgggaggtgtgtactgtgttagataggtgggaaggggaagtgtccacataaggtgccatttgagttctgagtgtattgagggagggagcccagtgggtatcttggggaggtggagggaacagcaagtcaaaggccccggggtgggaatgtgcgtggtaggttaggggaagagcacggaggccatgtggccacagtaagaggcacaaggggagagtgggaggggaggtccgatcttgcaggcctccatgaggactctggatttggagggttttgcgcagaagaatgaaatcctgtgacttataattttatggaatcatcatgtctgctgtgcagggaacaggctgtaggggcaggtgggggagcagtgaggccgtttggagggaaggacaaatcccagatgacaggatagtagcttgcccagggtggaggcagtgagatggtgaaaagtgccaggtcccagatgaattctggatgcaggatttgctagagtggatatgagctgtgagaaaaagggacgaatccaggaggcttccaaggctcttggcctgtgcaacggtaggctgtggctgccgattactgagataagtggcagggtgatcaggcttcggagggtcagtcagaggtcttgttttggacctgttacctttgggagggctaaatggcatcaagtgaaagtggacagggaaggggcaagttggagcttgaagaggtgaggatagagatgtgatctgggagtggagagaggacatttaaagccaacgactgcatgagctaacccaggtccttgattctagtaaaggtagattaagaagaggtctgaggggtttaaagagtggcctgttgtccacatgggcactccaagggtctgagcaaggggaatggcaggctgcaccatcaccccctaacaggccctccattctcctcagggagggagtcagccctgagcttgaatcctggctccaccactcataagctttttgatcttttgacctctgtgcctcacttgcttcatctgtaaaatgggagtaacagaacctcgcagggtttgaggaggactacatgaaataatggaatgttcctggcacagagtggccatgcatacgggcagctcctcttaccccgtctgcagtggcctgaagcaggttcataaatgtacctggaacccgctggactgatgaaccctgcagagtctagccgtgaacatgcacctgggtcctaggagtctacagttcataatctctctcatgcttagtgttgctctttttatgttgcttttatctattcattatgtaaatatttactgagcgtcttctatgtgtaccctagcatggtgggacctggggtaaacctggggtccaatcctgctaccactgaatacctgtatgaatacctgtatgaccctggccaagtgaattaacctctttaggcctcagtttcctcatttgtgaaacctaggtaataagcgcagttacctcattcgattcagaggatgtctgccaagcacaatgggtgcacagctaagtgctcaataactactagtggtcatggtcactgctctaaagaacttgggggcaaatgcaaggtgcaggatggggatggaagcagacaactgctcacagccggtctaccccaaaccctttttccaggacatggtgacctacttcatgaacctgagccaggcgaatgctcaggggacgccgcgctgggagctcgagtaccagctgaccgaggcctatggggtgccggacgccagcgcccactccatgcacacagtgctggaccgcatcgctggcgaccagagcacactgcagcgctactacgtctataactcagtcagctactctgctggggtctgcgacgaggcctgcagcatgcagcacgtgtgtgccatgcgccaggtggacattgacgcttacaccacctgtctgtatgcctctggcaccacgcccgtgccccagctcccgctgctgctgatggccctgctgggcctgtgcacgctcgtgctgtgacctgccaggctcaccttcttcctggtaacgggtaacgggggcagcgcccaggatcacccagagctgggccttccaccatttcctccgcgcctgaggagtgaactgaaataggacaaccgaatcaggaagcgaagccccaggagctgcagccatccgtgatcgcgccactgcactccagcctgggtgacaaagccagactctctccaaaaacaaaccagaaacagaaaagaaatgacgacccaagacccccctacaagcatacttcttttgcgtattatgtttaactcacaaaacaaagctcatcatgcgtttgattctgtgttgtgttccttttcttttcttttgagacggagtctcgctctgtcgcccaggccggagtgcagtggcgctatctcggctctctgcaacctctgcctcccgggttcaagcgattctcctgcctcagcctcctagctgggactacaggcgcgcgccaacacgcccgactaatttgtatttttagtagagacggggtttcgccatgtttgccaggctggtctcgaactcctgacctcaggtgatccgcccgcctgggcctcccaaagtgttgggattacaggcgtgagtcaccgcgcccggcctctattcccttccgtatggaaatgaggttaactcatttgcaggaacctaacgcccgccctcccccgactcggatcgctggcgtgaacccagcggccccgtgctctccgggtatccctggatcgaggcgcacgcgttgttgcaaagtctcgcacttagggattagaatgtgcctttgcgtttcgttttgttttgcaacaatacaggtgtgagggatcgcagccctggtccaggctctagtctccccgccctctcgctttcttgggcctccgggcgcctcaaaggtaaaactaggccatttgaagcctgcgaagcgaagggcagtcggtcttcaggcctagcgggcttggctgggctgggtcggtggacccctgggctggcggcgggagcagagcatcgagcggcttttagctggggttcgggcggaggacctgggacaaccgcgggcctcgctcctccccggacggggcgggacggggaagtcccgcccaccaggcccaggccccgggccgccccgagggctgcgcccacctccttcctgcctcggcaaccccgggccctgagggcaggccccaaccgcggaggagcaggagagggcggaggccggcgggccatgccctggtcgtcccgcggcgccctccttcgggacctggtcctgggcgtgctgggcaccgccgccttcctgctcgacctgggcaccgacctgtgggccgccgtccagtatgcgctcggcggccgctacctgtgggcggcgctggtgctggcgctgctgggcctggcctccgtggcgctgcagctcttcagctggctctggctgcgcgctgaccctgccggcctgcacgggtcgcagcccccgcgccgctgcctggcgctgctgcatctcctgcagctgggttacctgtacaggtgagtgcttcgccccgggaggggaggagtgtcggagcccagcacctccgtcagctgggtcacctgtacaggtgacacgccatatgccgggaaggggactgggagagggaaccaagtcctgtgggcgcctggcctacaggtgagcgtgcagccctttacggaaagggaatcccggtagactgccttcattctagccctagctttcctggcacaggcgaagaaactgaggcccagggaagaaagggaggcgcatgggctttgaagtcggacctctcagggatccacttctggctttgccccctctcgcctcacttctgcatttctctgagcctcagtttcctcctgcgtagaaaggaggtagtcaccctgagacaggtgtgacgggcaggcctgttgtgaagagtgagcgaaagaatgagaaagtgcctcgcacagtgcctggcctgtaatggcaggggctgcggactcagttcagcatcccatgtttcagcatgggcagggccttgggaagtcactgacctctcagtggggctgtttggttgctgttcccattgggatggggatagcgcctgcccgtttggtgaagatgcagtgaaatgacatctgtccactgccctggctcagagtgagcactcagcaacctcagctggcttcttgacctgggcc

SEQ ID NO: 4103 - DNA, 6000 bp, Homo sapiens
aggactgtgtctaccctggttccccccaacagtggggatgaactcaagaatctcccaagtggccgggcacagtggctcacacctgtaatcccagcactttgggaggccaaggcgggcggatcacctgaggtcaggagttcgagaccagcctgaccacatgaagaaaccccatccctactaaaaatacaaaattagccaggtgtggtggcacatgcctgtgatcccagctactcgggaggctgaggcaggagaatcgcttgaacccgggaggcggaggttgcagtgagccgagattgtgccattgcactccagcatgggcaacaagagcaagactccatctcaataataataataataataataataataataataataataataataaagaatctcccaagctccaagtgagtcattgccctacaccggggtggtggggaaactctgctgaacagaggcagacggagtatgtttttctgggtgactttctagtctttgttctgggaggcatcatagtctagtagtcaggagactggggtttggagtcacacagatctggcttggcatctcagttctggcttgggtaggtaacctaacctctgcaaaatggaataataataactctatatgcttataggactgcttggggattaaatgagataatccacatagcatttggcccagtgcctgccatagaacatgctctccataaatggaagccaacagcgttgttatatgaatttgtgaccacagaaatgagactgccttttaaagataagtagactagaagtccaggtgcagtggctcatgcctataattccagcactttgggaggcttgagcccaggaattcgagcccaggagttcgagaccagcctgggcgacatagtgagacaccatctctacaaaaaaaaaaaaaaaaaaaaaaaaagccaggtgcggtggctcacatctgaaatcccagcactttgggaggccgaggcgggcagatcaggaggtcaagagatggagaccatcttggccaatgtggtgaaaccccgtctctactaaaaatacaaaaattagccaggtgtggtgttgcgcacctgtagtcccagctactctggaggctgaggcaggagaattgcttgaaccctggaggcagaggttgcagtgagctgagatcgtgccactgcactccagcctggcaacagaacaagactccgtcccccacctcaaaaaaataaaaataaaataaattgatcatttccaagttttcattttagaaggtcattgtggaaaaccctctagaagcctttgaattttcatttgttcctccaatgtccagaatggggaaattcacttgcactaggcatgtatgttttcttttcttttcttttcttttttttttttttttttttgagacagtctcgctctgttgcccaggatagagtgcaaaggcacaatctcggctcactgcaacctctgcctcccagattcaagcatttcttctgcctcagcttcctgagtagctaggattacaggtgtgtgccaccaagcctggctaattttttgtatttttagtagaaacggggttttgctgtgttagccaggctggccttgaactcctgacctcaggtgatttgccctcctcggcctcccaaagtgctgggattacagatgtgagccacggagcccagccaacatgtatgttttcttagcaattatttcactcatgtacttggtcatttacatatcttttgcaacttcttttttttttttgagatggacttctgctcttttcacccaggctggagtgcaatggtgccatctcagctcactgcaacctctgcctcccagattcaaacgattctcctgcctcagcctcccaagtagctgggattacaggcgcccaacatcatgcccagctattttttttttttttttttttttggtatttttagtagagacggtgtttcaccatgttgttcaggctggtctcgaactcctgacctcaggtgatccgccctccttggcctcccaaagtgctgggattacaggcatgagccaccacacccagccctctttcacaacttcttgattgtgagcttctttaaaaaaaaaaaaaattacgaagtaaccaaagttggaactgagcttctttattcagtcactcatcaagtaagcacctgtgtgtcagggcttgcactaagctggagggcacagaaacacacaagatctttttatgtttttttcaacttattattattattattattttgagacagggtcttgctgtcatccaggctggagtgcaggggcaagatctcgactcactgcagcctctattttcccagctcaaatgatcctcccacctcagcctcccaagtagctgcaactagagacacacattaccattcctggctaattttttttttttttttttttttttttttgtagagacagggttttgccatgttgcccacgctggtttcgaactcctaggctcaagtgatctgtctgcctcagcctctcaaaatgttcggattacaagtgtgtgccaccgtgcccagcctttttcaatttttcttgtagatccaagggatccatgtgcagatttgccacctgggtatattttgtgatgctgaggtttggggtatgaattatcctgtcaactaagttactgagcatagtattcaatggttagttttacacaatacttttttgtgtgaaggtgatgcacaaaaaatccaatgattacacaataaatacatgggaaactattaatatgtaaagaagaagtacgtgatgctactgcataataaggagagctgggctagttggaggtggggtggggatcagggaaggtttcacaaaggaagtgatatttaagctgaaatttgaggggtaaataacgcttaggctggggtattggcccagccttccgagtggaaggaatagcatgtacaaatgtcctgaggtaggaaaaaacttggcttggagggttagggaggggaccagaattccaataaagtagccctccttcttcctatcccaatttctctctgctggcactagaaaagtttctgagtaccaggccctttgggaaagggagagagttttggcagcaggtgaccacagcaaaaatctttctgataagtccttaggtggttgagtgggaaagccctggggtggggggcttgctgtagttggtagaagtggctggacagcagctaagtggggtggagaaaatggagaagagggtgagcttgggaattctggctttgcttttttctgggaaagggtaggagccttgcacatatatggatgattcaagctagagggtgagatgagggagagctccttgtccagccacacacagatccaagagcattgccccagagcctagagctcagaacccctaatattgttccactccagttccctttgggatctttattatccaaaaagtatttcttgagcacctgctgtgaccccagccctctcctggatgcaggggtcaatcagacctggtccctttaaggagggagaccagttcggatagaaataattactatatgggataatttagtgctgagcactaaatctgtaacatggggacaataataatagaagctacaccaaagtgttggtgcatggataaagtgcttatcacagtgcctggagcaaagtaatgcttggtagaatgttctggaaaggctaggcaccccaagaagaaggatggctctaatctggaatggttaggtcttggaaggggtgtggcaaggatgacttagccaagtgccccccttctatctgctcgcactgcagccagagtgctccttaaggtggtcttcaagagcctgcccaccacctcatcgccccctcacttcctgccttctcctcttcctggcttcctttcagtccctctgcttcctttatccggaatcctcttcccttgttacttccttaagttagttcttccccaaacttcacacctcacctcaagtgtcgtttccccagggaagctgtcctgacccctgggttttgtagaccctgccactttctcaattcgtacctatatcttaatgtcattttagggttgctcgctctctctcctgcactgggctgtaagccccaggaagcagaggctgcatctggttttgtgtactagagggtccccccaaatacccggctcttctattaggcaccctcagaatttttgttgagcgaatgaatggggtgcaagaaaggcacggataatataggttatttacggagcatgtaactgtccgcagggcactgctctaagctctttgttcgaatcattttattcaatctccccaaccaccctctgagggaggtggtacgattttcctcatctcacagacaaagagaatgaagctgagggaggttaagtgacttacacaaggtcactccgcctgttagtgcaggggcgggaggcgggatccacacccaggtccctctgacaccaaagtggcaagggggtgggaggggagtccaggttgggacggggtcgcactcgagccggcggagcatccctagggagggggcgggaggcctcccctgcccagctccgagccggtggtgcagcgtccgcccccggtcgcgggcgcagactggcggccgcctccgggccacgtggtgcgcgcggcgggcgcgtccgaggagcctgcggctgctcctggctcacagcgctccgggcgaggagagcgggcggacgccgggggctgggccggtgcgggcggcgaggcaggcggacgaggcgcagagacagcggggcggccggggcgcggcagccggcggcgtcggggccgcggcctctgccttgccgctcccctcgcgtcggatccccgcgcccagggcgcacggtggagagggacgcggcggagccggccggcagccatggaaccggccccctccgccggcgccgagctgcagcccccgctcttcgccaacgcctcggacgcctaccctagcgcctgccccagcgctggcgccaatgcgtcggggccgccaggcgcgcggagcgcctcgtccctcgccctggcaatcgccatcaccgcgctctactcggccgtgtgcgccgtggggctgctgggcaacgtgcttgtcatgttcggcatcgtccggtgagtccgctgcgggccggcgccgcagggctggagcccggggtgagggtggggatcacgaacttgagaccccaagcccgttccctggactccccgcgcctccgcatttcctgcaggggcacctggggcccagcgagaggcgaggccacttacatcgaggggaacacaggaatgtgtgtcatcgtgtgtatgtgtgtgtgtggtgcgggggggggagtgcgccgcggttgactaaattacatttgatcatctgttggcatccccttgcttctttgtgggacagtttggcgtcagtttgtgtgtctgtcacagtttgtgagtggatggttgtgacagtacaactgtatgtttggacgtcggaaacatgcccatggggtgggcagagctgctctgaggtgccgcgggcctttggggagaccggtgtgagggcaccgtgcaggcagggcggacaggagggtgctgggtgtcagcacctcgccgtggggcccttaccaagtcatatttggtgctcatctgttggtgtgagcttgtccctaacggtcagtttgtgattctgtctgaatgtaacaatgtgactgttgtttcttgtcaagctcttgaaaccccgagggcggcagagcatccggagtggccgtcgtccctgtgtttgtgcagctgtgtgtgcctttgccagtgattcctggataacatgggcgacagctgtgggccgccaaccggttctctgttcccttcgccagtgcccatctggtcaggaattctgaataggattcagagaagactcacgccctcctcacaaatgccctctcccattttctctttgcctcctctaacagtcttttcttctgccagaggcagcagaggttggtctg

SEQ ID NO: 4104 - DNA, 6000 bp, Homo sapiens
attgtaaaaaactctgttcagatgtaagacaggaatcacaaggagaagggtcctctctcaaaatgctcacagtgtagaaagggattaagtggaacactggaaatgcctgtaaaaaggtgtagccctatgaaggatctagtctgatttttggtgtagggaagacatgaacattactaaaaccccagatcgagctgtggctcgtgccagagtgcaatgctgtagtctgaagagaagtgctctgggatggggtgggatggggtgggggctcttggaggaggtgctgttagagccagccctgtgattcaaaatcttctgtgtgcataaaaataatccgaggtcccatcttagacctactgaattagaatcttgcggatgggggttccaggaatctacatccttacaagctcccaagaatattctgatgcaggtgtcccaggaaacaggttttaagatactgagccagggctttgaaggataaggaagagttcctttcctggattttattgacttgaagcttgccatctccaagcctttcctctgaggaagagagcacagcaaagtactgtgagctagatttggacaaacctggctttatgtcctagctctgccattttccagccatttgatttcggacaagtcaccaggcctctctgtgtcttcactttcttactcttaaaatggaaggaatactagttatctgtttcaagattgttgtgagggtcaagtgagatattatccacttgaagcatttagtacaatgcttggcacatggaagcatttgataaatattatcgggggttattgtgattaaatgagaaatatcacacataaaaccctcagactagggtctggcttatagtatgtgctcactaaatgtctgtacttgtttttattattagagaaagttggtgtcccatggtgggggaaaggcttggccccacatttatgtgccagcacacacacgatgaccagtcctgcttacccttttccccagtgacacataggcttacttgaactgggaagtacaacgtaaccttctgttgtaagactccctaggtgacattgagatgtcgacattctcttcttcaccaaattggctcctctgaatttctggggagcccagtcaggaagcctgaagaatcatccagcaagtcctcctccttggggctggactttagcctcctgtgcatcccaatagccctcacttttagtctaggccatctgggttcttgcaggggcatagtttgagaactactgactgaggggttcaagtccaatttcctggacttgcattcaagattctttgcactctgactcccacactgcatttccagcttcatcttctcctgttggaccgtgcatagcctgtgatccagctgcatctgatacccgtcttccccagtgtgtcttgtgcctttattcaggccactccttctgcctgaaatgctgttccctgcctcggaaactccaggttcagatgtcatttctttgatgtttcaaaactccctaggtcatctgctgctgcctttgtgttttccctggagctgtgttatggcctttagtacatcgtctcttatttattcccctccaggcaagactggagccatgtttggtttatctccataacaccagcacccgatatgagcctggcacagggtaggtgtcataaatattccatgagttgcaggtaattgaatttcctcatggcctagaacggtctgtggtgccatctccttttccctagatttgggctggtcactccaggccaggaatttccttcttccttcttctctcaaggattatagaagtctgtggtctttttttttttttttttttttttttgagacagagttttgctcgttgcccaggctggagtgcaatggcgcgatcttggctcactgcaacctccgcctcccaggttcaagcaattctcctgcctcagcctcctgagtagctgggattacaggtgcccgcaactacgtctggctaatttttgtattttttttttttttagtagagacagggtttcaccatgttagtcaggctggtctcaaactcctgacctcgcctctgcctcccaaaatgctgggattacaggtgtgaaccactgtgcccggctgaagtttgtggtcttttaaaagtaaagcagaaagtcctcttctcatctgtctacctgttgcttgtgttctctttctccctccattatagtctctgccatcttcccctgcacaaagggcaaagggatgtggaatcagtcagatctgggttcaaatctagggcccgccgtctatttactagctgtgtcaccttaggcaagtgtcatatgctctctgaacctcagtttccacacccgtaaaatgggatcactggtaaaactcctattttgaggctctctcaagagccctctgcaaacagcacccttggttgtttcttctgttcactggttttctctccttgagtttccttttctgggtgggcctctctggctcctctctgctccagcgtctctgtatcttagtttcttccctaaggtttccccttggtttcttcttgcttctgcctccctctccctatttaattatctgtgtctaattcttgcctgctgtgtcttttggtccctttcctaactcagtgtggagctcatcagctctcacaagagaggagaccaagagcccaggaactctcaacccagcgatacctcctccagccccagggcagcttcaaggtgtgtccatctcagcatgaagccagctaggaggggcagggcacagggagggcctacatataccttgaactcctacgctttgttcagtgtcactgcccagtggtcagacccatctgcccatggctttccctacttcagcagtctttatagctggagctgtaaaaaaaaaaaaacaaaaaaaaaaaaacccagagatcagaacttattactccttattactcctctgcttaattactccacttcagtggcctcccattaattactcttagggttgaacctcaagccccttccttgctcatagtttcttgcctgacctacagaccctgctgacttgtctagctgcacctggctcccttctgcccctgactcactccatgccagctgcccggcttccttgcagctgcttgtacccaccagctcctgcctttgcacaggctgtcccctctgactgcaatgttcctctccactgatttgcatgaggttggctccttctcatacttcaggtctcagttcaaatgtcaccatgtcacttctatagcaaagccctcttggaccacttatctaaaggagatgccccttccctatgttctttatcattatactccctcgtttcctttagcttgcatatcttagatggtaatgatatatttatgtacatgtttgctgttgggctctcctaatagaatgtaagattcatgaaggctaggaccatttccctttcattcattccatccagtcagtatttattgagcatcaattacgtgccagaggccgggcgcggtggctcacgcctgtaatccctgcacattgggagactgaggcaggtggatcacctgaggtcaggagttccagaccagcctggccaacatggtgaaaccctgtctctactaaaaatacgaaaattagccgggcgtggtggtgggcacctgtaatcccagttacttgggaggctgagccaggagaattgttggagcctgggaggcagaggttgcaatgagccaagactgcgccattgcactccagcctgggcaacaagagtgaaactccatcttgaaataaaataaaataaaataaaataataaaaacatgccatatactgggcacggaaatacaagatgagtcttttcccaagggagctcatttctagaggtggagacagataatgaactcatcatatagcccgcactctatttgaaattgcaacaattccccttcccttccctgtccccccaccacccccaaatttcctggtgtatgagacagtgataaaggacgtacaccagagggtttgcttttttgtttttgtttttttggttgtttactgttcttgtcttcccactggaatgtaaggtccatgagagtagggaatttttgtctgttttatatctctaccctggcctatagtaattgttgaataaatgaatagaccccaataaatatttgttgaatgaataggtgtccagatgggaggaaggtctcagcccctattcaattcaaaccaaacaactttgattcaaatctcggtgctgtcaaatactgttgcataacagtatttatgcagtataattattgcatacctaatatatgatgattaaatgagtccatgtgggttaaacacatagaaggtacctggtcttacatagtaatgagcaacgagtttgcagatcatagtgcgagggctcgttctgggtagaggcccaaatacatttaacctgtgtagccagaaggtagagtaggaccagtgagggctagtgagggaggtagacttgcacgtcatgaaatgaaaaactttctaaaagccggcgtttccaaagccccaacaaccgctcttggccaggtgatgagcgccctgttcctggaggtatgtagaacacgcatttgaaggcgccaaggtacaagggattcaggcatcggatgggacagaggccgggtgtccctgggtcaccgtccctgagagcgctgtacgggagctaggcgtgggccatgagcgtgctcgcctggcagtgttggtgcccggtccgtggagacgtccgtgggcgtccagacccagccgcggggcctcatggcggggaggatgcgggagcgggggaggggcgcgccagggctagcgggcggccggacccgctgcagcacccgccgtggccagcagggagcgccgcgagaccgccgaacccgcggccgggcctgacgtcagcgccccgcttgctccggctcgcgctctggactcggcgccagtcccgctccgcgccgcgccgctccgctccggctcgggctccggctcgcctcgggctgggctcgggctccgggggcggcgtcccccgcgccgggccccgggacgggcggcgacgctccaaccatggcccgtgcccaggcgctcgtgctggcactcaccttccagctctgcgcgccggagaccgagactccggcaggtaagcgcgcggcggccggaccgagcctgccccgccgagcctcggggcccgtggcgtagctcggaagaaagtgtgagtgttgagtgaccgggcgttacgagcgtgctccctgtgtgtgtctgagcgtaggatgggcgattgtgtgcccggggtgttgcgtgactgcgaatgttgtgtgtccgtgagttctgtgcgcaagaaaaggtgatgtgtgtcggcgagtatgttgggggtgaatgttgtgtgcatcgaggcattgggtgtgcgctgagtgtcttgtgggtctgccagtgtgtagtgtttgtgtggccaagtgggttgtgtgtgcatctgagtttggttgtgttgcgggagttgtatctgctaatgtgttgcatttgtttgcattttgtatgcctggccgggagtgctgtttgttttgtgtctgcgagtgggttgtgtgtttgtgttatgcctgtggccaagggtgctctctggatcccgcctgagtgtggatccgggaacgcgtgtgtggcgtgtgtgcttttgagatccgtgtacatgtgtgaaggcgtgggaacgggtccggaacgtgtgtgtccgtgcgctgtgtacgtgtggggagtgtctagggtatgtggtgtgtgctgccgggggccgcgtgggtccgagtgaatgccaagtgtgccgggaatgcgtgtgtgggagcgagtctggaacggatgtgagtgtgtgcgaatgtgtccgtgtgtgctggctgcgcgtccaggaatgttgcgagtgtggagcgcgcctgggccgcggctgcgagtgtgccctggtcccggggccgcccgagggggcggtggcaggacgtgtgtgcgcgcg

SEQ ID NO: 4105 - DNA, 6000 bp, Homo sapiens
gtttcacccatctttttgtttctcattgctcctcttcatgggtacactctcaggccaaactagtatttgtggcatactagcttgcagcaggcctttcaccatgtccaccccatgcctgtgctcatgctgtcccctctacccggaatactgccccttcttcctctcccactcctgcctagcatgtctcattcaaaggctagctgtgagctcctgttcacccctcaatacctagcccaaattgcctctggaaattttttctgtttatcttggtctttctctgccctgctaaatattttccttaaatgtctggtgatccaggttatagtttgaaaccccagctccccacctttcccaccacacacacacacacacacacacacacacacacacacacacacttcccaggaagaacaggcccctcctctttccttcccccacttgtgtgtccctgtgtcaaaataatcataccagcacacatttactatggccattgtttattactaatattatttattattttagggtttagatcttttgcagcccccagcaccaatacatggctaaaaacaataccaaatgccacttaagtgtcacgatgtctgacaaatgatgaccacttggacttcttaaaatgttaaattatttttaaatatgtgcatgtgtatgattatgtctgtctgtgccaggacccttaatttagccacatctgcaaagccccttttgccatggaacatagccacatgttctgggggttaggacgtggacatctttgggggccattttagcctatcacagagatgaaggaagtgaccagcccaagatcacccagtagtaagcagcagagtggcagtctaatccctgtcttcctgaccccaaagcctggctcctgacctctcctcaacaccaggggcggggtgggggcaggtgggaggagatgtgttttctgtggtttctgtgccttgttgttggtgctgtcccattctgcccccaccctgcctccacaggctccatcctgatgcatttcacaccacccctatccactcgtctccatgagggtctccctagcctaaccaggagagtctccgtctctgcagcctacccagcctccgagtttgtttgttgagtgagtatacgggtaagtggacagacagaaggctgccagctccagccccttcttcctggctcctgccactggcttgaagatgctctctaggccaggagtggtggctcacacctgtaatcccagcactttgggaggccaaagcaggagaatcacttgagcccaggaagtggaggttgcagtgagtcatgatcgtgccattgcactccagcttgggcaacagagcaagactgtctcaaaaaacaaaaccaaagaggaaaatgatctcagctttgggagtcacagagaatgcctgactctgggtcctgtgctcctcctctcctagcggctgcctgtctccttcaagccacccagaccctgaaggagggggcccatccagaggagaagaggcacaaaggctgaggacctggatatggggaacaggaggtctctgggtccctccctgggcatgagctcccagaggccactgctgttggcccaaagacaaaaacaccacagccgctcagtggcctcctaggctccgccctcagaatccccctttccaaaagcacagcccatctctgctggcctcccctcacccaccccacacctcggcctgctgcctgatctctgctcttctacaaagcacctctgccttccccagagttttcctatccacgtgcccaggtctgtagcggcattagcaagaggaaacccaattacattccaattactctagtcctagccagacagaggttactgtaagtcacagcaggatcgggaaggaggaggaggtagcacctggggccagtgcctagggtgacacttgaagatggatatgacagggacctgtggctcagaggctcaggattagatcaacaaggctggggctggctggtttcgggaaagaggtcgtgggggcccctgttgacagacagctcaagcacagcaaagccctgaggccagccctccctgggcagaggaggcacaagggctgggagcccagcctggacatggaggacctgaggtccctagggccctcccttggacatgggcatttggccagggttcccagagccagtgctgttgtgcccgaggaccaaaatcctgcagcttcttgtaggtcttctagaacactactggttcccaccgccccgcccccaggattttctctgagcatacacccactctctctcatgcccatctaggccaaataactggcctctcccacccttaggctgtggctaaataggccagattcaggaccagaggggctgcgaggcctagtgcctccaggccagcgccctggctcctgctgctggcttgaaaatccctggccagcgtctgataggggagacagggagatctgttgcttgtgatggcaggaatctcttaggatatcccttgacctggggagcagccatctttggggcaccaacggataaagggtgggggaaggttggcaattgagatccctcttaagtggagatgggactgactctgtgacattgtatactggggggaattctcagccatgatttcctccctacacagacatgcaccaccctgtatcatgacatgggggagcctggcgagccccttgcccactccaacccatggtatctgggaggccctgtaatatggagatctgcactctgggctaggttctaagcctgggctgtgctgggcttggccagtgcctaccgcccacacagacaaacatggatctgtaccttccacactgcgggctgaaccttgtttgccgcaactgttattggagtgtccccacacgatctgcctcccatccccctacatgctgcagccccctctgcagcccctacatagcaaacaatcacagctccaggtaggggggagaatgtggggggataagatgagtcattgccgtgggaacagatgtaccaagttccacatatgcacactcacagaaccttacacacaaaggcatggccacactcacattcccacactcacagggaaacacgctgggaggccagtgctagtcaaagccacagttgaacattcagatccacactgagaaacagtcatctcctcacacatacacattccccatagacacaaacgccaaaacacagggacagatcaagacccagacagacacatcccacccagagtgacctccagtcatcaacccagagcccaccccctgctcatatgcacagtcagactcaaacacactggattccctagacacacaccacagcccttacttgaattcaagactcaaacacaaacacacactcatgcacacatatgcagacatgcacacacccacacattcacacatgcacacacgcacacacacacacacacacacagcagcccctcttctgagtcccttcactcattctcctacctcggccagcacctagggaagacaagacatcacacaccatgcagatgccatacctgcccaaggacaaagttctgccttgggtttagcttcagtccatcctcctgttctgcagaggttaaggtcactggccccctcccttatgctgctccagttcctctcccacacctcctatgcctaacggcgcatcttcagagcctttgaaaagggctttggctgcaatgggaaagatggtggttgcatcccaggagtcacctcccaggagggaaacagtgtgagtttcagagggtgacatgttaggaatgtcctatgctgagctaggggatggccaaggtgactgcatgatgctcaggcagtcacccttcacctacctgtgatttccagaatccccaaccttcaaacctttgcacctgctgtttcctgaccttgaatgcctctcctcgaataccacaatcccccttgcaggctaccttcttattcttcaggtctccatggagatgtccctgctccaggaagcctgttctcatgccctggctgagtcggtctgtcctcctgtgccccacagcccccagggccctcacaccctcctcacaccacaggttaattgcctgggtgtgcacctgcctcccccaccagccagagagattttgcaggggagggagactgtgtctggtgagagaggctagaggcctgagaggggcagaggctcaaagcccagctctgcctctgctgtgcgaccttgggcaagtcattgcgccatgtggatccagtgtccttatctgtaaaatggggacaataacgaccacctcaccaggttgatatgaagattaaatgagagcaggcatcatatgcattatccaaacggtagctgtattattagaactcactgcctagcacacagcttaataaatcgttatttgtggaattaacgaacccccacttctgtccccaccggcgtccttgatttttggggggaacagtaggtataacaaaaagagaaactgggggcagataggatggggggctgggagatgggagaacaggcttctctggcatcgttgggagctagctgttacagcagcatccggagctaggctggaggcggtgcaggcatcctctctgtctcacccctgtgacccacctgtgccatcctcctcctcagttaggtgaggcagcaaggagaggcggggctgggctccacctctgcactgtggccctctgaagctgccaggcccgccggcacacactaagtgcgcccagaatgcggggtggccaggggcataaatgttgaatgaatgaggatggaatgaatgaacggatggacgcatgaatggaggtgggatggaagcttgaagtgggaggctagaaggaacgagcgtctccctccgccctgcgggtctcggggctggaagacagggagccaagaccgtctgggggctcccaccccgccctgcccctcccgccggccctccctccccgcagcgcgcagcccggcggagcccgcgccgagccacagcccgcgcagttgccgcggatcgtgctgagccccgcgagccgaggcagcgcagcctagggagggggctgccccggccccctcctgcagtcccggcccctagaggctcggccttcctcgcaggaaggcgaagtccccggtgccaggtccggggaccagcagccgagaacgcccgggtcccggagccaacaggtgcggggtgtgggggacccccaggcctgggatgggggttccaaaggacccgcggcgagggatgggaggagccaagagtctcggggggtaacctgggtgctgggagactggctcctcggccagcgctgctctcctctaggcaggctccgagtgccctcgctcccccgcgccttcccggagccccgccagcccccgaggtgcaggaaggtcccgcggacggagcgggcctgccggcgttcagtggggtatgaaggcgtcccctccccttccccaggggtctccagggatccgcaaccctccggcacctggccggggtcgtcctagcccagccgggggaaggaggggctgagtgcgggaggaggggaggggcggggagctgggctggctggatttatgaatggagagcgacccgcgcgccggaacagcggctcctggcggccgtcggggagcgtcgcggccctggggacccaaaggggcctcttagggggcctggatgctccccttgctcgcaaggggtcgtcagtccctccgcgcaccacccccactgtgtgtgtgttgtatgtgtgcgtgtccgcgagtgcccaccggagggtctggcaggtatggcgggtggggcttgggtctctaacacctcccttggcccgttttcccaacccaaagttaaagcctctgaactggctcaagaaatatttgcaatcgggatggcttctcctcccaaatctacggtgtttggtgggttcgaacagacctggcttaagagctttgtgaccttgagcaagagactcaatctctctgagcttcggt

SEQ ID NO: 4106 - DNA, 6000 bp, Homo sapiens; identical to SEQ ID NO: 1489

SEQ ID NO: 4107 - DNA, 6000 bp, Homo sapiens
tgaagataggcgaattccccaggaaatgagatcgcttctctgttcaaacaagagatgtcttagtttgggctctcccaaaagccaagcctgagacaggatttgcatgcaagttgtttatttgggaggccatccgaggaaacatcagcatgggaatgggcagtgagtcagagaagggaagaaagctaatgaagggtgtttaattgagtgagttacctccatgggcaacggagcttaatcctgctggggactgctgggaaacagtagaaaacgacttcacagtcatctcaatcaaaggctgaggaggctggagaatttataccctaacttctatcagtcactggttgagggcttttcccagtggggcatcagttcactagcacttccagcctacctcatatgtaggcagaggcccagaagcccagagagccccaggcagagtggcaggtgctggccattggacactggtcctgcctgctgtaaatcattgtgctgtactaggtcctcttaaccaccgaaaaggagtatgccaagaggatctggggcagatactgatagcacctgctacgtgtactgaccacttgatggaaccagatttaaaatgcagagctgtctggttactttcagtaagtcctgtggtgcccacactggaccatgactcagcagagattctgagcatccaggcaagagcccaacaggaaggtccttggccttggaactcttgttagcaaggggaaatgtggcagccagtggccaaagcttcaagaactgctcatgagccctcaatcctctaaaagagaggccccaaatggaactgagacaacccgcccagagacggcaaaacactgtgttattgagaccaatgattcagctttagtgtgggccgggctggagggacgaggatacctagaagcattgggccccagtctcaggaatggtgagcctctccatgacccagctcatgcagagcctcagaaatcgtagggagagaccaaggggcacatcccagtttcagcctcctcggactgagcttggaagcatgggtagagctggtggagtaggtctagaggcctaggaaaggaggcacatcataggggaagagcatgaccattcgtcccagaggaaaagcaaatgtccacccaacaggtcagagagcaacagcccacagagtggaagaaaatgaatgtgtgagacatgccagctgtaaatcaccatgtttatatacatcctctcaagcactcctcacaacagcaccacccgaccccttccacattcgaaagaaaggaaactaaggctcagagagaaaaaatgagttgaccaaggccacatagttagggagcagaaatggggtttgagcccaggtctgtgtggattctgcccatcacacaactctttccctgttttccaggtttgcctgttctctgtcatgcccaccttccacccttcccacctccagctccctcctggatttccagcatcccctgagtcccatccctcagtaaaagaacagccatgaagcctccattgaaacctctcacttgataataagcccactttcatgataacaaacccactcccatgataacgatgttaatccaactaacctaattacctcttaaagtcccacctcccaacactgttgcattgggggttaagtttcaatacatgagagcattgggggacacattccaagcatagcagggggagtgagtgggaaaagtggtgcataggttcatcacagatgtgtttggagttaatgagttcagtgctacgtgtgctgagtaagagccacatgaactatccagggtcacgaggtggcagcaatagttggagtcctcagccccaagctggtggtaggagccacagcctgtggagagtgcactgagagaagagaatccaggagagctctggagagtgctggcattttaggaagcaggcagagggttactggcagaggagaaagctccaggcctcaatttaaatcttacactttcagaaaggctttccctgcttcctgaaactaggtctggttctccattatacattttcttggcactgtgcttctcctttgtgactctatcacaattgcatttttagagttattggtgtgtgtgtgtgtgtgtgtgtgtgtgtgtgtgtgtgtgtgtttaatgtcttatttcctcctttgactgtaatcttcaagaggaccaggcccagaggttgaaccatgagaaccatgcttactgatttatttccactatcaggcgcaacacgtggcacatagtaggtgcttaatgaatatttgacgatgagtaaatgattctgtttatcaagcataaaggagccgacagtgttgccaaatccttgggtatgaagatgttgaagcattacggtgttaaaagcactggctctggagctcagctacctgaattccacccccagctctcctgattactgattgtgcaagcccaggcaagtttcttagcctctctgggcctcagttttcccatctggaacatggagccattggagttcctacctcatagggttatttctatcagtggcccaatcacctatcaaatcaccaaaaccagtgacctatgaaccatcctaggtcagcctcctgcctcacatcctacatccagtcagtcccccaagtcagtcccccaaagctgccagctgtatttaccagctatttcccaaatccaaccctcttgctcatttcttgcctaaatcattgcagtaactttcataccggtctcacaagcccctccagcctcttttctcaaacagaggaagctttctaaacatacagttgatcttcattattcacagattccgtattgtgcattctccagctcaccacaatttattcctaagccaaaatctacacttaagacactttcatggccatttataacatgcacagagtggcaaaaatttgagtctcccaatgcacgtgttcccagctgtggctgaacaaggtgacattctgccttcccctttcagctctaatgctataaacatgttctattggaggtctacttggtgccatgtttttctcatttcttgctttttgctggggatttgctgtttgaaatggccccgagtacagtgctgaagtgccatctagtgtttctaagcacacgaaggctacgatgagccttatggaaaaaatatgtgtgttagacaagcttcattcagtcatgagttatagtggtgttggctatgagtccaatattaatgagtcaacaatatatattaaacaaggtgtcttcagaaacacacataaaacagacttctgtattgatcagttgataaccacattgtaaacagaagcttgcaggaacctaacctcatatgtcctctaggaagaatgcttcaatattcactaacttggtgctcatggtgactcatagactataactaccttgaataatgagaatcaaatgtaccaatctgaccatgtctcttcctttttcctgcctcagcacaatacaaaatgtaaaaatagaaaaaagaaaagaattccctcatgcctccctctgcacccaagataaattcaaactccttagcatgacattccaggtccttcatggtctggaaggtctttgctgaccttccaggctccttgccatgtggtgtccccaccactacccagcccactctccaatgctcttccattatttttcacaaaggtcctctgcacgctatgtgcccactgcctcaaaggcccctcctcagcatctcttcttggtaaactcctatacatccttcaagacccagcttaaatgttaccttctccggctctccctctggcagaacttaaaactcccttctctctctgtgtcttttctaggacttctcacaatgttgtaactgatctctttatatgcctcctctctcctgtacttggcaacagctttttggaaagagcatggagtatagaaatgtgtgactctctgcagggtgtgtgcatttcacacatcattcattcaataaatataaattgaagcctaactggacaagacaccaggcaccatactaggcacaagggatagagcagtgaataaaataaagccactgctgcatgtgtgtgcaacactgtgcccataattgtggcctgtgtgtaagagtatgctcatgtgaagctacattgtgtttgcttgtggacatgaggtgtttgtggctcctggatgctttgtctgttgaatcctgaccccaagtgacctgctgatacagggcaccttggaagtcaattaggccaaaagaccgtgtctgtgcactaatgagaagctttccccaggtgcccctgcccaccttctccacctctcctgtggttcctgcctggcttgggtttggcctttttaacccaaagacaacatgcatccaaatgagattttctctagtgcatacgtctctctctccctcccttctcctctgccttccctgtatctcagaaagaaaaggcctaggaataaggaaaaggaggaggaagaaacatttttttgaggacataccatgcggcaggcctgtgctgggcagtatacacgcattataggcaattgtagacagggcttcccttgtgtcaggcactgttctaagcacttcacccctaaggctgggttaatccacgtatccaccctatgaggtaggtgttgttcttttcccactttcacagagaaggcaagaaatcacacagtgagaaagtggcagagctgggattcaggcctcagcttctcccacacaagcccacagatgggaggatgaacaaggagtcagagtggacctgtggctctcccctgagaggataccaggattcgaggctcagcgccctgggaggagtgaacccctcagtttcctgagcctcatcagaagcagtctggggaggctggggcccagccaatggcagtgcaggtcccagctcctcctcctcccaggctgggccagcacacccggcaggctctgtcctggaaacaggcttcaacgggcttccccgaaaaccttccccgcttctggatatgaaattcaagctgcttgctgagtcctattgccggctgctgggagccaggagagccctgaggagtagtcactcaggtaagggcatctgtgtccgcatgtgccctgccccttggcatacgtggcaggaggacacttctctgctggggagtggtgggatgtggcctggacacatctgccaccctgggtcctgatggtggaggaataaggggctctgggttctttcaggtctccccagccgggcaaaggtaggagcaggggccaggccggaagctcagcaggcagggtagctctgcctgggcctgcaaagccctgccccactcctccccaagtagggatgggctgggtgagagcccctggggctaagggcggggccttcctgggtgttccctgagaagctgcaggagtcctaccttagacaggactgagcatgcaagatggtgattcaaaacagagctccccccaaccccggcccccacctccacccatcccccgtccaagtggcgcaggtggtgtggagacagggtggtgggcaaaggttcccccagccaccctcatccaggatccacacacaaggggaaggacagaatccgtctgcacacaaacaggcaggcagctcattgaaacttgaggaaagggtctgaggcctaaggctgggcagttcccggagggtgggctctagagccagcctgcctgggttcaaatcctagctctgccacttattagctgtgtgacgttgagcaagttaattaatccctctgtgttcctctttcctcatctgtaaattgggaataaaaaatatgccctttcctaaggttgctgtgaaggaataatgtactgattcatacaaagaacttagagcggtgcctggcacggcatgaatgcttcatggatattggctgttatcactactctgctttgcagttgatcatgcagaggctccagagagcctggtgagcttcagcctggaccagcatgggaaggccatcatgagccctttag

SEQ ID NO: 4108 - DNA, 6000 bp, Homo sapiens
ccctatgaggtaggtgttgttcttttcccactttcacagagaaggcaagaaatcacacagtgagaaagtggcagagctgggattcaggcctcagcttctcccacacaagcccacagatgggaggatgaacaaggagtcagagtggacctgtggctctcccctgagaggataccaggattcgaggctcagcgccctgggaggagtgaacccctcagtttcctgagcctcatcagaagcagtctggggaggctggggcccagccaatggcagtgcaggtcccagctcctcctcctcccaggctgggccagcacacccggcaggctctgtcctggaaacaggcttcaacgggcttccccgaaaaccttccccgcttctggatatgaaattcaagctgcttgctgagtcctattgccggctgctgggagccaggagagccctgaggagtagtcactcaggtaagggcatctgtgtccgcatgtgccctgccccttggcatacgtggcaggaggacacttctctgctggggagtggtgggatgtggcctggacacatctgccaccctgggtcctgatggtggaggaataaggggctctgggttctttcaggtctccccagccgggcaaaggtaggagcaggggccaggccggaagctcagcaggcagggtagctctgcctgggcctgcaaagccctgccccactcctccccaagtagggatgggctgggtgagagcccctggggctaagggcggggccttcctgggtgttccctgagaagctgcaggagtcctaccttagacaggactgagcatgcaagatggtgattcaaaacagagctccccccaaccccggcccccacctccacccatcccccgtccaagtggcgcaggtggtgtggagacagggtggtgggcaaaggttcccccagccaccctcatccaggatccacacacaaggggaaggacagaatccgtctgcacacaaacaggcaggcagctcattgaaacttgaggaaagggtctgaggcctaaggctgggcagttcccggagggtgggctctagagccagcctgcctgggttcaaatcctagctctgccacttattagctgtgtgacgttgagcaagttaattaatccctctgtgttcctctttcctcatctgtaaattgggaataaaaaatatgccctttcctaaggttgctgtgaaggaataatgtactgattcatacaaagaacttagagcggtgcctggcacggcatgaatgcttcatggatattggctgttatcactactctgctttgcagttgatcatgcagaggctccagagagcctggtgagcttcagcctggaccagcatgggaaggccatcatgagccctttagtggctaggcagacaggttccttggggtcccagggtgcacagttggttgaaaccacagtgcatgggtcttaatggacacacccccatctccaggaatcaggcagaggactcgcgggtgaggaagtggggaccccttactctgcctagcagtcacagtccttacgcggaggtgaatctgattctgtgagttcatcaggccaaattcaccagcagaactgacaggagcagcatttcccacttgatgtcttgacaaggctgttccacaagatgataaatgttatgtcaggaggaaaagggcttctgtgggcaaatgagtttgggcaatgccacatatttcatacctcttttggtgaatttattagtgagtttattagcacggttgagcaaaagaaccctatttaactttactaaacccaatgtttgccaacttttcttgacacagaatcctcttctctcacttctcctattgccaacctatgggacagggttccagggaacactgtttgggaaacactggaataccaggttactctaggaaacctactgtatgaagagaatttattgctgcctgctttagctttcagctggattgcattgagtggcacttgagcaggactctgcctggctaattacagagtgttagaccagatgggggcttggggacaaggttccagcctcctttccagtcccatccctgagccaagaaaaggacaaagagcaggttcccctggggaaggggctgtctgagaagaggcagcagtgctcagaaaggagagaaccatctcaaggctcagcccccctgaggaggagggccagggttgaaacagagggagcaggcagaatgtcccagctccaccagtcttcactctgcagaacctcaagaccagagcctcaggcccggggaggaatgagtggctccctggacctgcccttatccactggtattggtaagagctgggttctggacttaattacctatgctcaaatcccagccctgcacctaatagttgtgtaaccttgtatataatgccactaaacctcagctccctccctctacaaaatggggacagtagtagaacccagctcctctagtgatggtaaggatgaaatgtgatgacatatttctacaaagtgctcagagcaagtctgtgataaatgtaggaaatgattgttcttgtttccctgcagtagcagctgacgcgtgggtccaccatgaactggagtatctttgagggactcctgagtggggtcaacaagtactccacagcctttgggcgcatctggctgtctctggtcttcatcttccgcgtgctggtgtacctggtgacggccgagcgtgtgtggagtgatgaccacaaggacttcgactgcaatactcgccagcccggctgctccaacgtctgctttgatgagttcttccctgtgtcccatgtgcgcctctgggccctgcagcttatcctggtgacatgcccctcactgctcgtggtcatgcacgtggcctaccgggaggttcaggagaagaggcaccgagaagcccatggggagaacagtgggcgcctctacctgaaccccggcaagaagcggggtgggctctggtggacatatgtctgcagcctagtgttcaaggcgagcgtggacatcgcctttctctatgtgttccactcattctaccccaaatatatcctccctcctgtggtcaagtgccacgcagatccatgtcccaatatagtggactgcttcatctccaagccctcagagaagaacattttcaccctcttcatggtggccacagctgccatctgcatcctgctcaacctcgtggagctcatctacctggtgagcaagagatgccacgagtgcctggcagcaaggaaagctcaagccatgtgcacaggtcatcacccccacggtaccacctcttcctgcaaacaagacgacctcctttcgggtgacctcatctttctgggctcagacagtcatcctcctctcttaccagaccgcccccgagaccatgtgaagaaaaccatcttgtgaggggctgcctggactggtctggcaggttgggcctggatggggaggctctagcatctctcataggtgcaacctgagagtgggggagctaagccatgaggtaggggcaggcaagagagaggattcagacgctctgggagccagttcctagtcctcaactccagccacctgccccagctcgacggcactgggccagttccccctctgctctgcagctcggtttccttttctagaatggaaatagtgagggccaatgcccagggttggagggaggagggcgttcatagaagaacacacatgcgggcaccttcatcgtgtgtggcccactgtcagaacttaataaaagtcaactcatttgctggttccaggtgccctctggttgtgcggccttcgtgaccctcacacgttcatggtgtcaatctctctgcccccgtgaagagctgcacttgatccagcctgtgaggggcatcctctcttccagaaagggggcccccagtactccaggggacgtgctacttgctcatgctcccatctagcctttatcccccatggcaagtttagtcctgtgggttgtctgcagagagaatggagcttagtccatgttgcagtgggaagttcatgaacttagaatgcctgtgtcgaatccaagttccaccgggactctgggaaagtaacttaagcttctctccaaaatgggttaataatacctagcctgtggggttgtgctgaggactgatgagctcatggctgtggacagggctagccagctgtaaaaggacacataaatgttaatcattggtattaggaagtgcttgataatgcctgtgagaaacgaggcagaaggcccctccctagctgcacattaaccttcatcatcccagccagaacacaggtcccaggccccccaccagcatatgtgaggtcacactccagcctccctggaggccttccccaggacccacagaggatggacagcgatgctgtgcctggccctgtgctaactggggcatttcatgctgctgacctgcattccttgcctccaccaaggctatgggtgccctggtctagaaaagtcatagttgacccctcccatttcctacacaatccaagagcttccagactccagtcccagaaatatcccaccaccagaatgggatgcgttcctgcactaaattaaggttgcccctttccgtagatgtcagctgctgagacctcagtatcaggcttcccaggaaaagggcaggagagagggcaaggaggcagggtaaggaggcaatgggaaggggacagggtcaatcccactggtgctgtcctaggcctaggcataatgatatcaggctcctgaaccccacacagcagtctcacccacatacctgcctgcctgggagccaggctcagccatacccagccaggctagagaggaggcgtgggccaggagagaagagccgcaggtgtttgctctgagtatgtgcccggggaagtccgccctcctgcctgcccacccaatcactctcgcttggctcattggcccagaaagccccacccagcaagggagagaggaacaaaagctgcctccgggaggtcctgaggcaaacagacaagcccaaggacaaggaagcagctactggacccaagaagggtgaggaccgaatagggcaggaggctggccaggaagcaagcaaccagctgagctgaggatatccaagggacctcaggctgtgggctgggcttcagggagggagccagagggtcagtgtccctagaggatccccagggaagtgccaaggaggagaaggaatgtcctggctgacctaagggacgacagaagattggggaagagggggtatcaggaagaaatgggtttcagttcagtttaacaaacatctattgtgtgttcactgggccaggccagtgctaggtgctagggagacagaggtgaagagcctgccctctagcagctgacagcctggcaaaaaaataagacaggtaaatagaccatttgggtacaggcgatgcctcttgctctgaaagtgtcccaggcacacgatgtctgaagaggctgagagcagagtcagggattggggatggggaaggaggagggtaggaggaggggagggttggacatggggcctgatggggactccagacaagggggtgtggaggtcagagtccacaggagaggggcctgagaggaaataatggaaatgcggctagcaaacagccactaaatggacagaggagggggtgcccccagagaaagtaaatggggggtccagaccatgccagaatccatcctcagtccttcctaaagctggaatggttggaattccagaggaacccactgtggtcaagacagtcagccctcaggccccagcaccagtacacgggttggcagggatgatatcaagtccccgtgattccaaagcacctctgtttagtttgggagggaatgccagggctgagaaccttcctggagccagaggcaaggagtaaggatgcagattgttctgggatttaccaaggggctgatgtgaacgtccccaacacggggccaggctcttgttggtgttcagtaaaagtgggatggatct

SEQ ID NO: 4109 - DNA, 6000 bp, Homo sapiens
taagcaacactccagcccagggcctccctggaagatcgcctcctccctgcctgcagccccagacatgcctgagcagggctcaaaagcccccatccctctgcctgatctgtttcccatggcttctgcctgccccacctctccactcaaggaaggaaagggcctcatgcctctgctgcagacacacaaagataaggaaaactccagtctgagaggtggcaggggtggggggcggggtggtcttcccatctcaggaagcacctgcctgaggcctgggcagagctctaggtggagaggacagcctgggagcagcaccgcctgggccagggccagggccagaagaggtacaggctctggccctgccacccctagagagcaggtgtaagccctgagggcagctgccaatccctggtgcaacacagctttgtcctgaggcagggggatggcctagatggcctcctacacattcccctactcagggagcagaaatttagggcaggaccacaaggcattaaggttctcagagccattctctctggaatggggaactcttccagctcactccagaaaaagcaaaggccagttgttgggggcactatctcatatcaagagtgaaaagccagcatctggcagagtcagaatgacaggacctaggtgataaaatcacctggttaccagagcagaataacccaaccacacacatagacaccactacacaccaccacaaccacatatgcacacagcctcccacaccaccccagccatctccatcatcacacacattcacaaccacacatgcacacagcctcccacaccaccccagccacctccaccatcacacacattcacaaccacacatgcacacagcctcccacaccaccccagccatctccgccatcacacacgttcacaaccacacatgcacacagcctcccacaccaccccagccacctccgccatcacacacgttcacaaccacacatgcacacagcctcccacaccaccccagccatctctgccatcacacacgttcacaaccacacatgcacacagcctcccacaccaccccagccatctccaccatcacacacactcacaacaacgcacatcaaagcctacacacacgtggcccacataccacccttaacacacagctctccaggcttacacacacagaaacagttctcgcacataaccttatgtgcacccagtgtttacaaatagtgactgagagtctgtacattccaggccctggtaatgtggcaggaacgtgaccagggagctccctgctctcctggagataatttcagagacggctgtgaagagtgtctgctgaggaagtggagcaaggaacatttggggtgggggtgggggaaccagggaacacctctgtaagaaggtgagacctgaataaggaggaggaagcttccaagtaaagagtcaggagaaggcagtccaggcagagagaacagcaaaggcaaaaaccagaaggctgacctgaatgtggcttgttcaagaaccagaaagaaggccactacagcgcccaaggggatgagagatgggggagaggcaggactaggtcgcctggtgccttggggctcaacgtcaagagagtggatgccagtctaaagttaatgataagtcactgtaaggttttaagagggaagtggcatgatctattaggttggtgcaaaagtaactgcggtttttaccattactttcaatggcaaaaaccacaattacttttgcaccagtctaatagatcgttaaaacactacttcagctagaagcaaccacgggaaaaaatgttattgcagtcctcagagtggtgaaggcatttctaatgacaacaaaacccaagggccataaaagataatattaatacactggactacataaaacatgtttaattctgtatggcaaaacccccgtctataaagtcaaatcacaggtgtcaagaagcagcagaggcagagggaatcctttctatttgtatcacagacagaggagggcttatttctttagtatgtaaagagctcctgagaaataaataataaaagtcaaccatccaatagaaaaatggcaaaggcaaagaactgttcacaggataacaaacaaaagcggcccttaaatatgtgaaaagatgctcaatctcactcataccaagagaaatgcaaaataaagtatgatgagatatcattgacaaagatcataaagcttgataacgctctctattggtacgtatatggggatacaggcactcccttgtcccttggagtgcaaactgaaacatctgtgaagacgattgggcaatatgtatcaaaattttaaatacacatacaactttaaagcaaacatttcacatgtaggaatatgtcctgtagacacaattttcaaatgtgttcaataatgattatccaaggatagtcacgcaatggtatttgtaatagaatgaaataaaaaagtggaaacagccttttcatcagaataggactgattaaatagagtacatatactattcagctgtttttaaaatgagagagcaaggcagctccatatccactgatggggggaatgtctcatattttgttaaatgaagaaagcaaagtgcaaaagagtgcagatagcatagcacacttccataggttaaatgtaaaaagaatatatagttgaatatgaacaggtgatttgggagtaagaacaagaaactagggaccctggtgttcaggtaggcagctccggttacagtctggtgttcagggagaagtcacgtccggtgttggaaatgtgtgaatcatcagtgagtggatggtatctagagccccaggactgggtgagctcacctgggaaggaagagactgggccctgggacatgcccaccttagaggccaggatgtgaggcctgtggtgtcaaggaagcacggggaagaaagtgtttctagaaggaaggagtgccccattgtcccaggtgcttctgaaggtcaagggtcatggggacagagctgtgattgctggatttagcattatggagatccacggagactctgataagccgtttttagtgacatggtagggacaggaacattgttcaaatgtgtcaaaaaatgactaggaggggaggtagcggggagcaagtcttgctctgacagggagcagagcagcaggcggcagagtccagggccccacaccctcatgctcacttccccgctgcccatgcacagagcatagcacatgcacctgagccacctggcactcctcaatctcagcaaagattttcaagggccacgaccccagtgagtacaagggagcctctgccctgcggcttttctgtatctggaaacaacactgctgaggcctccagagctgggtctgctgcttattatctgtgtgaccctgagcaagtcacctcacccctgtgtgcctcagctttctcattcataaaagtaggagggattggaccttcctcatctggatgctgccatgatgaaataaagcatgtgggacagtgtcgggtgcaaagatgccgctgggctcccaactcagtgctcattctctaccaaaatgaataggaggagggtgaccataattgatgctcctaactttggggcatttttgaaagtaaaagggggcattgttaatgatgccagcactgcaaacataaaccagtacagtcctgggcaaacaccatgtggagccaccatagtgccagcaatatcatctctgtggagacaggactcgggccccaccctaagatccagggactcccaagggaggctggaaaccctggggttttccaaaagaggctggggcactgcaggcttttattagttcctagtcaggacacactagtaaataagacaatgtgtccttatccccagggcacagcccagccccaccccagccgcagacccacctgctttggcagaggctatttactgcaatggtatttgtaatagaatgaaataaaaaactagaaacagccttaatttttatcagagtaggactgataaaatatattacagtacatatactattcagctgtttttaaaatgagagagcaaggcagctctatatcgactgatgggagaaatgtcgtattttgctaagtgaaaaaaagcaacgtgcagaagagtgtagatagcatacttccacaggttaagactatatagttgaatatgaacagacgattcaggaaggaaaacaagaaactagggaccctggtgttcaggtaggcagctccggttgcagtctgcccctctgagtcactccaggcggtgacctcccccaacccgccctcattcctgaacttctttcctggcacaggactcactgtgccccttcccgctgtgggtacaaggtctgccccccaccccagctctccaaagcccaccggcctccctggaggccgaggtcgacggcccgtcgcaccgggagggggggctcccaggggtgccccacgcacggtcaaggtcccgcgccaagcggggaccgggctgggccggaagcgggcacggtactcgcggcaaactagcgtgggcgagtcctgattgcagtcggacctgccgccgcggcacttaacagtttgcagagtgcttcccgcccctgatctcattggagccttcggacagcccagcccatggccaccgatgcccccatttcacgcctgaggaagcggaggctcagacgggccaccagcccctccggaggctggcccgggagcgcctggcagcgtcgggtctaggagccggctccctcctgctccctcctccgcgccgcccggggtgtgcccgccgtctgtgtgcaccactgctgagcccagctccggcgccctcgcctctgctgtgggccccggggacgcggggtcaggccaccgcgttggccaggccgctgcaggtaagtgctggacggggcggggcgaggctgggcgggaccctcaggggcgccaagcgctcctggcgaccccctgcggcagggctggggcttgagcctgccagtgcgctgggatggggcgcgaagcgggggtgcggggagcccgccaccccgtacctctcaatcctccctctcgcctctcaattctgggcccattaggggtcccggctgcgggaaggttccgagacaccccctccccaagtccgcaagctcccaagctgcctaggatggagggaaactgggaaggaaagggagctttatccttcagggacattgtggggcgggaggtagggctgggcacagtacagtctgggggtcagggaaaaaacggttgcgctgggagctggctttggagggcagctgggggaaccagaaccggctccaccagtccccagcctagacttgggaaggaaattctttgccagtgaagctcctccctggggtgtgtcaggagggactgggcagacagcacccaagggtagaagatgggggcccaggagggagctgcaccctggtgggcagccatgggagtgtgtcaggtggaagcagccgtcagggtccctctctgctctctgtccggacagacagggctccaaccttcacttcagttcttgtgaactcccaccaggtgagtagcagcctgggagggaagagtctcaggattctaccagaaagtaggaattatttccctttagagattagtaaatagggtcaatgagattagggaattcttggaagtcgcccagctactaagtggccaagctgaggtttgaatccaggtggaactccgtgttccatgctatcccactcccttcccccaccacgagggcttagaaggagcagagtaggggagaagaggagggtttccaagaatgaggtcttcccaatcaccccatcctgcccagactgtgattcccagaggaaacgcagccaggagagccaggtgctgagaaggaactgtgctctctccctctctccagtgtagggaagtctttcccccaatccccctgaccaggctgccccctgaccaggatcctgcccaccctcctgtcccctccctccaagctgccttgc

SEQ ID NO: 4110 - DNA, 6000 bp, Homo sapiens
cctgggtggttctggctgcctggccaagggtggcttggaggtcagagtaaccagagaacatcactggctattcctgcagagaattaacgctcagcaaggactgagcttctagtcctggccccttttctccaggctgtgggccaggaccatggaggaggggacattccagccctgcacagcctgcctttggcctggagctgttctgagcagtgcagttcactgatctcatccagtatgtattgggtgactactattcaccaccaagagccagggcacattaagtcaccacaaggtggccctcacgtccccttgacgttctcagggtacgttcctctacctccgccttccccacccatgaggattcactgcaaactccctccaatcatgcatatgagattaggatttcatatagtcttcaaatccacatctactgtgtaaggtcacagccaccctgcagcccaagataaacaggacattcctttgtattcattcaccctggtccaagtccccatatggactgaatgtttgtgtcttcccaaaattcatatgctgaagctctaccccccagtgtgatggtattaggaggtggggccttcagggatcattaagtcatgggatggagccctcctgaatgggattagtgcccttataagaagagataagaacgagatgatctctctctctctcctccatgtgaggatacaaagagaaaatggccctcaccaagaacttgaccatgctggcacctggatctcggacttctgtgctccccagctgtgagaaatgaatgtttgttgtttaaactactcagtcttacagcagcccaaactgacaaatctctccccgggatgactgcttccatcttctcgcttcctgcccctgactctgggaagtggactctgaggaagggctaagtgggtacattggggagtgactcctataagtgtaaaaggggaggaagcaggattgagcaacaagatgtgtcccagggagctcagaagcagagactgtccatgcgggcagctctgcaccggacagcaatggcgaggccttgaccaccccctggttcagtcatggcctgaggccaccccaagaagaacatggccacttagacagcagaagcacacctggaagtgctgataggtgaaggcagtcagctggccagtctccacaccgctacacagcaagtcctacattgaagggggatgtctgtctgtcacccacccctgtagtctattcccagcacagcagctggggtgatcctgtcaaaacctaagtcaggccatgtcactcctctgtcccaaacctccaaagacatcttacacaggccttcaagggcccgcaagatctgccccatccgcatctcgcctgttgcctttctaaactcacttcgctttcctcacctgctgcaaccacactgatctcctgctgtcccccaagccaggaaacaccaggcacactccttccccagggcctttgcatcctaggttccctctgtctgaaatgctgtgcccccagatagccacggggcttcctccctgccttcagggcttgcatcaaatgtcagctgcttagtgaggcgttctctcctctcctactagaaattgaggccggccacagtgactcacgcttataatcccagcactttgggaggccgaggcgggtggatcatgaggtcaagagatcgagaccatcctggccaacacagtgaaaccccgtctctactaaaaatacaaaaattagctgggcgtggtggcatgcgcctgtagtcccagctacttgagaggctgaggcaggagaatcgcttgaacctgggaggtggaggttgcagtgagttaagatcgcaccactgcactccagcctgggcaacagagcaagactccatctcaaaaaaaaaaaaaaacaaaagaaactgaaacttgccacccctgcactctcactcctccctacttcatttcccccagagcattcatcaccgtctaacatgttctacattttgctagaatgtaaaacctccgaggacagggatttttttgttgttgttccctggttatctccactgtctaggatggcatcacagcacataggaggtgcttagtaactattgcttttaatagcaaaaaccacaattacttttgcaccaaactaaatacttgttaaattaacaaatttatatacagatctggtgccctgctaggtggtggagatataaagacccagctgcctgccctcaaagggctcacagtctaatggaggaggggaataaagataagtagaccatgcaccaaggaatggggaaaggggagtggtttactagagacagagtttcagttttgcaagatggcaaagttctggagatctgttgcaaaacaacgtgaatatactcaacactactgaactgtacacttaaaatccttaagatgatacattttatggtagctgctttttaacataattaaaaatttttaaataacaaaaacaaagcaccatgggtagtagctgagctgctgaaagcacaaaggtacacctagcacagagggagccagcaaggggacttctgggagaaggcaacaactgagaaaagtcctgattcacagcgttcagcacgtgagggtgctccatgcagagggaacagcagggacaaaggcaagagcgcacagagaaccccatcagtgagacctggttgggtcacagcgagaagggtgaggggtaaggctggagaagtggccagggactggaggttggggagcctagggcttacccagaaggtgatagggagccatagatgacttttcagcagggcgatgttggtcagatttctagggaagtgtggaggctgagttggaagggtggggctagaggtcaagagaccagctgggaggccactgaggtggcagcagcctgaacaggaccagggcaaagggaatgcagggaagcatgtggttccagggacatttccaggtggaatgaccaggttgtggtaactgttgtcttagttgatcccagcttcttcatcctctggggaggaggccgagttattcaaacctccaaagcccttgaggaaggagtcagagcagggtgagggcagccttgacgtcactccccagccctccactggctcttccctctttcccagtatactgaatcagaaaggctttgggagagctgggcccagccccaagagaggaaaactcggtagtgagcagaggctgcagtgggggcgtggtgagaaccagcctccaggggcctcggttctcatgccctcaagggtcagaattaagtggggcagttgttagcttcagaaatccaggagactcagttcagcctggccctgagggagaggcctagaggggaagccagcccagccggatccctcagggcagctagccctgaagttctcaggtctgcgtgtccccaaagatgtcctcctgctggtcctgaagacagaaccctcagggacccggccctggggcccagggaatccaaggactaaatcttgctgtggaggaacagggacttctgtgccaccagccccaggcctcaacagccccctgccaccttccctttcctcagctgcgccagcccctaccaccctctaagaacaacccacagaccctttttgttacagtatcacaatgtttttagccaccactcacttgaaaaactttatgtaccactattacactatgtgctttgatcacactgtatgccatcaaccccacaaagtagatactatcactattctcattctgtagaggaagaaattgaggcacagggatttgagtaacttgcctaagggtacaggagtcaacagcaaagtctcagctcctgggctcagccaccaacaacgtctcagcactccgagggcagtggccacagtctcagaaccccacagctccaggccctcgagccacactcatgccgcccctctacctagaatgctcttcccttccacttggctaatggagggggaaaagcatttcctctcctccaggaaatgttcctaaccaagtcccctgggaatcacccagtacctctcaggagaactttccacatttattatcttaccgttatccaagggctgatatgctcaatccctgcaccagccagtgagggaggaggccagagaccaagtttggctggttcctcagggtatccccaggtccccaagcagcgtctgcagcacagcagatgctcactgatgctcatccacctgtgatgcctgaatgcatgaaggcaggctccgcatagccctttcattcctatggatgtcccccacaccacccagccaccatttagaggcataagaacggggtccaagctaaaggtcaggtggttcccccacccccagtctcaaggagtccatgggaattgcttaatggcctctgattgtgtagcctgcccagacatggggatgtttgagaattctggaagaacgtgggctgggcgtggatagagacgcctgctccaccatgtatgctggaggtgtggattacaacccctgtcccccattggagcttcccgcgccgtaattagccttgatcgcctcatcctggcacactagggccagccacctagcaaatgagtggtccccacactccatccccatccgcccacccctcacagccccgcaggccagttgcccagatccacagcccttactgcaaccccttcaaatccagccaccctgagagatcctggcctgggagaactctccttccctggccaaagaaacgacaggagagtttactgtctggaatacctggtggagagagaacagaggagaggaagggtaggtcagcccctcttgcccctccccaccgcaaatcacacaggcccacctccccggagtgggtttagggagtctgcacctcccagtccccgcccccgccctctctccagcgcccgccgccctccccgtcgcgtttcctgcccccaccccgcccctctgcgctatttaaggcgcccccgccgctcgtgcggtccagcagggctcccgcgggcgtcactccggccatcgtccccacctccacctgggccgcccggcaggcaggcggtgagtcgggggctaggaagggaccaggggcgccacctgctcgcgggaggccgggaggagtcttgggtcctccgatgccgggacgggggttgctgcggaacgcccgccgcgacagagccgcgctcacccaggtggccttggccaggctcccaccctctttccatggaatccttgtaacaacccgaggcgggaggaatactattgtttccactctatcgtggaggagactgaggggcccagaggttgttccttatccaaggggccgcagttactaaaaggcaagatttgaacccagggccgcttccagagcctggctctaaacagctttgcacttgggaagaggcacctcccccttgggaactttgtggcctgtgcctcaccctgcaatgacaattcctttcaagagtctagaatttgccagcatcagctttggaggtggaagggggtgggagtggaggtggaggaagaagacaggaccaaatgtccctcctcaagtggcaggtggtcattattgctgaccggtggagctaaaggatgatgctgccttcagctcctaaaaccccttccactacccagcccctgcaggctcaaagattagagtgaagccagctgggtaagatatgaggcggggagcagggacctgaggctttgagccccctaagaagcagaagataacacctctaccatcatcactagctcccactgtctgggggtagccagccttgggcaaaagggaggaagggcttagcccagctgcacaactttggataagttcctcaaattctgttcccataggcaaaggagcctcaactccacccagatttccttggcctgtgtccatcctggggcagtggctcggggacaagagggacatagatgtctgattaggcagggaccttagccaaagcagaatgagaccatacaaagaggtgggcagccatcat

SEQ ID NO: 4111 - DNA, 6000 bp, Homo sapiens
atgccacccctggatgagacttcactgtatcgtgtactaaatgcaaaaacaggtgggtgaatacagggtggggccaggaaaggctttgcaaaggaagtgacatcgaggtgtcccataaatgattacataggcagacaaagaaatggaagataatattcctgagcgggatcatcatggaagtatatttttatttttattactttttgagacagagtttcgctcttgttgcccaggctggagtgcagtggcgcgatctcagctcaccgcaacctctgcctcccaggttcaagcgattgtgctgcctcagcctcccgagtaggtgggattataggcgcccgccaccatgcctggctaactttttgtatttttagtagagatggggtttcaccatgttggcccggctggtctggaactccggacctcaggtgatccacccgccttgggctgccggagtgctgggattacaggcatgagccactgcgcccggcccagaaggatatatatatatgtatattttttgagacggagtctcgctctgttacccaggctggagtgcagtggcgcaatcttgtctcgctgcaacttcagcctcccgggttcatgccattctcctgcctcagcctcccaagtagctgggactacaggcacccgccaccacgcctggctaattttttgtatttttagtagagacagggtttcaccgtgttagccaggatggtctcgatctcctgacctcatgatccacccgcctcggcctcccaaagtgctggaattacagccgtgagccaccgcgcccggccaaaaaagaagagttttgaagagtagactgatgtcaggtaatgaaggacctcgaaggtcataccatatataccatatataggttgggctttatactatcataaatggaccattacagggtttttgtttttgttcttttttaacagggagtaacacagaattagtagcctatatgagagacagaacgtatgagctagaaagtagaatgagctagatgcaaaagaaataacagctgctcttgtaagggtacccaggctggagtgcagtggtgtgatctccgctcactgcaacctccgccttccgggttcaagcgattctcctgcctcagcctccagattatacgcgtccaccaccatgcctggttttttgtcttttgtttttttttttgtatttttagtagagatggggtttcgccatgttggccaggctggtttcaaactcctggcctcaagtgatccacccacctcggcctcccaaaatgctaggattacgggcgtaagccactgcgcccagccaagggggatcattcttttcttgaggccagagcacttatggccagagtttcaattaagggaccttgaatgcttggtaagcagagaatcaaggcaagatagggaaaaagcttgagagcaactctatgatttaggttagacagggtagatggactaccctacagcaatgtctatcactctagggataataatctttatctttcaaattcagtcattttatttatttttatagagatgaagtctcactgtgttgcctaggctggtctcgaactcctgcactcaagcaattatcccaccttggcctcccaaagaactgagattacaggtgtgagccagcacaccctgccagtctttctcctttagcaaaatcctgccaacagcctgttttgaggttcccatttttagactccacacaggccagcccttctattagtactgtctttctgaaaagagaaacaagtgattattcactttccataattcactagttctccactgccaccacattagtctgcactaccatctctcacctggattcttttttctttttttctgatatccttggcaactgctaaatcacctggattcttgaaatggcctcctaactgcactccctccttccattccccattaaatttattctccacgttgtaatgagaaggattgtctgctcaaaactctgcaatgctctgctcaaaatcctgcaatggcttattctttcattctaagtaaaagtcttttaactaaaagactgcatgatggcatggatctgcactccccctcttccttactctttccacagcctcttgccattcctcagatatgataagcattggccaatctcagggcctttgcacttgctcttcactctgactggcaatttcctcagatatccacacagcttgttctcttactttttttgggggactcaaatgccagttaatctgagaaggcttccttgaccaacttatgtaaagcagcatccctcacaccaacatgctgtattgcctttttgctgctttttcttcatagcacttatcaccacttccacttttactattaaatatttgcttattatttatcaaacactgcatccaccccagctaagaatgtaagctccaggagaggggctttggttcactgctatatccctggcacctggaaatgcgtctggcatttcgcagacattcagtatttattgaatgaatgaattccagtcagtcttggctttttgacacctcggcctcctactctcctatctcttcagacacatggtgacagatcaatgctatgatgcccctctcccaagcagtagctaacctttattgggcactcagggccatctacattgctaggagctttacatgaattttctcatttgatcctaacagtatgagaaagtaagtacatactatgttattctcattttactgatgaggatctgatgcacagattaaagaacgtgctaatacatggtgcggccgtggctggcaatcaagcagcttgactctaaacctgtgcccttagccacaaagcttgggtggtagaagctcctgtgaggctttggactcacagacagctgaagtcaagagtgaagagggcatagcaatgatggcctgagggagagaaaattttgaaaaagtgtttaccccttatatatttaagttggtatctaactggttccatcataaattcaaatagttgcaatggatgtaaattcttgcaaattgtaaatactgacattttaagataaaactgttaaatcactctttataatgtatccaagagaatctacataacaactgaataaccaccattatgcattaaaacatacactaatgagctcttcaacattgttcttttattatctctaacatatttagattgtactctaacaaaaaatgttattcaaatatagtactttgatgtttgaacaaccttttcttgatcacttcttcgcaataaaaatatgacatatgtagtaaaccttaaaaaatttcgtgtaactttatggctctacgctggaattcttctgaagtgagtaatcatcacaatcatctttagtatataatggatcaaaatgacacgattgcaaatattgataacacacagttataaaaggtgaaattctattgggaacacatctcttagtgagatagatggggctgacccaccaattaattcatttatctggatgaatagttcctactggtagattaacagggttcattttcaattctgttgttttcacagatacaagtgctgagaaatggttttacataaataggtgagaatgctagtagttttgttgtaagcatgtcaatcaatcgtttggtttctttccgagttgcatgccaaaaaccaaatagtgttccttcatcagctgacaattcatgggccaccattaattttgttgaaagcaaagaactggaaaccatctgacttgaaaagaatttgttatcctgttattagagtcattcactttctctagtgacttttaattatactaattactctcagaggcatttaggcagggttgagaaattcaagatattaatttcaacacatctttagcatcacaatatcacagtaatttaaatatattttagttgtagctatttagctcactttattgtaaataataattatgctaattagcaacgatagtatgtttaaccaattaatcatcagattaactttcggtcagaataatggacttcaatttttaagtcaaagcaatgtacaggcgtcccagtcaccatatttcacttctgaattccaagagagaaatggcgttgcgccttactgacgcaaatatgtacctagataaagtaagacgctttcatttcaggtatgtctaacccacgctatccttgctttgttccagggcactctcgcagggaaaacgccgcctctgactacacttggggtggttaagacgagatcttcaaatgaaaattctcaacgctaccgtccactctctcatacgcttgaattccgaacaccccaatactggccaaaagactccatttctcatgcttggtcttgcttttgaggtagctctaactcagaggcacgatttttagagcctgggaagtcggctgctgttcagtccttcctagcctcctcaggcgggagccgcggcccactcagtcagttgcggcccactcagtcagttccggccccagccccgactacctgtcgccttgttgggggaaggaaggcagataccgcagcccagtcagggtaagccgctgacccagaggatggaactgcggctctggagattagaaagaggaggacttcgccgcgttcactagcccaggaggaaagccagaaccctaggccggaacccagcgtcaagacgtgggggaagaatgttgatgcaacacagctcagccgggcccggaactcggcgtttgggtccccgccctctttgggccggaagtgaggaaggtggggctggggcttttcctgtagaaactaggagggactagggagagtctgcaaggggaagagtgtgtctgtgacactgccagcagcgcgcagagggagggatgggggcgggtatcggcgtaggggccctcggaaagaacggatattgctgtgacaccgcggggacgctctgaagggacgagtgtcggtgtggcaccggtgcacgctgaaggagccggcggaaccgggtggccatggggatgtgggcatcgctggacgctttgtgggagatgccggccgagaagcgtatcttcggggccgtgctgctcttttcctggacagtgtatctttgggagaccttcctagcacagcggcaggtgagcctagacagggtccaacctgacccccatacccggccagccctggagtagccttggcttcgaccctgagactcttgattgcttcggtccccgcgccagtctcgtctttgtggtccctgctgagtctcgtaacttggcccgatggcggactgtggctttgaggagggtcttggtgcgtcaaggaagttttctgtaacgttatcatgggacccaatccctttagggcctggaggaaggcttgggctcttgtgccctccctgcagcttccttgggatccttgggcccagacttggcctcctttatctttggaataagcctttaaaaggatttagacacccaacttcctcatgacatttatgtaatcatgcctaaccataggattttgcagtccttccaagaacttgcactcttgtttctccttaaagtgcatatattgtttctgcttgaaaaaacaaacaaacaaacaaaaaacttatcgggcccggcgtggtgtctcatgcctgtaatcccagcactttgggaggccgaggcgggcggatcacctggggtcaggagttcgagaccagcctgaccaacgtggcgaaaacccgtctctactaaaaatagaaaaattagccgggtgtggtggcgcgcacctgtagtcccagctacttgggaggctgaggcaggagaatcatttgaacccagtaggcggaggttgcagtgagctgagattgtgccactgcactccagcctgggcgacaagagtgaaactcaatctcaaaataaataaataaatgaaattaaatgaaatatatttctcgtttttcataaaatcaacattattttagtttaaatattaaaatggtaaaataaaaagtgaaagttaacaattt

SEQ ID NO: 4112 - DNA, 6000 bp, Homo sapiens
ggcatggtggcgggcgcctgtagtgccagctacttgggaggctgaggcaggagaatggtgtgaacccgggaggcagagcttgcagtgagccgagattgcgccactgcactccagactgggcaacagagcgagactccatctcaaaaaaaaaaaaaaaaggaaaagaaaaagaaattccttgggcccctccagcacctcgtggcctaagtctcttgtcctttctgggctgcacagggaaaaggaagaaggccttatctttctctcatgcttcctcctgctctcagtagaggtgggttcccaaaggtcaataatgtgatgccatcaccccctgagcactctccactccaatcccctcctaggaaggcttcctagattgagaagaactgctaggaccagggaattcccagagcatctccctgctccacctgaaacacgtacctgaagagcagtcagacgaatgggtcacgtgcgtacagccccctgcatggtctctaactttttcatgcattattgcattcagtgctgatagccagggaaagtggggaagaggtggagtgacttgcccaaggtccccaggtattccacaggtggagctaggactggaagcccagccatgacttgtagtttagggctctttctgcccctggcactgccagcctctctggatgctggtgcctcccacttcacccatcctgggttctctcctagggagccacagcctctgcagcatgcccagcctcagggcctggccaggctccctgtttcttatcaggccaaattggaccctccatcctggcattcaagtcctcctgcgtgcccctggctaagcttgctcttccgaatgctctgtaacattcttcccacaccagtacacacacacacacacacacacacacacacacacacacacacattaaagcagcacctgagtgaattaacagccatacaaggcaagtctcttcactgagcctcagtcttcttgagtgtaacatgggaccgtgaacagtattaccgcacaaggttgtggggatgctgaaatagacaatgcaggtaaaacatcctgcataaggcttaggattgactgcaggcctcattaatggtagctgcaggcattattggttgtacttctctgcgtctctcccagtcctccccactcctgtccccaagaaagctccctctgccattgcctgtggagacttctccctcctctgagctctagcaacccttggagctgtaagaaagcccagggtcaggtggctagcaggcagagagattttaggaggcaagtgagtggaacccagacctcctcgcctcgattcaactagcgcacttctgctccaaagctttgtacacattggggtgctaccttacaattctgtcggtaaaaaggattccattgctgataaagtctaaaaatcactgacttaaaccaccccacctctcactccaggaaaggaacctgagcccttgattgacctggggtcacagtgggaatcactgacaggcttgagcctagcctgagagaccatagtcctagccacttcctgccctccatcctttcagacctggaagtttgatcccttggcacgagtaagttctagagaacaaggattggccgtgtatggttatcctcagctcccagcacccagtgcccagccggcaggtgccagtcagtggaaagcacaggtcacagttctgggggtcaccaataggctgtgtagacttaggtgagtccctgtgcctctcagagcctcagctgtctcaagcaagctgctgctctctggcccaaaagggactgggcctggcacacagatggcactcagcaaatggaagcactcgccctcccacccttcctctcagtcaatacttgctccattgatggctgatggggacagtgatgaattacagaagatcttggagccctgcccacttcttgcacagatggggaaacaagtccagggtggggaagagacttgcccaggtgggagtgagtcttagtgagtgcgtctgtctcctcagtggggcagggaagctttcgcagtgttaccagggtggagacagggcctgggggtggaaaggaaactgctgagggtggggtcaggggaacaggtgggagagggaaggaggagggtagggaaccacggtgtccagtcccctccagcagaggggccaattgagggagcctgagacagctgtttgctcagaaaagtgtcttagtcactaaaggttgtggtggggaaagtccgtcctcccagtcatgtcctgggaatccggatggcgcaggaaggccacccggtgaccctaagagtggccacctgtcctctctgaactggactttctcttctggcccttccactcttccatgtgtacacatatgccaagtaaatttgctgtggcctcctggaaccatctcccccatccctctcaccccttaggaagagttctgtgtccctccattacccatacgcccgcaggagaaacaggcttctatgccctatgaaagtccttcctgagatctaacttccatccctctagctgcaaccacagtctctttcctctttctgctgcctttgagcaggtaatctggagctggagttgggaatgatgagacactccctgcagtgagggctcctcacaaggtggggaagggacctttgtagtcccccagctgggaagagagccatgggatccagaggtgatgctgagcttgaagattagatttcccagaacagacccagtttcagatattctgggtgttaagggcaacctgaattcaaattccatttctgctacagaacaagagcctcaaaaagaccccctagaaacacccccagggcgcttgcaactgctttcctgtgcacctttcatgtcctagaccttagtcccatttcccaggatctatgattgagaagaaccagccaggcagttccacagagggaggacagtgctgcatattttgggggtgccatcttcagctcatagagagaagatgggttaactcagcccaggcaccacatccctagtggggccttggggtccagaaactgtccccagcttccagtagaggatccgggcataacctgccctggggcacccggctctggccctgggcacacctggaccaggagcagcagaagagattcaggtcagaccccagagggcacccccagctaggcagaggggaaaggatcactatggggtaggggtgtgggccggttgccaagcccagtttagggaccccacagatccctgcagcccacggccctgcctccctccctccctcactggcgctcagcagatcaatgctgcctttgctgacagctgagaatcgagctcgccttcccgccccttcccccgcccctcccgctcggcttcgtccctcgagatcctcccggaggaaccgggaagagtttgctgcggaaggctcaccctggggcagggcctgcggagggagcggctggtgtggccgcagctttccgtggaggaagagggaaagaggatcgggaaacccaagttaccaaccctgtgcagggcccaggagggctaaaggagagggactgccccctacagccagagagatggaggtcggggactaagaaaaactttccagctggagagggaatgccctgggacaaagtatccccttttctggctgggattctgtgggccttgggtagggggtgtgtgtcccctctaaggctggcttagagctcatctcccaacactccatctgcccaaacccagttccctgacctgggagtggggcaggggagcaggcccctccatcggggaggatcctcttctgggcagggtggctcttcccccatcacgatgaagggaagctcagaggtggcagttggtgggagaaagacacacccaggcccactgtgttccacacaccctgatgctgcctagcagcccgtgggctccaggcctttcaggtaagagcaggacaaccgccgctgcccacccagccacacacagcactgggcacactttaagcacccgcaccaggcacacagtgctcgaccccaacggacacacctcatccccttcggactccacctccactttcgcagccacccacacccgacccataactcacacctcactgactccatccccgcacctggtagacccacagccacccaccctgcacacacaagtagacgccgttccaccggtctacacctaaactccacgggacactgcgtcccttcccctgccgcccgcggccacaactccacattccactttccacaagcacacacgaggcgtcccaccccgggctggccttcggggccacactgccccacgcagcggtggacaccacttgcacgcgtccggcttcccggccccgcgcgctgcccccgccacgcggttcggcccaggcaccaactcggccgcccgtgcgccctgccccgccgcctgctccgcgcgttccctccctccgcctcgcctcgcttgctcgctcgctccctcccgatttgggaaggcggccgcggggcgggcgggggaggggcggggcgggggagggtgacatgtgagcggcgcgcgccggtggcaggtggaaaggcgagcggcatggagcgcgtaataagagagttggagtcggaaagagcagccccagtcgccggggaagcgggaggtcagtgcgggctccggcggcccccaggctccgagcgcccgcccgcggccccggcccggcccctagcccccgccgcccgcgcccgccccgggtcgcccctctggccccgggtccgagccatgcgtctctgagcgccccgagcgcgcccccgccccggaccgtgcccgggccccggcgcccccagcccggcgccgcccatggccgaggcccccccgcgccgcctcggcctgggtcccccgcccggggacgccccccgcgcggagctagtggcgctcacggccgtgcagagcgaacagggcgaggcgggcgggggcggctccccgcgccgcctcggcctcctgggcagccccctgccgccgggcgcgcccctccctgggccgggctccggctcgggctccgcctgcggccagcgctcctcggccgcgcacaagcgctaccgccgcctgcagaactgggtctacaacgtgctggagcggccccgcggctgggccttcgtctaccacgtcttcatgtgagtttgcgaccccgcgcccttccgcgtttccccgcgcaagcctggcctcccggggcacggccgccccgccctggctccgccttctacccccctgcctcagggccgaccctcatctctctccccccaggcctaagcccggtttctgatcccctcgctgagcccgaccctaagccctgatctcccaggcctgacccctgcttgacctcgcttctgacctccccgcaccgcaactgcttatttccatcctgaccgccaatctctgctcctctgtcccaggtactcccgaccgccagctgcctcccccaagtccgcttggcgaagtctggggcccctggagtgggcgcccttttcctcttccccacccctgcctccctgtgtcccagacacaaagaggaacccttggctcccacacgcttctgtcacctgctccccagctctgagctatgaagggctcccctcaggggtgctcctctccagggcggccctcattcctacccctgcccagctgactgtgggtgtgtgggggtccctgtgggccccctgggccctgacactcgcatatgctgtgtccgacttgatctgtgtcttcgctcagtcttcccctccaccctcaacttcccagtggcaacggcggccgccctgcctgccctgccctaccctgccggcttggcccagctcgcctgccttgttggctggcagcaccaggcctggctctaggcaccaggggaaaaagaaagaggagaggggtaggtttggaaacactgacgctgctggggccccctcctccctctcaccaggctcctacaactttcaaaaacactgacccctcttgggtgtg

SEQ ID NO: 4113 - DNA, 6000 bp, Homo sapiens
taagtgaaagtaccaaccattgttactattaacctaaacaaaatcttaaaagaattactttctttttcttttcttttttttggacaacaacaagaacaagatatttttcctttctttgctgatcagtatgaagaatgatttatcagtaaagtcaatttcaggcaaaggcagaacttaggaattgggttaaagtgttgcttatttcaaccaaaagaaaactttctaatttgtttgggcagcatttacttggttcttcgaaaagcaattgtgacaaacagtacagagagttaaggcacttattggcatataaaaagatgccagcatttggagttgcacataacaaagaaatatcttaaatacttttcaaaatattctaggagccaagacacaagggcatgcttcaggagaacacaggaatgtaatttgggaggaaaattgcaactaccccttccctttaaaatcactgagcaaaacaaagcagcattctacttcacatactgactttacatagtttatatataatagtttgactttaagaagcaaagatgggactctcactgtttatcttttatttattcttttttattttttgagacaaagtctcactctgtcacccaggctggagtgcaatggcatgatctcagctcactgcaacctctgcctcctgggttcaagcaattcttgtgcctcagcctcccaagtagctgggactacaggcgcgtgctaccacatctggttaatctttttgtatttttagtagacatggggtttcactatgttggccagggtggtcttgaactcctggcctcaggcgatctgcctgcctcgacctcccaaagtgctgggattacaggcatgagccactgtgccgggcctctcactattttgaaaaataattgcatggtcacccatgtaacccaccccagtctggcaagtttaattgggagaggtctccgttacttagaagagtaccaatttgacactttaattcagatagccctgacttcatttttggggagcaacttagagaggttcattctttcccccctgactcatcctctgttgatccagtcccgaatttcaccagcttttttatgcataatttgcataacaatttcacccaaatggatctcaactgagcatcatttctgcaagaagactatggagtttgtctatagagaaaattaaatcaaattcatagacatttttaagagtctgtcaaatgtttccacatgtatttacatgtggtctaaaaccctaagggcattgtaagaagccacacaaaagacccaaatgaatgttctaaggggcataaagcagtttgttgtctgagccacctgttaagggaaatgagtggaacttggagagtcaggctttcctgtccctcttgatcatgacggtcacttggagaacagtgagtccaacccgctggggtggccacaggggatggacctttactaacataaaagaaaaattttttaaaaattctttgaatggtttccaaatgagcactccctccaaagtggaacttaataccacaacagatattcaccctgtgcaaatacaggttgagcaccccaatccgaaaatgtgaaatctgaaatgctcccaaatttgaaactttttgaacactttgtgatgccacaggtgaaaaatccacacctgacctcatgtgatgggtcatatatatcatatgaaatattgtttaaaattaccttcaggctatgtgtataaggtatgcatgaaacataaatgaattccatatttagacctgggtcttatccccaagatatttcattatgtatatgaaaatatcccaaaattcagaaaacctgaaatctgaacacttcttgtccctagcattttggataagggatactcaacctgtacatgcagtatgaatatatattcctatttttttcttttttaggcaaacgctaacatacaatatacacttctgtaccttctttttatcacttactaattagtatgtcttagagagcttttaaaaaccagtatatagacttggagagtttcttcaactaatttcacagctgttatattttactgtatagctacatcaaaatttatttaaccatttccccattgattgacacaggaattggtcctaatcttctgccattacatataatgctacaatgaataaccatgacattttgtactgtgggagtatatctgcaggataaattcccaagaatgcaattgtgagtcaaggatacgtgtgttcatgaatttgacagatattcccaagttgccctccatcagaattacatcaacatgcctatatagagcatgcctatttccccacaaccttgccaagacagtgtgttataaaactcccagacttctgccaaactgatagtgagtatggtagtgaggaagagtttttttatttttatttttatttttgagagggagtctagctctgtcacccaggctggagtgcagtggcgcgatctcggctccactgcaacttccacctcccgggttcaggcgattctcttacctcagccttctgagtagctgggattacaggcacgtgccaccacgcccggctaatttttgtatttttggtagagacggggtttcaccacattggtcaggctggtctcgaactcctggcctcaagtgatatgcccgcctcggcctcccaaagtgctgggattacgggtgtgagccactgagcttggctgttaaaaaataaattaccttgagttgacctggcgccttgagtttaactctatcattatcaattcagtttgttttgggtttggaggttaaccctccaatgtgtagaacttcatatttgcattatttttggcctataactttcgagtgactgagacttcaagatgtgcattatggcttaagtcgtcttatacatctgcaacagcagatgtatacacaacccactcaaaatttgtgtgtgcagtaatatttcatttgggacatattgtttgtaaactgatgctatttaaattacttgcagcataatctcaacacatgtaaaaatacttttacacttgtaggatattgttttataatacaaattcttgtgtacaaactccattaacattttatttatgtacagatcattattaccagtttttgtttcccagttgagagtggggagggcagatgggctcagaatctttgcatgtgccagcatcctgcagtctcaaacttttccattcaaagcaaatacctgtgccaatatctgtgtcacttccaacaagaatgaatgctgcctaagtgctctccacacatttgcaaaatgacatcaggccccccaggtcttccaagaaccaaaggaaaagttccacaaaagtgaatcctgccatacaaacagtcccagcactttccagctcctttttcattccagattcaaaggtctggcaccaggatgagctgaagtgtaaggcatccaccactctccccctgctcctactcccatcccacccaaagccttgtctagagaaagctcctcccagcctcaggcccaggaatgggaatctctgtgggtcacacatcagtagggaggtctttcccgatccttttctatgctactccaggagtcaaagcgtctcctgggacttttcagggcgcttcagaagagccctgggcctaaaccagctcaaccaagctgcagggacccagcctcctgagaaaagtgaatgtgagcccggtgcattcagaggagaatgaagccttcacccagaacacactctgggaagatgtcccaggcccagggggagggtttgtactaccagacctaagtcacctaaactgacaccaagtctcatccatcccaaccattccattccgggtcagaggggtcatcgatttaaccagcaaggctgcccatccaacggttgctccctctgctccctggaagggcctcctcgtgggcgttctgtacctacaggtcttgttccgttctgggaactgccagtggtggcaagaggtggagcaacgggtgccagggcagggagaggtgagtctgggagggaagcagaggcaagatccatggggctttagagactttgccaaagcagtgcgactgctcccaggttgttgtcagccgtcaagagtgagtgcacctccctgggcagacttctgctgccccagtgcccaggaataggcaggggtttgccgcaaaatgaatgacacctggcagacaataagctgaagctttcattagcagcttaagctgaggactatctatgcaaccgatactccctgtgtgctccccgggactgcttaatgtgagcccttgtggagcgattggcaccaagaaagcaaggactaagtcagaagttcaagtcccagccttgccacagcctcagggtgccctcgagcacagcaagcctcagttttcccatctgtacaatgagagaggtacacaaggtagactcgaaggctctttgttgccagggccctgtgttcctttgagtgtatgtgcttctcaggcccacagaggtcctttgtgtttcgtatgtgaactgctctctaggaaacccatgtaactgtctgtgtcctggggcacatacatgaggactcatgtgggccgtattgtgtgtttgtgccggggggaggggagaccccagaacaatgtcccccaccccacccccctcctcaataggcggaagccactggcttcctccctttcctgcctcctgcctcctttgtgccagcaagactgagtactggagagagacaggggatgggaaaaatcagtccagctgtccccaggtctgcccttaccataaccttccccccacctcaagtgactcctcccaggccacacccatccccagccttgtgggggccagattggggggcctagaggctcaaaggcagaatgagtcctcccaccccctaccctgccacccctcccacccaagccacctcatttcctcttcctccccagcaccgacccacactgaccaacacaggctgagcagtcaggcccacagcatctgaccccaggcccagctcgtcctggctggcctgggtcggcctctggagtatggtctggcgggtgccccctttcttgctccccatcctcttcttggcttctcatgtgggtaagtctcccctgagtccctcaccccatttctaggccccgaggccctgatttctacccaagaaaccctattttatcatagagacagaaagtaggatgatggttgccatgggctgcagggaggaagaaatggggagttttgtttaaaaggtacagcgtttttacaagatttttacttggttttacaagattaaaagagttataaacatggggccgggtgcggtggttcatacctgtaatcccagcactttggatggctgagatgggaggatcaattgaggccaggagttcaagaccagactggtcaacatagtgagaccccgtctccattgtgtttagactttcgtctttttcaaaaaaaaaaaaaaaggatggatggtggtgatggtgggacaacactaggaatgtatttaatcacattgggttatatgctgcttacaaatggttaagatggcaaaatttgccgggtgtggtggctcacgcctgtaatcccggcactttgggaggccgagcgggtggatcacagggtcaggagatcgagaccagcctggcaaacatggtgaaaccccatctctactaaaaatacaaaaattagccgggcgtggtggcaggagcctgtaatcccagctacttgggaggctgaggcaagagaatcgcttgaatctgggaggcagaggttgcagtgagctgagatcgcgccactgcactccagcctgggcgacagagcaagactcatctaaaaagaaaaaaagatggtaaaatttattttatatgcatttcaccacaacaaaaaattttggaaaacaagccctatcatcactgccatcactttgatccactagaaagtgagatcaaggccaggaaaacacaggcaagtgctagaaatcactgca

SEQ ID NO: 4114 - DNA, 6000 bp, Homo sapiens; identical to SEQ ID NO: 3177

SEQ ID NO: 4115 - DNA, 6000 bp, Homo sapiens
ggcttttgggtttgtggggaaggagaacagagaggcacttgagtctctcccactctggagaggcgtgtggggccaagggagggaattttttttaggatgggaaagacatgcgcatgggcagatgggaatgctatagtgaagagggtgcagtggacggggaatagagagcaaagcctggaggcgccggagcaccctgagcacaggggagacagagcggaaggaggagaggtgtgtgggtttgcggatttggtagtgggagatgagggagtcctcctgtggtggcttctgttttctccgggaaacataagcagtgttcattgagaaattaactcctgtatcatttctccctgcccatagtgactcagccggaagaaatgaaaggcattagccagggccaggcactgcagctcatggctgctgtaatcccagcgctttgggaggctgaggctggaggatctcctgagcccaggagttcgagatcagcctgggcaacatgatgagattttgtccctacaaaaaaaattttttttttttaattaaaaaagcattagtcaagcttttgtgttctaagtcctgggccttttttctcccacctcatacctgagaaagtaaataggccgttttgtagttcttgtgtctgagctaagagggagaataccactgtgtcttggggaattgatgctttggcatggaagagaggggcaggggaacaggcattctccatcccaccctgacctgcccccagaagaaagtggctgcatgcgattcgaaagccaaggactaagggctgcaactgcgggggcctgtgggagaggtcctcttgaaagagctgggatggagggagtagagggttatcttcccaaggaccaggttggacaagtgaggccctgcagatgggcaaaaaatagtggaagccctgtgactgtgaccactgatgtctgcaacagcagcagcagcagcctgaaaaatccttccacctttctctgcaaggctgtggagcacggactgaccatctctgggattgtgcaaacccctggagttcatggatgatcggagggagctgaagggcagccatgagtgatagggaaatcttgctgatctgatgggtagagactcaagctgaatttaatttggtttagaccaactaagggatgaccaaaaggtgtatttacgtcatgagttgcagagagtgtccagttggcccaggacctggacaaagggtgagcagtgagtgggagctgacatctggctctctcctcaccctgcaccctggggctggaacacagcagacacacaatgaccacatggtgccactcggccttcacagatgagcacaaggacatccctccccgccaggcccaggagcagggcagcagggcagccccacgtggaccccgtgctcacagtttggcaaactggacagagccttggctcttctccttcagcagctatcacgctctcccaggcccggccacctgagcttctcatccatgtggctttggcacctaggcctctagtttcattaccttgggtttgtatctagttccagatggcgtacatgcagagatctgggcaggctgcttacaggcattctcttgccctgcctcgacaaacactttgccacatgtgggtgaatgagagggcagacgccaatgggttaggattctgagacccctgtgtccctgtggggtttggagcaagagactggttggcacagcagtgagcacatctgctaacttcaaccacaggaagccaggggtcccagctcacctaccttccagtactgtgctcagtagccttgacaatgcggggcagagggaacagggctgccagagcttcaggactaccaaggcccaggctagcaggcacacaggctagcgaacaccacgagcccctcttctagtgcatgccagggctacagaagactggggctggatgagctctaagacttggtcagggagctgttccctcacttagtcatttatgtctgatggttccttgagcacagataggaaagtcaatcttcattctttaacaaatatgtatcaagtatctattgtgtgtgaggaccctgtgctggccactgggatatgacagggaacaaggtggactcatttctcctgcctgcaaggaactgctgtccacaggtcagggagataggcacagatacaaacagtggtgacagccaggatggcttcctggaggaaacaatggttccaaacaggtacagttggctctgaggtgccaaaacacactaaaggtagagcaagtcttttattttattttattttttaaaacagagtcttgctctgtggcccaggctggagtgcagtggagcaatctccactgcaacctctgccttccaggttcaagcaattctcctgccccagcctcccaagtagctggaattacaggtgcacacctggctaatttttgtattttttttttcttttagtagagatggggtttcaccatgttggccaggctggtctcgaactcctgacctcgggtgatctgcccgcctcagccccccaaagtgctgggattgtaggcgtaagccaccatgcctggccagtagagcaagtcttaaggggcattatattataactgcatgcaagagaagttaggaccagtttggctttgtgcgtgtgtggactgaaacccaaaagccagaaactctctgcatgtgtccctcatggagccatatggtctctagtctctgtttttcaaaatttgcaggactgatgactgattggacagtggtgcaggagggaaggtctctgcatgtcagtgattaaattgctgaagatgccactgcctgagacgggcagtattgaaggtaagcagatctggggtgggcgggacagaggaggctcttagttatatggatctggagctcacaggagcggcccagactggagatagagacttggaagtcatcagcatatggttggtagtggtcaagatgatccagagaaaaggggcagagcaggagaaaagaggaggcctaggacagagtcccggaagagcagaagacgaggtggtaaaggaatcagagacagtagccagtgaggagagggtgggccaatgaagccaaggaaaagaactgttttaataactcagcaatgggcaggaataattggctgaaaagtatacttttaaaatttgggggccgagagggaatctctaaatcctcaaagttctggaaaaaaaggcaaaaatgcttaaagatgcataaaatttgcaatacctcccccgtggtgcaccaaaattaccaatggtgaaaaaccactcactggaaatattcatttttgatccgtttgtcatccaaaccaaattgtccagaatcactggagccagtcccatcccctcctcatacgccagggggcgcacacgcactgtttgtgaattcaagttcaggacaaaaacaggcagtgaatcaggtggttaccagaacctgattcctcagcccagatccctgaacaccacagcaaccatgccctgcacattaccacgtgatccctgaatccaggcacctcaacgatctccaaattttatttctcacctgactccaaacttacagggttatcagaaagaccccacagaagaaaccccacagaggagaaacctcatctctttttctgctcagttacctgacccagggcagtgggggtaggtcccccatccttcatggtgaagcctagcaagcggcggggggaggaggggtggggtagataggaaagagctggtgtggctttggctgactcttaagtggttttaacacggattgcgtgggggcggggtctggaggcaggggcgcttggattgaagctcatcaaatccctctgatcagtaggtcttggaataaatcttcaggtaggttattggtttcacccagaaatttctagggtcattatttgagtttggtatgagaagtcagaaactcagtactgacatttaaattacatttagagggcattatcatgtctttaattccgaggccaatgtaaggttcacagctggaattggtataatattggggtattagtcagtctctgcttggggttgacactaggtcagagaagtggagggtgaacatgaggatgaaggggctttgtgtggagtttctgcaaagccagtcttatcttgggttccaagattattattaaagctgggttggtttagggtcctaaatggtctcaagtttgggtggggtttcaggtcagtatctgtgtttgggggtccttttatggtgacccaatcccaactctggaattgagaatcgaattcagagtgcattggtgttgatctgggaatgggagagcagtactggagttttatgtaaggcttggggttcagaagagagataactggggtccatagcaaggtagcttttggactttagggttcatttagggactgggggctgagcattagtacagggttccatttaaggtccagcgttggtgctagcgtcactatcaaggttagggcaagtagaagtaataaagagatttagagtcagaattggtatttgggatcagtatagaggttcacaacaaaattactacttgtgctaatttgggggcagattaagggctttggactcaatattgggtttagggcaaggtgtgggctcagtatcaggttcagatctgtatggggaggaaatggggtcctagagtggtattaggttcatgctagggctgggagccactagaaggatctggatgtagtatcagagtttggtctgtctatgttcattattggggttcgggttcaatattgaggttccggtcggtttcgacttggcgttgggttgtggcctgtctgggcctcagcggctccgcggctctacgagcgagagtgcacgaggggaggggcgccgccgggggcgcgcacggcaggggcaggggcgcgggcgcgagcgcgaggggagcgcgcggctggagctggcgcgggagcggcgggagcggtggcggcggcagaggcggcggctccagcttcggctccggctcgggctcgggctccggctccggctccggctccggctccagctcgggtggcggtggcgggagcgggaccaggtggaggcggcggcggcagaggagtgggagcagcggccctagcggcttgcggggggacatgcggaccgacggcccctggataggcggtgagtgaccccccggccccccaccagccccctccgctcccgtcccttccccgctctccttgccctccccgctagtccacccggcggagctgggggcggtcccgggggggacgagggcgccgctgaggccgggccgcgcccccacctgccgcgcccgcagcctcggcgaagccccccctccacgccccagcctggcggctcctccccgctcaccccgcggcagacgcgcccccagcgctgctggctggctcgctccccgccgcccctcgccgcctccctccctctccaccgcaccttagccgcagcccgccccccccacccagcgcaaagtttcccgtttgcgttcttgctccccctcatcggtcccgcctcgtccccccttctagcgcggacgcgctccgggggcggccctcagaccccccagccccgggctccgggcgggtccaggccgcgcccccgcccccgccgcacaggcgccccctcccagccggcgggggatccgcagccggcgcgcccgggtctcgctcgcggccccggcgcacgtgcggtcccgggctgcgccgggcgcgagtttgaagcccccccacccccttcgttcgcgagcacgggatggggaggggccgaacgggctgtacccgcccccaaccgggtgcaacgccctggaggccctggagcgacctgtcccgtgaggacgtggccactcggaccctctccgaaagttcactcagtggccgccccgcgtcccgtcccgtcccgtcccggctccccatcgccgtgccggcgtctctgtctcggctgctttctgttttcctcggcgtctctgcctc

SEQ ID NO: 4116 - DNA, 6000 bp, Homo sapiens
acctatcagacctttcattcagccaatatgctgaatgaaatatccccccgtataccaagccctatgctgggaatacgatgaggacttggggtacttacctgcttctggaaggaataaaagttctgaagtactttgccaggtcccatggtaggtgactctttttcatctttcctgttaagaacatatttcttggttgggcacagtggctcatgcctgtaatcccaccactttggcaagccgaggcaggcagatcacctgaggtaaggagttcgagaccagactggccaacatggtgaaaccccgtctctactaaaaatacaaagattagctgggcatggtggcacgtgcctgttgtcccagctactcgggaggctgaggcaggaggattgctagaacccaggaggctgaggttgcaatgagccaagatcaggccactgtattccagcgtgatctcagctctctgcaagctccgcctcctgggttcacaccattctcctgcctcagactcccgagtagctgggactacaggcgcctgccaccacacctggctaattttttgcatttttagtagagatggggtttcaccatgttagccaggatggtcttgatctcctgacctggtgatctgcctgcctcagcctcccaaagtgctgcgattacaggcatgagccaccgtgcctggccaaaaaaaacacatgtcttatagttgagtatggttctagtatttcttcatggcagagccctggagaacccgcaggggaacagttgagggaatgtaagaaggactcttgattctggcacttaactcctgtgtttactaagtttgttatagctggattttttttttttttttggtcacctagaagcaggagagggcagagataggggcagactttgacttagcaaggtctttaactgttaacatttttcagcccagagagctgccttgctctctaaaacagttactttgtcctggttcactcttccctgagtagaggacagttacctttgtgtgcaggtggacgttcctttcaccctccttccttcctgtttcctcagagccaggactgtctccagtttggtcctcctgctgaaggggaagtggtccaagtgagatggacagacggccaagtctatggagccaagtttgtggcctcccaccctatccaaatgtaccaggtatccaaagttctacctttctagggagtggggggtgcttgattaattctgtgcttcctgttgggccagaggcgagtctttgctcttaggagaactaataggttggtaaccctttcagagctaggggtctgccctgtttccagtctgccaaatgtgaagtaaggtagttgttattttagtgttctaactccttcctttgactgtaggggactgccactgtgcatggtggaccagggaaagagtcagggatatcctagccaaaaggcctttgtttccttggtaggtggagtttgaggatggctcacaacttgtggttaagagagatgatgtatacacactggatgaagagcttcccaagagagtcaaatctagactggtgagtattttctgtgtccccccagttcctgtcttggagggagggaacaagtcaaggatgcatccctttgtattgttcctggggtagctgacacttggcttgcttattcttctatagtcagtagcctcagacatgcgcttcaatgagattttcacagagaaagaggttaagcaagaaaagaaacggcaacgagttatcaactcaagataccgggaagattatattgagcctgcactataccgggccatcatggagtaggtgcttccagggtccaagggattctcagccatccaggcaagagcactctgggttccacagcacagcagacatggaacgctgaagtctctgaaagtgaagttgtaaaaagaaaaggaatgaaataaccgacccatcatcttctcacccaccctcattgcattccgctgtagtgaaaggacgagccatttctgggcacgtggcagcagtcgctgatctcccagctgaggggctgagcactggaatgctgtggctgcactggccccagtccatagaggggtcaactatgctggctggactggctgccttgttcctggcctaggacttagcttcataactatcacctgcaccgactaggctgaggtgctggtacttgccccaacccctacttttgtatttatatgtgtgtgtgtgtgtgcgtgcgtgcgtgcgtgcgtgtatgtttggtctggaccagcttctgccagcccctggcctttactttcttccttgcctatgcagggcaaacaaaatgtgaaattctgccctcagctgagctgagtaagggctcctgggggttggctggagatgggtgtggcatctgtccaggcctggaaccgtctcaagacagtgctggcaaagctgcagtattgagatgctaaggagctgatgccacctctttgtcttcccctaaaggagaacatggggataacatgggtgtgtgcccacaacactctaggtgcagagcccctgtggcaaagtattacagggtgtgggtggggattaccctgaatcggggattttaatgatggaagcaggcagagcctggtgggtgattctgtcaacagaaaattgcaatcatgcaggggctgggagggttaggatgaaaaaactggggccattggaggcccactgtaggtgggagggagctgattttggggtggggggtgggactagagggcaatactgaaggggttaaacaggtttttgctcctcaagaatttgtttgcctgggcccaggattggagggcttcacaccaataccctgtgtatacaagaatcagatttataatacttccccttttttgttacgtatgaacactataaaccaaattattttgaaaactggtgcatcaccttgtccttagcaataaaatgtgttgagcagaggattggctgtctgccccaaggagcccacgtggcccacgtcaggctggggggtgtatctagagtcataggctctggagcggggctgtgtattttaagacaaatcagtaaggcattccctaggaagttccagagagtgggtcctttgcttgtcaagctctgtattaggccaagtatggtgggtcatgggagcagggacacttctggctctgagcacctctttgttgtgcttgctctgccttagagacgggcaagatgaggtaacagaggaagcaccagaccaatgagtcctctcaacagagtatctctcactgctgccccatttgatacatctttgttgaactggcctaagttcatgccagcatctgtgctctatacaaattgtggaaccagtgggaaggatgggtgcattttaggtgcttgaaaagcaagggactcaacctccagtgggatcctcagattgctctccgagctgtctagttggtgagaagcttccctggaggaagacccaatctcctttggctggtagatccctgaggtcaaagtggacaaggatggggaaccacagagcagggaggggggcaatgaataggtgcaggacttgggtgccccggagctgcaccggctggcccttaaacagccaggcacttcctgtggcatggccctgtccaggtgcaggagaggcttaggtcagttcagctgctctggatgcttccttgtgtccctgggggttgagaggtggttgctacttggtatctcattgtggagaaagggaggtgcaggaggtgatcttttctatgtcagctccctcctggggcccagggagggaagttggcctttttttttctttgcccacactccacttggggattcccaggggatgtagcaagggaggctgggcagaaccaggccttagtggattggtgagagaacactaatccatacatctttggaagagaggaacacttcaccagcctttttacacaggatccctacctttctcgatgaccccactgcctccaggggtgggcgctgggtttaatcccagcagtttttactcaacagctgaccagttttccagaaactgcactttttttttttggtcaacctaataactcttaggaaactgcaactcaggtgatccaaatcacacagaccggcccgttctctcccctactggctgcctatgcagtcgggtcgacctcaagagaactggccccagccaaaagcggcacctcccggcctgccagtcccttcctgccttaggcagctcctcccagaagcctttttgtagggcaaactgccttccctttgtaaggtagggcctttggatccaaggttgcagtttaaagaccaccccgactttgttgaggaattaagttttaaattccgccccaggcggataacaccagggctcagccgcaggaatgaaaaaggagtgggagggctgcaaagtgtacgtggggcttggaggccttgtgccacgcgcggactaaaaatgttctacgagtctcttaacgctcacccccgtgcccccttacccaccagggcccacggaggtccgaagctttcggcctcagtgagcggaatgggtgcgctcacgacctggagggcgagatgagatgtccctcggcgtgaagtggccgtgactaccctagcactttgcgttccccgcgcgggcgacgaaacacgctctcgaggggagagagccgtgcgtcctctgggccgtgaagccaggggaagagggttcctctagacagctcgatgtgcccgggagagacacccacgctgaacctgcaagctggggtgctccaccagcgcgaacctctcgccccgcactcgccgcagcactgctctcgtggtaggcggggtgggcgggacggcaaatccgcggctcctgcgtctattgggctgctcggggcagcgcagctccgcattggccaggccctcgctccgcccggcttccgcgagcccattggtcgcaggcgcccgaccgggtcgcggccgcgcgctccgcccgccgctgcgtccccactatggcggcgcccatgcagcccagcgcgttgtgggctcccgccggggtcccccgcggctgtcgccgccgcctacgccgctgcctccgccttcctgccccgcgtcgggccgggcgccacctcccccctgcctccctctccgctgtggtaagggcctgcccagtgcgcttcggggcgcgatggctgaccgcgaataacggtcgccgctccgccccgcccctcccccgccggccgcgggtcccgggctgggcggggcgcggagcccgcgcgctagtgcccgggaaggcggggtcggggcacggcccagtcgtccttcgggctgggggcccagtacctggatgacctctcctgggtgggggccgccgagcctgggggaaaggccggccggacgcaggccaggaggtctgagatcatctccgtgtgaaaccccgcagcgctgcgcaccttggcgcagagcacggacaccgtcattcgggccctgctgtgggaaaaggaaagaaaagtccagggagcgcctgagcgggaatcggcagcgtttgggtagcggttgtcattgcttactgctctagcgggggccagaactggggtcagtttgatcggcaaagtacgcctctcttgcttcctttccttctggcactttcccccgttgtgtcctcggtgcttttgcttgcaagagaaaatatcttagtgaggagggcaggtttggttaggagagtgtcccatgaacattttggattcctttttacaacaatgtccatttttatgattcctcagtaagcctcatttatgtttccttcacgtatgaggaaggagtgaaacctgataactgaatgtaattaattgagggaaggaccagtgaaggcggctattacctcagaaagtaaaatactcaaacttttcagtggatgtactgtgaattatagatagctggacattaaggtaggaaaaaactcttattaggttactaaaagtaagatagtccccatgacaaattaggttgtttctaaggca

SEQ ID NO: 4117 - DNA, 6000 bp, Homo sapiens
actcaccggctgaaggccgactgtgattccccctacccccacaaggcgattttgaccccctgagggctgctctagaggactcaggccccgaagctgtcccagggaggtccccgctgcatcccaccacccaagctgtgcctcatggagtcgatgtttagcagccctgccgaggcggcgctgcagcgagagaccggggtgccaggactgcttactcctcttccggacctggacggagtgtacgagctggagcgagtcgctggatttgtccgcgacctggggtgtgaacgagtgaggacagacttagggaagggtggctcgcctctgtcgggatgggtcgcccagaggatccggatcttgggggattttgtgagggcgagagggtgggggaatcagtctgtccgcagcgcgttgaccatccctcccttccacctactacgtggggcagagtgcccctctgggaccaggggctttgaaggttgagtgggagctcctggaagattgctttaaagaagccctcagtgggagagaggctgtccctgactccatggtttatgcttataggttgccttgcagttccctgaccagctattgggagatgctgtggctgtggctgcacgactggaggagacgacagggtcaaagatgttcattctgggtgacacagcctacggcaggtgtgaacttggccttaggtgggccaggcctggggatccggggctcatggggttttacgtctatgacagtgattgccttcaatggtggtgtttctccttgatgataatggtaatgactccccttctgatgctagctcctttcattgacaatgtcttcctttaatgaaaccattttattcactgaccacatttcccagtgatgacagcaactcgcctccagaagagaacccatttctctgatgctatcttccctgcagctgctgcgtggatgtgctgggtgctgagcaagctggagctcaggctctcatacattttggccctgcctgcttaagccctccagcccgcccactgcccgttgccttcgtgcttcgtcaacgttctgtggccttggagctctgtgtcaaggcctttgaggcccagaacccagaccccaaagcgcctgtggtgctgctgagtgagccggcctgtgcccatgccctgggtaaggggttttgcctgtgtatgcacaaagggtgagccaactgctttatgccttaatttccccatttccatataccatccatagaactcttgatatgggcttggccccagcctactgggtcatatttagtctcctggggatgagggagctcctgctttgccaggctccaacctcaacactacctccttctcttccagaggctttggctactctcctgcgcccacggtacctggacctgctagtctccagcccagcttttccccaaccagtgggttccctgagtccagagcctatgcccctagagcgttttgggcgccgcttcccccttgccccagggaggcgtctagaagagtatggtgccttctatgtagggggctctaaggccagccctgacccagaccttgacccagacctgagtcggctgctcttggggtgggcaccaggtcaacccttctcctcctgctgtccagatacagggaagactcaggatgagggtgcccgggctggacggctaagggcacgaagacgatatctggtagagagggccagagatgcccgcgtggtagggctgctggcaggcacactgggtgtagcccaacaccgtgaggcactggcccacttgcggaacctgactcaggctgctggcaagcgtagctatgtgttggccctggggcggcccacccctgccaagcttgccaacttccctgaggtggatgtctttgtgctattagcctgtcctctgggtgctctagccccccagctttctggtagcttcttccagcctatactggcaccatgtgagctggaagctgcctgcaaccctgcctggccacctccaggcctggctccccacctcacacattatgcggacttattgcctggtgagtagtgggggcattgcctaagctggaaacctggggcacggagtcagggggtgagtatggattttctttcctcctccctttcaggctctcccttccacgtggctctcccaccacctgagtcagagctgtgggaaaccccagacgtgtcactcattactggagatctccgacccccacctgcctggaagtcatcaaatgatcatggaagcttggctctgaccccacggccccagctggagctggctgagagcagtcctgcaggtaaatgtacaagtctccactcccagctgagctttttctccagatgcagcgcactcagactgagccccctccctctacagcctcattccttagttcccggagctggcaagggctggagccccgcctgggtcagacgccagtgacagaagctgtgagtggaagacgagggattgccatcgcctatgaggatgagggaagcggctgataccatgtggggctggagacatagatggacttatgaatggctgctaggacctttagtgctccctgcaccaacctcccatccccctgccaagatccttgaaggaccctggaaggagggagagcaggcagcccttcacaggataggatccgtctctgtcctgtcctggcactggcacaagctcagcacatgcccagtaatgcgtgttgtttggctgatggaataaagggcttagggacttccctgaggcctctggacccatctgtcttcctgagggcagcccaggacctttggccaatcccagttcccaggctgcagttgagggtctgtccttgtcaaaaggcaggtgctagacagtctagaccagggtttctcaaactcgtacttgacatttggggccagataattctttgttgtggggctgtctggtgtatggtagggtgctcagcagcatccctggcctctgcccactagacatcagaagcactcccccagttgtgacaaccaaaaatatctccagaccttggcaaatgttatctgtgggggaaaattgccctcaattgagaaccactggtctagctagacctgcactgtccagtacagtagccactaaatacatgtggctaaacttaaatttaagttaattaagattaaaagctcagtttctcagtcacattagtcattcaagtgttcagacagccacatgaggggacagtgcagctacaggatatgccatcatggcagaaagttctattggttggacagcgttggtctatactgactcttatttctcagggagatcacagcaacctaaataaaccagataccttttctctttgtgtttctttttaattcatgaaatactgcaggtcctgcactggtcctgggatgtagatgttaactgtatttaaccagattcctttccagtgtacctggaaagagagttaaatacgcagtcagtacacagtgaaacagctctatctgggaggagggaagccccagggacagctggatcccacaggagatacctgacaaggactaagaggaggcttcccagagggcataacacctatgctggatcttttggaggaaaaaataattgtcaggagaaaaggagtgaaaaagacctttgggcttaaacatgaaccaacatggcggatgcttcaagcaagtggggttgctgggccctaaaggtggagaggggtgaaatgaaaagactcgcctcttcttccccacatttgttgagaatctggtcacagtggcattgtcgagggtattgaaggtgaacaaaggagatgtggtccctgccctcagggaatgcctagtctaatggtggaggcagagctgtaagctaacaaggtaacccagacaaagtgggcatcagtcatgtgttctacaaatatgtactgaggacacactctgtgccaggtactggaaatacagcagtgagcgacacaaaagccatggtgcttccactcttccaggggagttggacaaataaaatacttagtatgccaaatggtgatcagtaagtaccgtgagaaatgtaaagctgggaagcagaggagcgtttaagtggggtggaatattaaacagaatggtcagagaaggccttttcaagaaggtgagcaaaaactgaaaggaagttacaggatgagccgcatgtatagttaggagaagcagagagagcaagtgcaagggcagtgaggtcgcggtatggttggcacgttcaaagaaatagcaaggagggcagtgcagccagaggagggagttagtgggggaatattagaaggtgaagtcagctgaggggcgtggggagcctagcaggctattgtgagaactttggcttttctcctgaatgaaatgggagccatcagggcatttcgacagggtagtgacatcttactgaagcttaataagcatcaccaggacatcgcgggagcccagcaaacgcgcttccctgccactgggttagggaaggcttgccggaaggacgatttcggaggacagcaggtgttagccaggcagcggagcgagcgccaacaggcgcactggggcggagagacgccgtgagcaaggtgaggcagagggcacgcgcggcgccacccgccacaggctaggacgcacggctgccagagaggacgccttaggggcccgcgagcaggctcgggaataaaacagggctggcagggcgaggtggagagactcgagaaggaccggccagatgtcgaagttcctagagaggagggcgcccaagcctccgccgagacgcgtgactacaactaccacaatccccagcgcctgcggttccagcgtcgccttgctctagacgggcggcggcgctgcgcggggaaccggcgtggggtcacgtggtaccggcgcatcacgtgggcgagttaggtgacgctgcggggcgggcggacagactgcgggacggacggtggacgctgggacgcgtttgtagctccggccccgccgttccgacccccgccgccgtcgccgccatgacggggctagcactgctctactccggggtcttcgtggccttctgggcctgcgcgctggccgtgggtgaggccgggtcctggcgggcgggagcagcatcgcggccgagctggccgggtcggaactcggcggggaagtggcctgcggggaatactggccccccgcgcgctctgcacccgaggctctggggacttgcgcctgcgagggcctctgactccgacaaaggagacccggatttccagctgcttgaggaggggtgcgggcgggtaggggccgcgagggcagcactcccccgtcctgccactatcgctgtctcccctcgctcccacgtctcactgctgtcccccctttcttgctcctgaccggcccgctcggtcacaagccggctgctccggttcctcttttcccagtcgctttgccctcccccacccacagcttgttgggtaaacagcggaacggactgggccggcgggatctggctggagcgcttgctccctcggtcccgcctcggattcgggcttgcgggtggcgaccctgcctgcgcaggtgcttggtctgggaggtggttttagcgagggaatggcagaaaatggaggcctaagcagaggaatctgtctacacagctgtactgtcacctgggggcagcctgaggacgccccttcagggaggtggcccttcagctcggcagctactttaggttgaagaacttctctctaccgagcagcccgtaaccccctttttctccctcactgctgcaggagtctgctacaccatttttgatttgggcttccgctttgatgtggcatggtaagggagggcagggggaggattccccttgaagcttcttccctgcagcctctcttcttttctctggtctgagtccctcccccacaccactgcctgcctgggacatggacctttgggaaatacgcggtcagttgttgcctgtagaactggtggtggggttgaagggggtttgaggggttaagattt

SEQ ID NO: 4118 - DNA, 6000 bp, Homo sapiens
gccatcagggcatttcgacagggtagtgacatcttactgaagcttaataagcatcaccaggacatcgcgggagcccagcaaacgcgcttccctgccactgggttagggaaggcttgccggaaggacgatttcggaggacagcaggtgttagccaggcagcggagcgagcgccaacaggcgcactggggcggagagacgccgtgagcaaggtgaggcagagggcacgcgcggcgccacccgccacaggctaggacgcacggctgccagagaggacgccttaggggcccgcgagcaggctcgggaataaaacagggctggcagggcgaggtggagagactcgagaaggaccggccagatgtcgaagttcctagagaggagggcgcccaagcctccgccgagacgcgtgactacaactaccacaatccccagcgcctgcggttccagcgtcgccttgctctagacgggcggcggcgctgcgcggggaaccggcgtggggtcacgtggtaccggcgcatcacgtgggcgagttaggtgacgctgcggggcgggcggacagactgcgggacggacggtggacgctgggacgcgtttgtagctccggccccgccgttccgacccccgccgccgtcgccgccatgacggggctagcactgctctactccggggtcttcgtggccttctgggcctgcgcgctggccgtgggtgaggccgggtcctggcgggcgggagcagcatcgcggccgagctggccgggtcggaactcggcggggaagtggcctgcggggaatactggccccccgcgcgctctgcacccgaggctctggggacttgcgcctgcgagggcctctgactccgacaaaggagacccggatttccagctgcttgaggaggggtgcgggcgggtaggggccgcgagggcagcactcccccgtcctgccactatcgctgtctcccctcgctcccacgtctcactgctgtcccccctttcttgctcctgaccggcccgctcggtcacaagccggctgctccggttcctcttttcccagtcgctttgccctcccccacccacagcttgttgggtaaacagcggaacggactgggccggcgggatctggctggagcgcttgctccctcggtcccgcctcggattcgggcttgcgggtggcgaccctgcctgcgcaggtgcttggtctgggaggtggttttagcgagggaatggcagaaaatggaggcctaagcagaggaatctgtctacacagctgtactgtcacctgggggcagcctgaggacgccccttcagggaggtggcccttcagctcggcagctactttaggttgaagaacttctctctaccgagcagcccgtaaccccctttttctccctcactgctgcaggagtctgctacaccatttttgatttgggcttccgctttgatgtggcatggtaagggagggcagggggaggattccccttgaagcttcttccctgcagcctctcttcttttctctggtctgagtccctcccccacaccactgcctgcctgggacatggacctttgggaaatacgcggtcagttgttgcctgtagaactggtggtggggttgaagggggtttgaggggttaagattttgtgctccgcttccctgctagagctgaactgctttcttctctgcttccacaacaggttcctgacggagacttcgcccttcatgtggtccaacctgggcattggcctagctatctccctgtctgtggttggggcagcctggtgagtattggggtggtgggactgggggcaggggctgagtcatggcaggtggtgtcactggggtcttaggcatgctgagggcagtgacagcttgggctctgctcatcagttttttatccttccaccaggggcatctatattaccggctcctccatcattggtggaggagtgaaggcccccaggatcaagaccaagaacctggtcaggtaagtgtcagggtccttggacttttgtcagaaccagctgtgttggcgctgcctgtgtgtttgatctgacatactgtttctgacaagccaccttgtgggatgggatgttataggggaaagattgctggggacttactgggcaggaaggacggtttctttctcatttctttctcctttccactccttacccctaatctctaccactaccagcatcatcttctgtgaggctgtggccatctacggcatcatcatggcaattgtcattagcaacatggctgaggtatggaaggccagggtggtggcgggaatccattccagtgtgttctacacattccttagagattggatggggtgcatcaggatggtttctgattacttttcttcttccctcagcctttcagtgccacagaccccaaggccatcggccatcggaactaccatgcaggtgggtggatgggcgtatgaatgcaaaatgctgggacttcatgcctgcttccactctcccccatcccagcttgggccatcattttgatattctctcacctactttttctgctttgcagagtggggatggtgattggccccattagcccatatctcccccattcctggcttagcctcactgcacccctctctatcctcccaggctactccatgtttggggctggcctcaccgtaggcctgtctaacctcttctgtggagtctgcgtgggcatcgtgggcagtggggctgccctggccgatgctcagaaccccagcctctttgtaaagattctcatcgtggagatctttggcagcgccattggcctctttggggtcatcgtcgcaattcttcaggtgatgaatccccttgggaagcctctgtgtccttgtccccaacctagccttaccctccttctggagaagctgaagtgctctccttctctacctataactatagattcccccaaacagcttccacctcctcatttccatcttctggttttctcctacaggggctctctatttttgtctctgatttggtgtcactgacaacagccctgttctttttcccccctttctaatgcgttgtatctgtatagcacttagtcctccctctttctgttctctcattttatctgccatgcttttcatgtctccagtctgtatttgtgatctagactagaatggaattttgtctgtctatatcagtctgtcatggtgtgtttgactgtctctcggagctatgtgtatctccctctcacatgcctgtcagtaggacaccattgtctaaattgtgtgtgtctagtctgtctgacagtgtgtgagtttgtgactaaggatcagcctgagggtctgagtgtgactgtgggtgcttgactgagttgattcttagtgactagctttatccatatgccacttctctccgtctgtcccacagcgtaactctgtggttgtctgtccctgtctgccttgtctgtcacagtgtgtccatcctggttagtcatatatctcttgtggtctgtccatccaaccatgtgctagatgtcatcttctatcatttgtcactgccttacctattcctctgtccctgcctgatttctcctgttctttttttgcagacctccagagtgaagatgggtgactagatgatatgtgtgggtggggccgtgcctcacttttatttattgctggttttcctgggacagctggagctgtgtcccttagcctttcagaggcttggtgttcagggccctccctgcactcccctcttgctgcgtgttgatttggaggcactgcagtccaggccgagtcctcagtgcggggagcaggctgctgctgctgactctgtgcagctgcgcacctgtgtcccccacctccaccctcaacccatcttcctagtgtttgtgaaataaacttggtatttgtctgggtcagtgcagcttctgttgccctcttgcgtcaccgttcacagaggaagggtaaagaggcctgtacgcctcagcctcatgccaatcccttgtcagctttctgactgcacacttctgatctgcacagagcttgctcctaggtggggaggcacgggtgctgggtggactctaacccccaaacagacttgtttggggatgagggagtgtgcagataggggcccctgggtgtgtttgtgcctgtagtccttctaggcccgtttgctcagggctctgactgaccaccatgcccgaattgtctgacagcatctacttacctggttgtacagtcgggcaccatcatctccgtccttgtgaggcctggagcctaggcagtggtctctgcctccagtgatggtcctgtccttctagcagcagcccctcccagaaacctctactctgatccttgttcccagggcccagggcagctcctcccaccccatccaatctcgttttctccttccctgaccctgtttcctgttaccccagaagccccagccacctccagcccacgcctttaagggtcctgccccctctctgctggccgaccttgaatcttggtccaattaaagagttgacaaatccctagccccgcagcctgagtccgcccaacctccaggtccccttcctggggagttcgcgctccaatgcaatccccactccccgctaagggactccacggtctgcacccgctcgccggtccgacctctaagcccaccctttggacgagcctgacccatttcctcccgcgctcccaggtccgtgcctcctgggtgcccgggttcggccgccggcagggcgggctcgcagcggcgcgcggcgggtgcgggcgtgctggaggcgggggccgcgggggcgcgcgcgcgggcgcgcgggccgggcctgcccctccgaggcgccgtagcgcgggagggaggcggcggcgctgtggtccgtgggtccgccggtccgtgggtctgcccggccgcccggccccgccctgccccccggggcggctcggctccatggcccgcggcggcggcggcggcggcggcggcgggaggcgacccgggggccgcggtggccgctgaccgggcggcgggaggcggcggggccgggccatgggggacggaaccgtccgcagccgccggagccgggagccctgcccaagtcggagcggcgtcccctgctgagccccgagcgccgggtgagaggagggcgcgcgcggcccccacccagggccccgagattccagacccagccccgcgaggggcaccccgagcgcggccccgagatcccaacccaggagccggtgagagaggcgccggcggccagaccccggcctggctgcccccaccccgcccccactccggcgcccctcctgggcttctccgcccgcgtccagccggcctccctcattgtcctcgctcgccccggcctcgtggcgcggggaggcgttccatacacgtttccccttggcctttgcctcatccgctgccctccacccactccccctgcccccaggctccacacccacccggtctgtgcggcctgcccgtccgcgggtgccacgtgttcagcctgccagccccgcccaaacgcacccctcagcctggccgccagcctgacccagaacccctgcgccggagggagggtgggaatgtctgcacgtgggtctgggtgtgagctgtctgagagtctggatgtatggctgtggaagtccaggagcagtggccttgtttgtgagtgtgggacttagtgtgttactgtcacccgggtgtgtctgtgactgtagttctctgtgtgtctgagtgtgggtgaccagctgggaccagggtgtccctgtgattctgtgtgcctgtgagactcaccctgctccctgaagcactgccagaagtggctgccgctctcttggaaccacagctggagccatcgcccaggcaagacccccttcctgccatgcccagtgctgtgcccatctccaggcccaagcatcccgttccgggaatcagaaccagctgtgctgggcaggacccagagtcttggtcccagtcccaaggggctggctttgaggtcttaagtgaggggtgtcccctgcctt

SEQ ID NO: 4119 - DNA, 6000 bp, Homo sapiens
ggcaaaccaagcttctgggctagcttctgggcacttctagaggatcagaaaaatcccaggttgcctgagatgtctgagaactgaggagaggaaggagagggaagagtttgaggaaggaagcagttctggaagttccctgcctcttggattcagcccctccccaaaccctctgcttccagccaatccatcctccattaaggctgtcagcactttggggtgcctgccatcaggagtcccccatatatgtaggggtgctatttcacagagatcatcctttggcgtgcctaaacagaaccaggtagggaaatcttcactggctctggtttttttttttttttcttgagacagagtctagctctgtcacccaggctggagtgcagtggcgcgatcttggctcactgcaacctctgcctcccgggttcaagcaattctcctgcctcagcctcccaagtagctgggactaaaggcgtgtgccaccacgcccggctaatttttttttgtatttttagtagagatgggatttcaccgtgttagccaggatggtctcgatctcctgaccttgtgatctgcccgccttggcctcccaaagtgccgggattacaggcatgagccaccgcacccagcctagtggctctgttttttaaaaccccaccctggctcacaggccccctggctaaccttgaggtgggaagatccacactatggtggtgtcagtgtgggtgttgttgatacccatggccctggtggcaggattgatggctgcactgctggcagttcgacctcggagaccctgttgatatcttctgcggctacacttgaacatcctgggaaatcggggcctgggccagcccatacctggcctgcggtagggggaacgcatgccctggggccgagggccacggacaagccgagatggccccatgggcacagggagcttctgcagtgtgcctggggggtgctgttggccagggtagctgaggcctctatgacatacaaagtctgcataagggcagggccctttattacaagtcgtgggccctggcccctcctcatgggtcaggctccttcacaatcttctttattgggtctggcctaaaagccagcccaagagccagacagcctcagtttggccccttgggaaaagaggccctagaggcggaactcacttcctcactttctcacttatccatatagtaacaatattaacaatgttttttgagcacttactacgtgccagacactgtgctgagcactttaccaacgttatctcatttaatctcagctactttacaaggatatgccatcattatacctatttatatacagtcaattctcattattcccagtaatgttctataaagtcgccacaaacactaaatactgaacaaagggtaaatgcaaggttaggttcctgaaaccctctggtcacaatatttttgtcaactgatctatacatataacctgattttatgtgtggagacaccttatttaatatatattgttggccaggcatggtggctcaagcctgtaatcccagcactttgggaggccgaggtgggcagatcacctgaggtcaggagttcaagactagcctggttaacatggcaaaaccccatctctactaaaaatacaaaaattagctgggtgtggtggtgggtgcctgtagtcccagctactcaggaggctgagacaggagaatagcttgaacccaggaggtggagattgcagtgagcccagattgcaccattgcactccagcctgggcaacaagagtgaaactctgtctcaaaaaaaaaaaaaatatatctatctatctatctatctatctatctaactatctatctatatttgagtcattgacattgaactcacagccaacagcattataacttgtgcctgaatgaaacttatctaaagcacatatttcccctataaggcacatcacagccttcttgcacttagaaagactagagagcacttcagcactacaactggggaccattttagacagtaaaatcaccagcaaaaaacaccaaaaaatgtgagaatatgcgtcactaaatagaccaccaaaaagcacatttgtttactctatgaaaactgaaataagaagacagagagtcctcttgctcaacagacctcagctggaaatacgtgtgttggacggctgaaattttttgcctttctgctcatgtccatgaatgactgcaaaagtaccacaagtactggtttgggaattacaaataaatttcagtaagcaggcaaattcacaggtatggaatctgtgaataaggaggatccactgtataaggaaactggggctcagtgaggtgaagtcacacaattagaggcaggcaggaagcaaatccatgatgatcaagatccaaaacccagagcacttaactctcattattctgcactcattcactcaggaaatgttcactgacaacttcttatgtgccaagcaccagggccatagatgaatgtaatctggtcccaattcttcctgagaatgaaacagaaaggttccaggtgcggtggctcacgcctgtaatcccagcactttgggagcccgaggtgggtggatgacttgaggtcaggagctcgagagcagcctggtcaacatggtgaaaccctgtctctactaaaaatacaaaaattagctgggtgtggtggtgtgcacctataataccagctactcaggaggctgaggcaggagaatcgcttgaaactgggaggcggaggttgcagtgagccaagattgcgccactgcattccagcctgggcaacagagtgagattctgtcaaaaaaaaaaaaaatagaccttctccttctccttccactcctcagtcccttcttcctttcccccttactctgctcctcaaatgcccccttcccaacttcatcctcctttctgtttgtggaggactctgtggcacccttagtaccaccctcacaaacctcatctttcccccatcccctcctccagcctctactcttgccatcctcagtcttaaaatatgaccttgcttccaccaacttctagcaactgtaactataaaccgacctgcccctgctcctcctcttcctcaggtcagaccaaggcctcttcccttgctctttatggaagccagccttgtctgcctctttagagattccatcagtgtagacagtctgcttggtggttaagatgtagactctggtgccagactaactgggattgaatcctggctctgccacttacaggctttgtgatcatggcaagtacctgaccctttggtgcttctatttccccatatttaaaaatggagatcagaaagtctatctcatgggatggttgtgaagaggaaaaaaagccttaatatatgcaagacatttaaaataagatcagtattattagtgtagtctgtaatactattagcccctctctcttctgtctcttcagctgcctcctttcactataaaaacaaaacaaacttagaaatccacttcctcagctaggcacagtggctgatgcctgtaatcccatcactttgggaggctgaggcagaggattacttgagcccagttcaagaccagcctggatagcatagcaagacctcatctgtttaaaaaaaaaaaatttgcttgagtgccggcaaatacctgtggtcccagctacttgggaggctgaggatcatttgagctcaggaggtcaaggctgcagtgagctgtgatgttgccactacactccaacctgggcaacagagcaagaccctgtctcagaaaaaaaaaaaaaaaaatcaacttcctccatctcatagccccactgcctgtgactctctcgactttgaccttcttgctctgtgctcattccctactgtcccttccttctagagcaggaagaaaatctcatttgaaaagcccagaactattctgttacacagaagaccaggaaagagaagtttaaaaccaagtctaagaaaagtccccagggtcacacagttcataagcgacagagccaggattccagcacctggtctgaatgacccagaagccaggacttttcccccgcacctctacatcaggcgtgctggagcaggaagcggtcaggcagccccactaggagtaacaaagatgggatcacagagccttggaactgggggtggctccttcatgagaccatggtgccacctactggcagaaagagaaggggtgtacacagagcgctaagagaagactgggaaggagaaaaagaaaaagatggggaaggagaggagatggaaagatgaagggaggggaaaaatggggaatgtgaggtttcatggagggaagaggattaggaactatttgctactcgcaggagagagcggaagctgccaaatctcagtcatttccttgaaagtgagtgagagacagagaaagagaaagagggagtgtgtgtgtgtgtgtgtgtgtgtttgtgtgtgtgtgtgagtgaaagagatacttaagtacgtacatcagatattattctgttgtttgttagttgctgggagtcagtccacaaagaatttagtgtgcgtgtgtgcgcacggacgcacacacacacatgcattcaggaacactagcacatgtttatgtatgtaactgggtgcttgctgtatgaacatatggatggcagcatgagcagatgcatgtgcatgtgagcatgagcacagagggtatgtatgagtgtatcagcagatgcagggtaagaagcacattacactgttgtggtggagggcacgcagacattctgggaagccacttgccccacccctgggctgcttcttcttgagatcaggaggggcgttgcccagggctggtgttgccaggtggaggcctgctgaggcagtggttgtggggatcggtctccaggcagcagggggcagcagggtcaaggagaggctaactggccacgggtggggccagcaggcgggcagaaggaggctttaaagcgcctaccctgcctgcaggtgagcagtggtgtgtgagagccaggcgtccctctgcctgcccactcagtggcaacacccgggagctgttttgtcctttgtggagcctcagcagttccctctttcagaactcactgccaagagccctgaacaggtaatgggatagggatacagattatcctgtgaagtgatatcgatctggaaacaggtctggggagctggaggggctctagtgagggttctgggagggtctggggttagtgtgggggggagcacaggatatacaggtgctaggaaagagcatggagtgacctgcagtgtgggagtcaggctgggtgtgcaggtggaggaacctggggtgttaggatctcagagtgtcaggtgctggtggaggtcctgggtagtatagaggggtaagggtgttaggatagaaactgggaaaaggtctgtgtcagaccaggtacaggagaagcttggtgagatatgggttcaggatcctggggtctggcatatctggctgaatatctgaagccagggccagcccaggtgggcccaggggaaacaaggccctaacttgcacatgtctacctcccaggagccaccatgcagtgcttcagcttcattaagaccatgatgatcctcttcaatttgctcatctttgtaagtacggacattgtggactctttggggctccctataggagcaggtcacaagctgagtagagactaagctggggaatgggagactgctatgcccaggcttcgtcctgcatgtgtccccttatgagtgggatgcaaaggtctccccaaatgctgctgattcctagtcccagcagcagccaggctgccatacaggtgcgtgtgtgaaaaaggggatggagaagctaggggcaccccctctctcctacaaagctttagcctaggcttcaggcagggcagagtaagctaccaggaatgattctccaccctttataggcactgggggcccagaaaatagaagggctccacccaagtttacctaccacagaaggaaattcagtacagag

SEQ ID NO: 4120 - DNA, 6000 bp, Homo sapiens
aaaggtctttcataatctgccctgctagtatcagctccctgctttgcctcctacatttcagccacacttaactactttttcatttacctaacatattatgccgctttctgcccctgtacctttgtcatgctgttctttccaataggaatgtcctttgtcatgctgttctaataggaatgtcgttgccactttcagtatatcaactactcatctttcaagtatcacatgccctttattaagtctttcctgaattccttttccatttttccagattaaccactaccatcctttgggctactgctatattctgaactagtactttcctatgaagaatagaaacaattcgtgtctctaaagtcaatatatcttaaaaacaaaacctgctcttgccaacttctctagttctaagagctgttatagtatagtgtctaaagggtttggcctctagagtaggacaaatctgagtgcaatcctaactacttagttaaatgtgaatccttggacaaattatttaagcctctttaagccttagtttcttcaactggaaaaaaatggaggctgggcacagtggttcacacctgtaatcccagcactttgggaggctaagaggatcgcttaagcccaggagttcgaggctacagtgagctatgatcacaccactgtacttgagcccaggtgacacagtgagaaccctatctcaaaacaaaacaaaaattagcagagtgtgatggtgtgcacctgtggtcacagctacttgggaggctaaggtgggaggatggctggagcccaggaggttgaggctgaagtgagctgtgcttagaccactgcactccagcctggatgacagagcaagaccctgcctcaaaaaataaaaaataggtgggatgcaatggttcacacctgtaataccagcactttgggaggccaaggcgggcagatcacttgaggtcaggagtttgagaccagcctgaccaacatggtgaaaccccatctctactaaaaatacaaaaattagccaggtgtaatgatgcacgcctgtaatcccagctacttgggaggctgaggcacaagaatcacttgaactcaggaggtagagactgcagtgagccgagatggcgccactgcacttcagcctgggcgacagagcaagactctgtctcacaaataaaataaaataaaataaaataaaatggagataacagtaattaactcatgacattgttgtgaagatcatgcttataatctgtttaaaacaatgcccagccataataagctcgctaaatgttggtggttatttttatcctgtcaatggcatctctgtccaatcaagaacaagtcaaactcacacctgtaattcctgtaatctttggaggtcagaggtagggggcattgcttaagtccaggagtttgagactagcctgggcaacatggcaaaaccccatctctaccaaaaatacaaaaaaaaattagctgggtgttgtggggcacgcctgtggtcccagctactcgagaggctgagatgggagaattgcttgagcccagaagacagaggtggcagtgagctgatatcatgccactgcactgcagcctgggtgacagagtgagaccccatctcaaagaaaaagaacaagtctaagatcttggagtataccaaaacttccgctccagggtctctttttatctttacttacagaataactgaatcttgacatccaagaatctagtataattatttgtacatagtaggtcctcgatgtacgggctgaatgaaagtgttaattccctatgcttttacacgaatgtagtccacatcacctttcatctggtctattacaacagcctaactgctctccttcacttcagtctccatccagtccctcttcatcctgctcttggtgatgacactaccctcttcaaaacccttggaggtctctctgctgcattcatgataaagtccaaactccatatcctggtattcaaggtataatataccttattttaaagtttcctcattgtaccctttcctgctgcctctatacacccgctgccccaactccttacacaaagcgatgctagtccactacctccaggaagcctttcctggctgttagcccacacagaccttcctctaaaatagcaatgcttagcaggcctcttccttggctattctcctaaaaggcctcacttgattcagctttttctggtctaggcccacaggagctcttcctcccctgtctcctctcaacttggctgggggctcagccagtaatgggatggtggtatgtacagcagtggtaggggagggagaaggggaaagggagattcagtaaactgtcaattgttttagggggaagaggccacacgggaagaagttcctccagagccttaccccttttccctccaacctgctcccctctagttagccatctcttcttgcagccacaggaattctcatccccagttacccacaaactcctctcttcctttctccattcttcttaagccgggattttccttgcttctttctagcctgcacctttaatgctgctgcttcccaacctgggcctccgcacccagtcatcttcctttttagccagtcttagcatcccagaagctccaggcggaaaagccagaccctctctgccttcttccccatgccctaggacttttctgagctccctgctcagctctacggagcctttcctcctgttccccatgggtcggcctgccccttgtcttctcagccgctggctggcctggggcctccactgtcccctccgcacaccggccgacttctaaaagcctcttccaccaccactatgcaggacactcaggcctcatggtactgggctccactcccacagccaagggcctccccgaccaccctccagcttatcccggagcttcagtccccccaaactccagggccttttccccacaccccctcctcatggcataactcaaactccgcgccctgcaacctcgagtcctcaaagtcctcactcctgtcctgaccagggccttcctcctgcaaagacgccacggccacccgcaaggcctcctggtggaacctcccccgcgccgcttccaggcccggggcctgctctcctgcccccctccccagcaggcctcggccgggcctgccacctcttcgcccaactccaaccccggcctcccgaccccaccctcacagagccagcagcctctcaggcccgaggcctcccctgtccccagcgcggctaggcctgcttggcagagcctcactttcccctctttcacttgccccacgtcggacccaagtttccctcgtcagcggccaggccgcggccagcggtccccaacccacagccccgcctcccagcccaactggccggttcgccctccccggccgttcatcccggcgccccaggccgccctccatccaggcccggccctttggtcccggccgccttcaggcctggggcccccgttcactcccattcagcccaaggcctcttggcggcgccgcgccccctgccacggcagcccggcagtccgggatccccgggccgtcgccccgcttggggcctccttggcccttcccgcctgtccgtcattcgagcctccctcgcttgtttaagccgctccgggcccccctccactcgctctccggtccctcctcgccgctcgagccgatccgagtggcctccggcgctccctgtcctgcgggtcgcacggtcgctcggtcgcttagtcagtttggcacccgagaccccggttgtcggttcgctcccgtcagccctgggccgtcagacaggccgcggcgccccgaccctttcgttcggcctctccccctgccccattccctcgctctccaatctgctgtcctcccctccgcccatcggcttggcctccggaatctcgacccccgtggcgtgtcaggcagatgctggagccccggggccatcagtcaggttcggtggccccgggcctggcctggccttgccttaggccgggcctcctaacctcggcccctgccctagggcagccgggccatcgctgcccaccggttcgacatccgagactctcctgcccggcccagccgagtgtcagttcgcgcggcccacagccgcaatccagcctcagtcgcccgggcccagcctgcttcgctccagaccgggcctcctggcctcgccccccgcgcccccgagccaggccgcggtgcgggtcagcctgcccatttaggtctccgtctttactctgtccagccctgtcagtcacaaaattcattctccgatcctacgagctggctttcagcgccccaggctgggccttgccccgggcctcccggcctcgccccccgcgccccccggccgctgggccgccccttgctcttagccagaggtagcccctcaccccgcgacttaccccacaccccgctctccagaacccccatatgggcgctcaccgcccgcccgcacagctcgaacagggcggggggagcgttggggcccgaggccgagctcttcgctggcgccgcctcccgggacgtggcctccatggtcgttgccgccgctacctcacagaaccagcaactccgggcgcgccaggcctcgggcgccgccatcttggggaggtgcgcgagcccgagagtgtcgcccgcggaccgccatcttgaaaaggtcagcagttaggacggctccataagcgatatggggaagaatgtgaattattctaaagaaatttcgaagaaattagcacactttccaagtctcttaggagctactattttagataaactcctagatcaattatacttgggtgtggtatgactaaggggatgtttcttagcaaagcctcctcgggtgcaaacatcagctacccctaacctctgcctgcggctggtagtacatgccaatctgagcatgtgttcgcgaccacgatgagtgtgccgcacttccggccagatcgccggatttccgctgagtgacccttacaagtccttcttgatcctgaactgggttaggtgccgctgttgctgctcgtgttgaatctagaaccgtagccagacatgggactggaggacgagcaaaagatgcttaccgaatccggagatcctgaggaggtaaggcaaggcgatccactcggccctcttctctgccctgaagcccaggacctagcccgccaaaacacgcacggggccctcttagcccccagtttaccctctagggtttgcatagtcgggagctctagttccctcgacctttccccagaattcgtccggtgactttggacagatagatgactagtttttctctgggcctcggcttctgcattctgtgaatgtagtgaaggtttgagagcgaaaatgttttgtggactaaagtcttgtaaaaatatgacctatgtttgcagtcagtcagatgttctgaagcccgcgtttcacagatttggggagcaaacagaccgccttgccccagctcaggttaggaatccctaccacatcttctatggaggttcggaagacctggccttgtgttccttttctttgaggaaggtgtgtgtctttggggacaatgaaagaatgtacgatgtgattctgtgatggaagagggagctctttcccagagaaagagtgctgctataattattgactgcttgctattccaagtgctttatatgcactaattaattttttttttttttttgagatggaatctcgctctgtcgcccaggctggagtgcagtggcgtggtctcggctcgctgcaacctccgcctcctgggttcaagcgattctcctgcctcagcctcccaggtagctgggactacaggtgtccgccaccacgcctggctaatttttgtgtttttagtagcgacgggggtttcactctgttggccaggctgatctcgaactcctgacctagtgatccgcccaccccggcctcccaaagtcctgggattacaggcgtgagccaccgcgcccggccctaattcatttcatctacacactattcctatg

SEQ ID NO: 4121 - DNA, 6000 bp, Homo sapiens
tagtagagatggggtttcactgtgttagctaggatggtctcgatctcctgaccttgtgatccatctgccttggcctcccaaagtgctgggattacaggtgtgagccacctcacccggcctactttgacaatctttttaaaagtgtccttgtagactgcactggaagcaagccctattaggcattcgatttgcccagtttttcccttttccagagcctccaaagtccacttgcctgagggccatgactaaagtggtggcctcttttttatcctgtttgtcccattccacctgctcctcctgatctttattataaaaaaccaaggtttccaagttcaatagggtttctaagttttgctccaggcctaaggcggacttttgaagtttttttctaatgtctgcagctgactgagtgataaacttattcttcaagattagttggccttcaatagagttaggtgacagagaggtatgctttctcaatgcctcccttagtctctccagaaaggcagtaggattttcttcctttccctgtattatagtggacatcattgaataattcataggtttcttcctagttttccttagtccttctagcacgcaagttagcaaatgtctgctgcaccaatctccatgttctgattctgtgtcccagtgagggtctacactgggaactgcctgctggcctgtggggaatcgttctttcctctgttgtcatcttgtcattgacctgactgagataccagagatcaccaaactctcgggctgcagttatggcagcacttctctcatttgggtttagtgtctgatttagcaataacattatatctttccatgtcagatcaaaggattgtcctaacccttggaaaacatcaatatagccatcagggttatctgagaatttacctaggcctattttaatttgctttaagtctgagagagaaaaaggtacatgcactctggctgggccgaattctcctcctcccattgcttggagaggggcataattggggaatattagcactctttggttcattgtttacccctttgtctatctccttttggacgtttgggttgaaggggggtcctcattagttggggaaggagtcggggggacaccagggtagggaggtagactctagggcttcctgtaggacataaatcacactttttacataattgcgagttgtctcttaatgaaaagaaagtttgtacatatggcacttcattccatttgccttcttctctacaaaagaggtctcactgtaagatggtgttataatttatatttccctcaggaggccaggtttctcccccttgaagaggatatcatggccaggtggtactgcagaagaatataagtcatttctttcttagcgtctgagggtcaaattggtcccaaatctccagaatacatcttaggggcgtttttgccttgtggggaacgtttcccattgctttggaggtcccttcgtggtcgccaaatgttactggggggtccttgctcccagagctcccaagatggtggcgggccgcttccaagatggtggcaagcctggtgttctctgacctggggttcttggcctcacgaattccaaggaatggaatcttgggccatgcggtgagttttatagctctattagaagccgtgggtcatggaagagaactgtggaacccagtgactagtgttcagcttgattaggatgaacctgggcacttagccgtgcaggaacaatggcaaacctttagcctgattgggagcggcaatgggcgcctcgctggatcaggagcacagtagacaccctgccggatccagagggatggaagtcggcggcgggtctgcgatggcagcaaacagcagtggatgtcgagcgaaagctcagctccagccatagcaaacacggaccagaagagagtgcagttgcaagatttaatagagtgaaaacagagctcccatacaaagggaggggacccaaagagggtagccattttttcactttttttttttaacttttgttgaaaacattttaagtttggaatttcaactattctttgctattaataagacctcattcagtccatattaacttagaattggtatagatgggtccttcctgattctgtaagtgctttaaggcttggctgagtgcaaacagctctcacatttgaacaggccaattattaggcaattttcctaactctgcttctacaagagtttccttatcacttactgaatacccattgtgtctttttccctcaattacccaggaggaaccatctatcatcctgtcctgaagggagttcttcctaggtctggtcggacctttgtatggtaattaattaagatttagatcccatgttaggaaacctgctgggttaagggaattttcagtggttaatattaaatcatttttttctaacagaacagcctcatactttaaggttcttgagtcagtaagctacctttttttttttttgacttaggatagttctgacctgatgaggtgtgctcacaatgaggtttcctctaaaagttgtttttctactttcttctgttagcaaagcagttgctgctacagattgaatgcatttgggccatctgccggttactgggttaaggagttttgattagggaggttacgggttgtcagtggcctcagtgcttttgggctacatccttgtttacactgacaacaaggtggtattggagtgttatagggtcatggagaagaccttcaattatcaattacaggttttgaattttatcctggcttttaaaggaatagggtacactgttttctctttactacttctatctctctttctctctctctctctttgactctctctctctttccctgtctctgactccctctctctctctctttttcttttgagacagagtctagctctatcacccaggctggagtgcagtggcgcgatctcggctcactgcaagctccgcctcccaggttcacgccattctcctgcctcagcctcctgagtagctgggactacaggcgcccgccaccacgcctggctaatttttttgtatttttagtagagatggggtttcacggtgttagccaggatggtcttgatctcctgacctcgtgatccaccggccttggcctcccaaagtgctgggattacaggcatgagccaccacgcctggcttctgtctttctgtctctttctctctctgcctctctttctctctctttgcctctctctttctctccaacttcctctcccagtttctctttcctctctgctggtctttccctgcctctgccagctgcttatgctgctgttctcccctctccttccccttcccctagggaagggaccgtcaggagtgcagctactttttcttccccgagaagaaaggaaaggggaattctgaatatttttcttactaccggaggtttgtgtgaggtttttgatcccctgaaatttgtggaaggctcaacacctcaaaccagggggtatcttgccttgcctgacctggaaggctcaacccctcaaaccagggggtgttttgccttgctgccctggaaggctcaatccctcaaactaggaggtgtcttgccttgcttccctggaaggttgacctgtttcctccctttccccctctgaaggtcctttgcacacttcccactcgtgttgtcctctctggctgctcccccaagggagaattaggcccccctcagcattggcattccagtagaaatcccaccgcaggatcctccctaagccatatgaggtagctacggaaacgtggagaggacccactcactccgtccagcagtaggacttgtcatcatccacacgaacaacaccacaggtagggttgtttgtgatcattcacgcacacacacatttagccctccagaatttgaccaccaaggaagtaccttaccggctccctcggcttcttcctttgtctgtgcacagagttgtctctgcagtgtgtgaggatgctttaccctaggttgcctgctggtttcttttcacattgctgagagctcaggttatttcttgcactgggtgagtcctgatttctcacccctgaggccatcacaagagggtggggcatacctcctcaggagagagaaccagagactgcccctgaaggggaatgtaatcacgagcaagcccccaaattgttataaataaagtttccccccagtgccgcaaaagaaatagcactcgaatataaaattttcttttttttcttctcagcaaggcaatttacttctatagaagggtgcgccctcacagacggagcaaaggtgagcgcacacctggacaagggaggggaaggtggttcttatgcctgacccacgtgattcctgatgctgtgtccttcccctgttggctagggttagacctataggctaaactaattccgattggctaatttaaagacagtgagggggtgagtggtttggcgggaaaaatggttaccgcagagcaggaaatcggaatgaaccacggtgaagaatgagtgagggaggagcaggtaatcgaaaaatgttgctttatgaggaagttaagtttaaaagtagaaggcaaagaattgaagatactgacatattgattcttttaagataaatttagaactcatatctaacagctggcatgtctggcatggggctccggctggggcgcagtcttcagcatttggggctctggggtgcagggggcagaggacggccggggctgtggtgcccaaccggtgctaaactcaagcttgggaggtcgcccacgagaaacagtcgcccttccccacccgcctgctcggcttggcggggagcgggatgtcgctgggggcgatgccaggcgggccgcctctgatagcctctaggctctggcgcgcttccccgcccctcccgcgcaggcgggcgtgggatcccggctgatccagtccgggttttgcggcggagcgggcgggctgcgcgtgcggcggcttcaactgtcgcggtaggcagcagcaggctgaagggatcatggtgcagtacgagctgtgggccgcgctgcctggcgcctccggggtcgccctggcctgctgcttcgtggcggcggccgtggccctgcgctggtccgggcgccggacggcgcggggcgcggtggtccgggcgcgacagaggcagcgagcgggcctggagaacatggacagggcggcgcagcgcttccggctccaggtgactgccggagcgtagtgggatgggcgcggcctgagggtactcgcagcggcactttcagccgccggacccgccgagggacaggggatggggcgggcagagcagatgtgtaactctccagaatctctccttgccctaagatattccgcactttctgagccaggtagagcacgggggaagaaaggaaacggtagtgtcaaggcaggtggtggaaggcctttccctcactgggtcaaagaggagttttgctttgtgccaaagaatctcacgattgctgcctattggaatgcgaaaacgcaagcgtgacaaccagtgggatgccaggggttgaggactttggaatcgcagagtgtaatggccaaggggatctggagagcttagagttttgttttttgtttttttttgttttgttttgagacggagtctcgctctgactcccaggcaagagtgcagtggtgcgatctcggctcactgcaacctccgcctcccgggtgcaagcgattcttgctgcctcagcatccccagtagctgggattacaggggcccgccactacgcctggctaatttttgcatttttagtagagactgggtttcaccatgttggccaggctgatctcaaacgcctgacctcagttgatacacctgcctcggcctcccaaagtgctgggcgtgagccaccgcgcctggctgagttcaagcttcttgatttgtgcatttggatcctaagagggagccagaaagaaacctgccaagtgcacagggagatcttggcaaagccaggctagaagggaagtct

SEQ ID NO: 4122 - DNA, 6000 bp, Homo sapiens
tttataatcctttgggtatacacccagtaatgggatggctgggtcaaatggtatttctagttctagatccctgaggaatcaccacactgacttacacaatggttgaactagtttacagtcccaccaacagtgtaaaagtgttcctatttctccacatcttctccaacacctgttgtttcctgactttttaatgattgccattctaactggtgtgagatggtatctcattgtggtttagatttgcatttctctgatggccagtgatgatgagcattttctcatgggtctgttggctgcataaatgtcttctttcgagaagtgtctgttcatatccttcacccactttttgatggggttatttgattttttcttgtaaatttgtttaagttctttgtagtttctggatattagccctttgccagatgggtagattgtaaaaattttcacccattctgtaggttgcctgttcactctgatggtagtttcttttggtgtgcagaagctctttagtttaattagatcccatttgtcaattttggcttttgttgccattgcttttggtgttttagtcatgaagtccttgcccatgcctatgtcctgaatggtattgcctaggttttcttctagggtttttatggttttaggtctaacatttaagtctttaatccatcttgaattaatttttgtataaggtgtaaggaagggatccagtttcagctttctacatatggttagccagctttcccagcaccatttattaaatagggaatcgtttccccatttcttgtttttgtcaggtttgtcaaagcttagatggttgtagatgtgtgatattatttctgagggctctgttctgttccattggtctatatctctgttttagcaccagtaccatgttgttttggttactgtagccttgtagtgtagtttgaagtcaggtagcatgatgcctccagctttgttcttttggcttaggattgacttggcaatgtgggctcttttttggttccatatgaactttaaagtagttttttccaattctgtgaaaaaaagtcattggtagcttgatggggatggcattgaatctataaattaccttgggcagtatggccattttcatgatattgattcttcctatccatgagcatggaatgttcttccatttgtttgtatcctcttttatttcattgagcagtggtttgtagctctccttgaagaggtccttcccatcccttgtaagttggattcctaggtattttattctctttgaagcaattgtgaatgggagttcactcatgattttgctctgtgtttgtctgttattggtgtataggaatgcttgtgatttttgcacattgattttgtatcctgagactttgctgaatttgcttattagcttaaggagattttagattttgggttgagatgatagagttttctaaatatgcaatcatgtcatctgcaaacagggacaatttgacttcctcttttcctaattgaatgccctttatttctttctcctgcctgattgccctggccagaacttccaacactatgttgaataggagtggtgagagagggcatccctgtcttgtgccagttttcaaagggaatgcttccagtttttgcccattcagtatgatattggctgtgggtttgtcataaatagctcttattattttgagatacatcccatcaatacctaatttattcagaatttttagcatgaagggctgttgaattttgttgaaggccttttctgtatctattgagataatcatgtggtttttgtctttggttctgtttatatgatggattacatttattgatttgcatatgttgaaccagtcttgcatcccagggatgaagccaacttgatcatggtggataagctttttgatgtgctgctggattccgtttgccagtattttattgaggatttttgcatcgatgttcatcagggatattggtctaaaattctctttttttgttgtgtctctgccagattttggtatcaggatgatgctggtctcataaaatgagttagggaggattccctctttttctatcgattggaatagtttcagaaggaatggtaccacctcctctttgtacctccggtagaattcggctgtgaatccgtctggtcctggattttttttgattggtaggctattaattattgcctcaatttcagagcctgttattggtctattcagggattcaccttcttcctggtttattcttgggagggtgtatgtgtccaggaatttatccatttcttctagattttctagtttatttgcatagaggtgtttatagtattctctcatggtagtttgtatttctgtgggattggtggtgataccccccttcattttttattgcgtctatttgattcttctctcttttcttcattagtcttgctagcggtctatcaattttgttgatcctttcaaaaaaccagctcctcgattcattgatttttttgaagggttttctgtgtctctgtctccttcagttctgctctgatcttagttatttcttgccttctgctagcttttgaatgtgtttgatcttgcttctctagttcttttaattgtgatattagggtgtcaattttagatatttcctcctttctcttgtgggcatttagtgctataaatttcctccacacattgctttaaatgcatcccagagtcaagacccatcagtgtgctatattcaggagacccatctcatgtgcagagacacacataggctcaaaataaagggatgggggaagatctaccaagcaaatggaaaacaaaaaaaggcaggggttgcaatcctagtctctgataaaacagactttaaaccaacaaagatcagaagagacaaagaaggccattacataatggtaaagggatcaattcattaagaagagctaagtatcctaaatatatatgcacccaatacaggagcacccacattcataaaacaagtccttagagacctacaaagagacttagacttccacacaataataatgggagactttaacaccccactgtcaacattagacagatcaacaagacagaaagttaaacaaggatatccaggaattgaactcagctctgcaccaagcggacctaatagacatctacagaactcttcaccccaaatcaacagaatatacattcttctcagcaccacatcgcacttatgccaaaattgaccacatagttggaagtaaagcactcctcagcaaatgtaaaagaacagaaattataacaaactgtctctcagaccacagtgcaatcaaactagaactcaggattaatgaactcactcaaaaccgctcaactacatggaaactgaacaacctgctcctgaatgactactgggtacataatgaaatgaaggcagaaataaagatgttgtttgaaaccaataagaacaaagatacaacatgacttgctttttaaatggtgcactcaatgtctcgatcctataaaatgaagcacaaatgtgaaatttcaggaagtgtgacagaccaatggagaagacacttttggagttctttcattgtactctcttcttgctttctctgcctatgggtaagattggacattatgtctccccagcagaggaggaggcttggtctcttgtgccagaggggataaggcagccatgttgatggcttatcattctctgaattagaacctgtgatctgagttctgagatttgagatccaagtccacctgattgctggtttttttcctgccacctccctgccagactgtccttgctcttatcttgctgggaggctgacttctgcagactgactccccaggctccttgccatttcacttctgattggcttggctgattggagacactagtaggagatgggagatggcagatgaaagagtttaggacatttttgctctgttcttccactgttccagcatcacttctctcgcactagctgtgttccccataaatacaacccccaccaagctacaggatcatgattttcttcccttcttcctttagtcctggggtattgatgcatttcttgttgtttcaagtctctgcatgccacatcatatcttgtttgatttctttaatctgcctgcctctgcaaataacataccctccccaggcaaggcagtggtctgagccaaacttgttcttccacagaagcctgggctgtggcactgggagctgccaatttcttgctgtgcaactttggatatttccctacctctcttgagcttaagtggctccatccagccaggagggattgaatttgatgacctctcatcaccctgaaagttctatgttcctaagtgtcaaaatggcactattgttttaggggtggagttggcccctttctgacctggtatttcccttttggggctagaaccttgtctctgaaggtgcctcacaaaaaagaactcaaagcattgcgagcctagcataaatgccagctctcttaagggttcacattgaaggggacactggaagctttcttgagagaaagcataggcaagctgagcctcagcttcattatctgggaaatgggtataaaatgtgagtgcctctgacctccttgctgtttgggttaaatgagatagtatgtaaaaagtgcctgaaacattcacagtgcttgtatgagaagacagtggttattatgctgatgattacaccaagaattgccatctgtttgttctaaggaatcaaggtgggatacccattgcctgttttttttggagtccactattaggtttctctttagctgaattttgggagaaggccactaggctctctcctctgttgtttgcagttttggaggttgctgtctccgccttatggcactcagcccagccttggctgctgctggctgcagggagtggctagggctggacgctgacaagatgcatgggtccagagtataaaggaacccaggagcagctgaaggcaggtcagatgaaggctaggtggctggaactgcaaccatggtgcccagcttcctctccctgagcttctcctccttgggcctgtgggcttctgggctgatcttggtcttaggctttctcaagctcatccacctgctgctgcggaggcagacgttggctaaggctatggacaaattcccagggcctcccacccactggctttttggacatgccctcgaggtatgtggaggtcgggagggtgggggagaaagaaaacatcctccctcctttcagagaatcaggcctaattcccagggggctgtggagggagacttcaaacttgggcagggggatgatgtcctgggatccatggcttccattcagctttcccaccggaatttctccttcactccagcctttcaagctgacttcagaagtgggggcaacttccaagtcagggctcaagcatggcacagacaccttctcctcattctgaggcccaaagtttggaccaggttctgctaaaagctcagcaatgacagaaaggcaatggcagaaatccaaaacctctggatagtacatagaagtaggcaatccattgaaagctcaatcagcgtccgtgttgttgtgtgtagtgtaaagatttccatttgtaaggcaggaaatgagagtgagcatgaagatgagtaccgccacatgacagacctcaccgagtgtctaagcggttggtgtccccaaaggcagggctctcccggccatgcctatgggtggctcaggagccgtgacaccttcccaggttcagatcatggttcgtcttcctgttactccagggtgggaaccaccttagcccctgctctcaggaagatctcttagtttcctactgtattggggatctagaccagaggtttctaattagacacagggcagggaattggaatcaactgggaggagcaaattcctggacctccagttcctggagattccaatttgtcagattggaactaggagtttacatttataaacctgtccaagtgttagtgttttgatctgcagccag

SEQ ID NO: 4123 - DNA, 6000 bp, Homo sapiens
cttggagacttgtagccagaaaaatcagaattcaatccaaactgtagaaaatacaagccgctgaccattgaaaacagctccatcccagtggctcctggctgcctcaccaaatttgttcagaccaaaccgagggtcaggctgcttattcttgcagcccaataatgagatgcagatgaactggggaggaagagagcttttatttctgtaactggttacaggaagaaagcctggagaatatcaccaaactcaaaattacaaagttttttcagagattatataccttctaagctatatgtctatgtgtaagtgtgcactcatctaaagacatatgtgattaacttcttttaatctataactaagagctgagtcctgaagaccttcctctggagcctcagtaaatttacttaatctaaatgggcccaggtgctgcggtgattacccttatcttgtctcctgctaaatcatggaggtttgtggagttccttcagacccccaataaacttgtttgtggaggtctggggagtttcttcagattcccaataaaacttgtttaatcctaaacgggtcctgataagaattccttcattatcttgtcatgcttcaaagcccaggaaaggcctaggcaaaactcttgctggacttttgttacattccagcctttgtataagggcactggctctatcaatttctaatatttaacttaaccattcagccaatgctgaaacagttgttatggaggcctgtattagtgagacctggcctgccacaccactgcaacaccccagtctgggccaccatcatatcttatctgaatattgcaatagcatcagaactgatctccctagttctagtcttaccactaccttccccatcccaatttattctcataaatgttaaggtctcaggacctagagttagactgtctgacaccattttttactctctgatgtccttggacaaattgcataatctgtgcctcagttttcatacaggtatgaaataatggtaacatctaccttgattattatgaggaagaaataactgagtacatataaatcactttagaattgtacttggcacttagtgaggatacaaaaactatttagctgtccttattatatttcaagtagctttcagaataatctactacttaactatgtcattttccaccttaaatcttttcagtggattcccatggccttaagtaaagcctgaatttcttaactgggcctaccaagctctcatggtctgactttcaccctataggtggtcttagcacccatccttctctctgagacttgaagctctagccatgctaaagagctcccacagtccagttagctcaggccattttatgctctgttcatgcacttttccaccatgtagaatgccctttcctacttcgtccacatagaagacacattctgacattttaagacacagctccactacaccctaagccacatgaaggcagggccatgttgattttgttcaaggccacatctccagtgctcagggcaatacatggcacatgatcacttctcaataaatattcactcagtaagtgaatgaatggataaaagcatctcctcagctacaaaacttttttcacattttcttctcacctgcatccccactagcctggacggatttcattactggctcctttgtctggcaaggatatcagcatcactttctgtgatagctaccttaaaagtacttaagcgacccttgtctccccagtgcattgagctcccagcatgtgcccagcacaggggcctgggacacagtaaatgttcaacccatgtttactaactgagcacatgagcaaatcagagagcagtgaatctctggaatcccacattggtgggctgcaatgctatcctgggatacagctccacaaaattctagacttttatccccatggttccatgttcttaaaattcatttattattaagtaataatagacttccacatcttaatggatcaaaaatatagattgccatactgaattattataatttcggtcaaaggttagttaccttgcactgccctgtttgtagacaaatgtatgcttttctttgggctgtgtgtaggattgaagcagctactcattggccttcatttcttgtctcttgtgtctgagatggaaggagccatcagatgagcattgggagaggcacaggcctccttctgggagtctcatggggcttatttccatctagaggcaccactatccaggttgatgggattttttttggtatctccaattccctgtactgtagccaagaaaattcaattcagtagatatttgtgcaggaatgccaaaaaaaaaaaaaaaaaaaaaaaaaaggaaggaggcgctgctctgtttttggcctccagaatcatatttttgagttgtagcaagtatcaaaagccagtctttggccagaataaataattttctaaattcctttctctcccattagcctgccctgttggagtagattacagaactttattctccaccagggatagcaaaaacacaagcaataacataaggatattttctaccacatgaaatggaggttgtggggaaaacccacctcttgcagcctggtggactgaggcaaaaagtggcagaggtcgggtggtcaagagagtatctaattatccccctctaggctaaaatcctgggattggggtttagatagagtgaaaggaaagttgagagcacaggggattttaccttgcatctttttttggagaaaccagagtgaaaatggcagtgaagcagagaaggcctgaacttcaagcctcttcaacaccttccagcctctcttaggctcctaaatatagtgcaaaaagttccagagttcctttgttacccatgaaagcacatggaacggtgctggacaggggcaactggccctggagcagaggagtaactgcatagaactgtccaagcctcagagggagtcacaccaccagcaagaacctgggtgggagtaggtgagccaaggggttcccaggctctgaccctgccaagagaactcattagaaggtcaccaaccacacatactattcctcggtctcatgaagaacccagggaccggaccaggcaagatatcacaaagctgaagtttcagctctggggcagagcatggatctgaggtctttggccctaccaccatgcgatcatatgagggccatcatacaaccatcatgatttgggggaggaatagggcatagaggaatcatatgaaaagctgaaatgccatgagttacccagaagaagctgtgtaagccagaggattctgagaccctgtcaaataacaacatctagttgaaggttggagttaggtaggaggtagggaagtctgggaaagaaggagctgaaacacttgctgtgtgtggcttaatggaacatgcaaggggccaggacgaacttggtccagatgaagtcaccacccctggggcctgtcttttttttttttttttttttttttttgagacggagtctcactctgtcaccaggctggagtgcagtggcgcgatctcggctcactgcaatctttgcctctcgggttcaagcgattctcctgcctcagcctcctgagtagctgggattacaggcgcgcgccaccacgcccagctaattttagtactgttagtagagatggggtttcaccatcttggccaggatggtcttgatcccttgacctcgtgatccgcccgcctcggcctcccaaattgctgggattacaggcgtgagccaccgcgcccggccccctggagcctgtcttaatcacttacccgccaaataaaatctggctccagagagtggagcgtaggcttaaggaattgggggcggaagggcggggaaggtgggggagggacagtgatagggagaacagggaattgtagcagaaattgggtttattgttcagagctgtcaatgaacacttaacatatgcctgtcttagcctaaatcaatgaataaatgaatgaataaataaatgaatgaaatgtgggcaatgcctataaagattgctgggacagggaggtggggggagacaccagcttgggaagtcaggcttgttagatcctagttcaccacctgatacgttacaaatactaaaaccatcactttcaaattatttttactacattttcctgttatctgtactcgagtttatttatgtttctggcatctagagtcagcccttcatgggcatgagacccaagcagccacacgaggctctgaacccagaagagcatatgctcggtttaatggtctgtcatcttagaattgttaataaagtttttatcccgcattttcattttgcactgagattcataaattatatagcaggccctgactgtacctgtatagtggaattactatatgatggtacgctactgtgcatatcttccccgttcagtgttcagtgccctcgtatcggcagcttgaactagctcatggtacacgctgggaatcagggtgggaatcagttgtaaaccatttaccggaacaccactaggcaggccacaggataaaggaataatgatggtacacctccccctacctctaccacctgggaattttggtagaatgccagaatggaaaagaaaatctcttgcatagccatttataatttgtgataaggaagaaaaacaatgacctcagctttagcattattttacaatataaattcagatcccgtgactgaaaactgttggacttaaaagaggacgctccaggagcgcaaaagcagttgggccgaacgaagcgtgcgcgctttggtaaccggctagaaatcccgcacgcgcgcctgcctcctctccccaggcctgagctgcccctcccactgcctttccttcttcccgcgagtcagaagcttcgcgagggcccagagaggcggtggggtgggcgaccctacgccagctccgggcgggagaaagcccaccctctcccgcgccccaggaaaccgccggcgttcggcgctgcgcagagccatggaattctcctggctggagacgcgctgggcgcggcccttttacctggcgttcgtgttctgcctggccctggggctgctgcaggccattaagctgtacctgcggaggcagcggctgctgcgggacctgcgccccttcccagcgccccccacccactggttccttgggcaccagaaggtagatgggagggaggagggaggaaggaggagggaggggcggaggaggatgcggcagaggagcccagccggcagagagacgcagctttcttccatccctggggaccctccggcttgcactggcctttccagcccggcctgtggctcttagcatcatttttccttgctctggagaattgctttcccgcagccccacagggaaaggtcacaaaagaggaagctttgggggctgggagagagctatttaaagaacctgaatatggaaaaagaaagcgagctgtaactcaagtctgtctctcattgcttcaccaagccttccacatgtgttgctttaaaaatagcatgttattctaaataacttattagttgcagaaaatatgcaaaatctatcccaatcgttggcacccttagtccattttaacaagagaaaattttcttttcctaagattcttgtgaagtaaggagcagccccagccagccactcgagaaatactgattgatggaaatttgtaaagggagactgttagcttttggtctctcccgttttttaaatccactcccacccctaattaaggtttttattcattcaaccgactctgagtggcaattgtgtgataggtactaagattacaaagagaagctaagtccctcccctgcaccacccaagtcaggtgcagacttaggccacagagagaaaatgaaaatttaaggcaatgggtgctttactagaggcctagagacaagggaatatctgtcggaggaaagtatacatctccgcctagagaaggaaggaaagtctgtgaagggctgagcagagtctta

SEQ ID NO: 4124 - DNA, 6000 bp, Homo sapiens
gctggggagggcacagtaggagtgagactggcctttaggtctccaggctgtgtgggagcagggtgagccctctgactaccggctttcccccacttccctggtgacctgtatgacttatcagagacagccataatacccctgggaatatagctccattggactgggaactacacccccatcccccacaacagctgcagcaagccccgcccaaggaaaggctgagtttaaacatgcctaccctgaccccaccttgtggtctttctctacccaccctggtagccaaagacgaaggtcataatcacttgggagcactatggccctgcccaccacctgagaaacctgaatacataaccaggtgtctctacagcaagtttgcatctttcctataggaccacagctgatgcactcttgaaagttccatttcctggctggaggccaaccaacacaaaaccagtgcactaacaaaaacaaaaccaaggaccctcacagagtccacctcacccctctgctacctccactggagcaggcactggtatccatggctaagagacctgaagatggatcacatcataggactctttacagacactccccagtagcagcctagagcctcgtagctctgctgggtggctagacccagaagagcaaaaataatcactacagtttggctctcaggaagccccactcctaggggaagggggagaacatcacatcaagggagcaccccttgggacaaaataatctgaacagcagcccttgaatcccagatcttccctctgacatagtctatcaaaataagaaggaaccagaaaaaaacaattctggtaatatgacaaaacaaggttttttcacacccccaagagatcatatcagcttaccagcaatggatccaaactaagacaaaatctctgaattgccagaaaaagtattcagaaggttgattattaagctaatcaaggaggcaccagagaaaggtgaagtccaacttaaagaaatcaaaaacatgatacaggatatgaaaggaaaattcttcagtgaaatagattgcacaaataaaaaacaatcacaacttctggaaactgaacacacacttacagaaatgcaaaatacactggaaagtctcagcaataaaatcaaacaagcagaagcaaggccttaacagctcaaagacaagtctttcaaattaaccctacccatcaaagacaaagcaaaataatttttaaaaataaacaaagcctccaaaaatttgggactacgttatatgtccaaaactaagaataattggtgttcccaaggaaaaagagaaatctaaaatttggaaaacatatttgagggaataatcaagaaaaacttccctggccttgctggagatctagacatcccaataaaagaagctcaaagaacacctgggaaattcatcacaaaaagttcatcacctaggcacatagccatcaggttatctgaagtcaagatgaaggaaagaatcttaagaactgtgaggcaaaagtgtcaggtaacctgtcaagaaaaacctatcagattaacagcagatttctcagcagaaaccctacaagttagaagggatttgggtccttttttttttttttttttttgagatagagtctcactctgttgcccacactggagtgcagtggcgcgatcccagctcactgcaacctctgcctcctgggttcaagtgattctcctgcctcagcctcctgagtagctgggactacagggcacaccaccacacgcctggctaatttttctatttttagtagagatggggtttcaccatgttggccaggatggtctcgatctcctgacctcgtgatccacccacctcagcttcccaaagtgctgggattacagacggagccacagtgcccagcctagggtcctatttttagcctccttaaacaaaacaatggtcagccaagaattttgtatccagtgaaactaaccttcatcaatgaaggaaagatagtcttttccagacaaacaaatgctgagagaattcactactaccaagccagcactaaaagaactgctcaaagctctaaatcttgaaacaaattctcaaaatacacaaaaatagaacctccttaaagcataaatctcacaggatctacataacaaaaactcaattaaaaaaaaacaaggttattcaggcaacaaatagcatgatgagtagactagtacctcacatatcaatactaatattgagtgtaaatggcccaaatgctctacttaaaagaaacagaacagcagaatggataagaaattaccaaccaaatttctgctgtcttcaggagactcacctaacacataaggactgacatgaacttaaggtaagtggaaaaagatattctatgcaaatggacaccaaaagtgagcaggagtagctgttcttataccagacataacaactttaaagcaacagcagtttaaaaagacaaaaagggacattatataatgataaaaggattagtccaacagaaaaatactgcaattctaaatatatatgcacctaacactgaaacgcccaaatttataaaacaattactatgcgataaacaacaacacaataatagtgggggactttaatactccatggacagcactagaccggtcatcaagacagaaaatcaacacagaaacaatggacctaaactataccctacaacaaatggacttaacagatattaacgaacattctacccaacaattgcagaatatacattctattcatctgtacatagaacattctccaagataaaccatatgataggccacaaaacaagtctcagtaaatttaagaaaatcaaaattatatcaagtactctctcaaaccacaatggaaaaaaaattggaagtcaactccaaaaggaaccctcaaaatcatgaaaatacatggaaaataaataacctactcctgaataattttggggtcaacaatgaaatcaagatggaaatttaaaaattctttaaactgaacaataatagtgacacaacctatcaaaaaccctaagatacagcaaaagcagtgctaggaggaaagtttatagcatcaaatgcctatatcaaaaagtctgaaagagcaaaaatagacaatctaaggtcacacctcacagaactggagaaagaacaatcaaaactcaaacccagcagaagaaaagaaataacaaagatcagggcagaactaaatgaaattgaaacaaaaaaaatacaaaaaataaatgaaatgaaaaacctggttctttgaagagataaataaaattgatgaaccattagtgagattaacgaagtaaacaagagagaagatccaaataaactcaattagaaatgaaacaggagctattacaaactgataccagagaaatacaaaagattattcaagacttccatgaatgcctttatatgcataaactagaaaacctagaggagatggataaattcctgaaaatataccaccctcctaggttaaaccaggaagatatagaatcgccgaacagaccaataacaagcagtgagattgaaattgtaattttttttaataccaacaaaaaaaaagtccaggaccagatggatttacagttgaattctatcacacattcaaagaagaagtggtaccaattctatagacactattccacaagatagagaaagagagcatcctccctaaatcactctgtgaagccagtatcatcctaataccgaaaccagggaatgacataacaaaaaaagaaaactacagaccaacatctttgatgaacatagatgcaaaaatcctcaatcaaatactagtgaactgaatccaacagcatatcaaaaagataatccaccataatcaagtgggatgcagggatgatttaacatacccaagtcaataaatgtgatacaccacataaacagaattaaaaacaaaaccacatgatcatctcaatagctgcagaaaaagcatttaacaaaatccagcatccctttatgattaaaactctcatcaacaaaactggcacaccttaaggtaataaaagccacataacaataaacccacagccaacattatactgaaaggggaaaagtagaaagcattctccttgagaactggaacaagagaaggatgcccactttcaccacttctattcaacatagtactggaagtcctagccagagcaatcagacaaaaggaagaaataaagggcattcaaattggtaaaaaggaggtcaaactgtcactgtttgctgatgatatgatcgtatacctagaaaagcctaaagactcatccaaaaagctcctacaggatgcaaaattaatatacacaaataagtagctctgctgtacaccagcagcaaccaagctgagaatcaaatcaagaactcaacccctttcaaaatagaaaaaaaaaaaacttaggtatatacctaagattttgggtgacgataatgtgtcattgtaggttcattaaatgtaacaagtgttatactctggtggaggattttgataatcagggaagctggaagggaggggtgatatatgggaactccctgaactttctgcttaatttttctgtgaacttgaaacttctctagaaagataaattctatcagaaacataaacaaaaaagaacagagaatgagagtgggggagattttttacaagaatgtatagaggtgtgacaaaggatgactagatgggaacttttagattctggaaggggacagcagtgcagcaaagctttcatatgggtgtgagctgtcatgcacatggctcctatctgaaaatcttgttcttctagaatccaggtctgctggccaacatctcagcagttttcaccctgcagacttaattaggcttcctcttccttatgtcccctccctgaatatggcattttgaaagcccagtgttgcccagggggcatctcctttgtgtttatgagagacctgcattctccctggctcagttctctcaggctctccagagctcaggacctctgagaagaatggagccctcctggcttcaggaactcatggctcaccccttcttgctgctgatcctcctctgcatgtctctgctgctgtttcaggtaatcaggttgtaccagaggaggagatggatgatcagagccctgcacctgtttcctgcaccccctgcccactggttctatggccacaaggaggtaagaggagaaaattagttggggaggttaagggacagaaagatgaggtattaaaaaaaaacagcacagactggtggggcattatgtaatatgcaaaatgctttcacaccaatctcattgtgatttttacaaaaattctatgatatggggaggaaagatattgttattcctgttttacagataagaaaactgaagcctaaaatagaaatgcaactttcctgtgctacccacctcataaatgacagaaatgaaacttgaaccctggtcttctgattcaaggccaaggtctttactattctcaggactctgggtgttctagagagaaatagaccaagccaattgttaacaggaactataccaagatgctacagcttctaatgaagctggaaataggaaaacatttagcaaattagaaaggaaagttgaaagatgagcagcaaccaaaaggagtaaaaggcatgtgagacttcgctgctttggaggcagataaagcatgagtgggtatatccagagcaaagatgaggtagggcatcagtggttactaacggtttaccttgtgccaggaattttatgtttataatttcacttaattttcatggcagctttgtaaaatatatttggtcttcctattatacacgtgaggaaatcatggccctgatgacctagataatgaataagtgtcagattgggatttgaacttaaatctccaaagttgacgctggagtgagaagaccaatcgctcagcaacaggtcctgagcacttgcccagggccacgaagattctgtggaggtgctggagacacatggagaagaaaacttg

SEQ ID NO: 4125 - DNA, 6000 bp, Homo sapiens
ccatttttcagaatagaattcagtaatattaagtacactcactgtgttgagcaatcattaccaccatctatctccataactcttctcatcttctcaaattgaaactttgtacccattaaacaataactcctaagccctcctccaccaaaccctggcagccactattctaccttctgtgtctatgattttgacgactctaggcaccctatatgaatggaaccatacagcatttgggtcaaagacaaatgctatatggttccattcatatagggtagatcagctctcaacaaagggcattcttgaatggcagccaagaatgttgtttctgttgcttaagtcacccagtttgtggtccttattatgacagccctagctataggctctaaggaaaaaaggcagcaagactgggcatcaatgatcaaggactgttgcttatgagaggtgagggtttcaatgtgagcttttaatctagtaaactctctatttcttttcttatgtatttgtttcttgccactcaaaaattctctttcattcagcataatgtcaaggttcatctctgttgtagtatgtgtcagccctgaattccttataaggctgaatgatattccattaaatgttttgactacattttgtttatcccttcatttgttgatggacatttgggttgtttgcatcttttggccattaaaattaatgctgttatgaacatgggtgtacaaatatttctttgaatctctgttttcaattcttttggatatatgcccaaaagtgaaattgctaggtcatagtaactctatttttaatcttttgaggaactaccatactgttttccatgcaggctgcaccatcctatatttctacccgtgatgcacaaggtttccactgtctccacatcctcaccaacacttgttattttctgttttattgataatagtcatccaaatgggtacaaagtgatattgtatcacaatgataaatgattagtggtgttgaacatcttttcatatgcattttggccacctgtataacttctttggagaattgtctattcaactcctttgcttatttttgagtaggattgttagtttcatttgtgttgatttactggaattcttcatatattataggtactaatcccttatcagatgtatgatttgtaaatattttctcccattccatcggttgccttttcactctgttgatagtgtcctttgatgctcagaagtttttaattttgacgaagttcagtttatttattttttcctttattgcctgtgattttggcatcatcaccaagaaattatctccaagtccaacaacatgaagattttaccctatgttttcttctaagagctttattttcttagctcttgcatttaagtcttcaatccatcttgagttaattttcatatatggtgcaatgtaagggtccaacttctttctttggcataggaatattccattttctcagcatcatttgttgaaaatgctgtcatttttccactgagtggtcttcacactcttgtcaagaatcatttgactgtaactgtgagactttatttctgggctctctgttctattccattggtttatatgattgtctttatgccactaccacactgctttcactactgtagctttgtagtgagttttgaaatcaggatgcatgaaacctccaactttgttcttcttatgtgtagtatgtctttgtgcctcagtggcaacttccatttattggcctgttatatttctatacttttttatgcatggctgaaaccattccccttcccataaagctttctcagtctctccaacaaaggacttcattgatccttcctctgggctatccagctaaaaggaagaaaggggtggacaaaagtgacctattttgtgtcaaaagcacctgtcttttgactgtctgtattccccacaaggcatgaacaactaaagacatgtgtgctccctgaacagggtcagggataggacaggcctcacttcatgtaggactgacagcatgaggacatccttcactctcggaagctctctgagagaatattctggataattgaggcctcagctttgaatgccaacacctgcctaaaatgtttgaccattttgcatgaaactcttcctgcctgggtttcatactccatgccttctaaatagaaaactcataatgaccacagtcacctttccttgatgactctgggtcatccgtatgtgtgtgaatcttggctgctactcaagaatgccctttgttgagagttgatctacccagttttataggtctgtttgccccgatttagtcatcttttacattgtctttcctggtctttccaggtttaatgacctctcatgcaccatcaacccatcagctgccattctccttgctgtccctgtgtagctttgccccctctcttctaatttgttgtgagttgggatatgaataacaagactctggctaaaacaaaaataaacagtctctgagtggggtcacaaggctcactgataagtcaaagatttaggttttgggcatgagttttagaatgtctattctggctgtttcaaagccttttttgctcccttcctcatgctctgttggtctctgggctgctaatgtgcctggttagcttacagataagtcttagatgcattcgaggagaggctactataaacccaaacctgctagttttggattaggtaagtgtgcagggtttgggggtcagcctcatgtatctgtgaggtagatgggaagacagagcatgcaggcagcagaacactgtcctagtccatccctactgctacagcaaaacacctaagaccaggtaatttataaagtacaggaatttatttctcacaattctggaggctggaagtccaagatcaaagccccagcaggtttggtgtctggtgagggcccagtctatgcctccaagacggcaccttgtggctgtgtcctcacatggcagaaggtaaaaaggcaaaagggcctggctagttcccttagcccttttataaggtactgatcccacccatgagggagaagccctcacgggctaatcactcctaaaggccctacctcttagtactgttgcattggggattcagtttcaacatgaattttggaagcaacacaagcatccaaactatagcaaaccccaagggctgggtgagggggctccttgtggggagcatagaaagaagtacaagactcagctgtcttctccctgcgacattccttttcccatctctggaagagtcatccggatccagagccctcactatggtgtgctcagaggcctaagctcagaccactccttccctgctccctgattaacacccagagatctgccagcctcattccccactgtccctgtatccagctcacccccagggaccactgggcacctggtccatcacattttcctgatgtttctaatgctgcccctcctgcatccctgttcgtctgataaacttgcctttaaacgtgtatatgaaggactcttcctctggtatctaatcctaacaggtgctagatcccacagagccctgtccagctggggactatgctgacctctctcccagatcaatatccctctcctcggggctcagcctggccagtgcctgatgttctgggataggagaactggggagagaaggcctaggaccctgcctctcacttttctttccaccaaaaggggaaaaaagaggatctggtcctcacacccagccttgggatacttataagatgctggggatagggtgtgggacagggccagtgagagctggggatggggtgtgggacagggccagtgagatctgttttcctgctgctccagtctgggccctacagcagatgcatgcagagtaatatttgtaagactgaaatattccaaatgcagctactttggaaggaccatgtgagcagatatctaagtgcgtggcatctgggccccttggctagatggtggtcgatgttggtttctttgtgttaaccccaagaacattcagtagctcagggtttgcagaggttctcaggagcacatcttagcctcattggtggtgtgaggcaggcagggcacaggtcacactgatgaggacacccgggcccagagacatttagcaacctgcccaagggcatctgtagttcagtgagaggtggagctgggactgaaatctaggctgcctgagtcccagagatggtcttccctggacccagggagcactgtatctttttcagggaaggcctcctgaccacaaccatttcatctgtcacagtacagaataggaagtatgggtcaggcatcagaagatgtgaattctggctctgccttttcagagatggccctgcctagttccttggaataaatgatgatgtcttccccagcctcagtttcctacactatataaaaagagaaagcaacatctaggtaggttggaatgggagtacatgaggtggtggccactttgctagggtcacagtagactcctcacctccttccccttgtcttcctctcactaggtaaaagacaattgtattgaactcttaagaaaattggactccagtcccggctccacctttacttccctgggccttggttttcccaccacacaggagtttgaacactttgatttctgaagtccttcccacctctggggttccaatattctgctccttttctcctcttcctcctccccctcctttctcctcctgctcatctggggttagggagattgcgtgtatgtgtgtgcctgtgtgtacacatgcatgtatgtgtgtgcacgtagtggcagcaaggaagaggaaggaaggagtcctgcaggggttggtggtggcagttgggagaaaaggaggcaggactgtatgtgccagcagggctcagagttttctcaccaactaatggtgcttggggcagtttaatcattaaaggaaaggaatgaagccaggagcgcctcaaagtccagcctgctgttgaccaacactaacagatgagcaaggagctggcagcaatggggcctggagcttcaggggacggggtcaggactgagacagctccacacatagcactggactccagagttggtctgcacgcctacgacatcagcgtggtggtcatctactttgtcttcgtcattgctgtggggatctgggtaagtgggccctgaggctggggctagcaggggaggtagtagtggtctctcagcttgggtggggctgtggagctggggcagggctaggcagaaagaagcagatcatagaaccatgtggctgagaaggaagggccttcaggaatcaggctcctgatctcctcatttttagaagggcagagaggggtgtggctggtctgaggtcacacagagagtcagaggcagaccaggcccccgactcctgactcctctctgagcacctgctgcctttggccccaaccatccctggttgccctgagcctcactccttccttcttcccaccccaaggcccccaactctgagaactcttgacccctggccctacctcagtcctgcattcgttagcatcttggctaaggtgatttctaaatgagaaggggctcatgtgctctcagggaagtgtgccaggcttattccaaggttcctctgttctccattgttcccaggagcctcagtgctagaggcaggggccaggctttggggtcagggaaacctgagttcaggtcccagctgcaacaatgagagcctcatgtccctgggaacatatgaggcctatcagctttctcaggtgaacaatgagaataaggactatgctgtgatcattcagcaacaggacatactgcagcacctggcacggtgcctggtgcccgatcagcaggcaataaatggctgctattatcaccacgcattccacagaagtgtgagcacctttagactctgctgtgattcaagtcccagatggtcacttcctaggctgtggccaggtcagagaccctctctgagcctcagtttcctcatctataaaggggggt

SEQ ID NO: 4126 - DNA, 6000 bp, Homo sapiens
gggtccctggaggccagactttttcatcccctttcacatgtgaagaggctgaataatcatcttatccccctgtattagctcattctcacattgctataaagaactacctgagactgggtaatttataaagaaaagagatagagccaggcatggtggctcatgcctgtaatcaaagcactttgggaggatgaggtgggcagatcacctgaggtcaggagttcgagaccagcctggccaacatggtgaaacccagtctctactaaaaatacaagaattagccagatgtggtggcctgcgcctgcaatcccagctactcagaaggcttaggcaggagaatcacttgaacctgggaggcagaggttgcagtgagccaagatcccaccactgcactccagcctgggcaagacagtgagaccatatcaaaaaaaaaaaaaaaaaaaagaaaaaaaagaaaaagaaaaagaaaaagaaaaaaagaaagaagaaaagaaaagaaaggaaaggaaaaaagaaaagaaaagaggtttaattgactcatggttccacaggctgtacaggaagcatggctggggaggcctcaggaaacttacaatcacggcagaagatgaaggggaagcaggcatgtcttacatggctggaggaggaaggagagagagtgaaggaggaggtgctacacactttaaacaaccagatctcatgagaactcactcactatcaagagaacagcaagggggaaatctgcccccatgatccaaaccgtgtcacctgcctgtattatctctgtgtgtgtgtgtgtgtgtgtgtgtgtgtgtgtgtgtgtgtgtgtgtgtgtgtgtgtgatggggtctcactctgtcacccaggctagaggagcatgatcatagctcactcactgcagcctcaaatttgagggatcctcctgggctcaagctatcctcctgccttagcctcccaagtagctaggactgtgcctagctaaaataccaaactcttgatttcagctccttttgtcatcatttgtccatttcttctacaatcttaaatttttttgactggggtttctatgttgctgaatttggtgacattttcactaacccagaacacacacacacacacacacacacacacacacacacacagccccattaaagttctttccttcaatgaaattggcaaaggggcataaagaaaactggaacctaaggacccagtgaggaagcaaagttccactttccactggaaactggtcttttacaataatcccattgcacctaggagctggaccaggctgttattttagagtttaaaagttgtcctcccttcttctacctggctactggcttggggctttaggtgggtgaggcctacctccacaagaaaaatccacagtgaaaatggtgacagttggagggtgctggagttgagcttagccttcctcacttcagaagagctaaatgcatacaggagtgcaacagaagtcaggaatctattgccagaggggccagagaggggcaagggccttcctgctctagggcccttccccagaagatgttagctatgggtcaagtctctacctcctccccaacccccattctccattgcatccttggaaccaggagcccagaaacctgccagcccagatgaccaggaccatgtttgagatgcataaatttggtcctctggatccttcaaaagtacactgtatttgtcactccccgtagaccctcatgcaataagttcttcatgctctgtacatcgattctttttctccagcagttctgagcaatgcttcaaaaacgaaacatcagattccttgtaaagttaaaaggaacagatttttttcccacataccatgaatttctcattgattggtttagttacaatatctaatgtgtccacaggtatgttttaaaagttcctttatggggcagagagagcatttttttaatactctggtttcacttttttgcatttaaatactttctcacatactcaatatttataaaagggttagagttcattttaacaaatcccattaaataggcagggcttttcaaggtcttgcctatgaatttcctcatttcaagcactgtttagtccaggtaagctccaatagaacctgagaacttgggactgccaggccaactctaggtactagttcctgacatttctttgaatatttgggtggtcacatttgttttctttggtcatacttacccaactggacctcttttttgttgaaatgtgaactctactgctagccagttaaagttcattgtttttcagaactttgattttgaagatgaatatgactttaacctggccatcatgtactgctttttcatagttaattcaaaacagagcagaactctggggattagttcaatagaaacaatgtattcttcaggatctttctctaagtagaggaactttcttgacccttacacagcaatatatggactttttggactaccagctcatggttattcttaatgtgatccagaccccagggccatccccaggaaaaggaagcaaagcacctccccacagtaggcctgtgctagacacagtggacacacagtggaaacaaggtccctgcccaaagacctcaaaatttattgtgagagatgaattggtaattaaatagctgattattttaaaagccctaatacagttgtgtttcatgtacataactgtaaatgaatgtaaaaagtgctgtaaaatcacagtgggagggattcattcttgcagtgaggaagaaggatgaggattgaggaagacttcaaagaggtgagttttgaaatagggtttgaaggacaagtaagagtttactaggcagagatgcatggaaagaacattccaggcagcagagacagctaaaataaataaataaataagtcgcagagtaaggaaaaggatgggaatgagaagtggttcagtgttactacagcatagagcaagcttgtccaacccacagctcaggatggctttgaatgaggccaacacaaattagtaaactttattaaaatatgagatatttttacaattttgttttgtttttgcttattagctatcattagtattagtgtattttatgtgtggcccaagacaattcttcttccagtgtggctcagggaagtcaaaagattggacacccctggcatagagtattttggggtgacatgatgggagctggagaagtaggtaggggtcagaattcagaaggccttggacaccagcctaaaggcttagagttgctcccattggccatgcactcaccaaaggtgttcacgtccctcttttggctgttagattggatgggctcaatcttttggccctctgtctctagaatagagccgctgcttttctactgggcccactatttcttcctggtcctctgatccccttagcactacacagatctcgatatttgcctcgggtatcaaggctctgaaaatgatcaggatttagaggagatggctcattttcagaaagagttttatattctccctctggccttatacactacaggcaaatggcaccgatgttttggagttgggccagttgggccttttctcccctcaagagaggaggattcgatattcagtgtttctgaatttcatgcttagttcttaagccatttcccatttgccctaagaaataagagctggcagcaagctgcgctgtttttttctaaacgggaaatgggttaagcatttgtgatcaccactgaatgagtgccagagctggttagtgatcttcctgttcaatccgaggtcacctaactagataacaaagagctgaaactaaaagtccggtctcctgactcccaatccagtactctttctggtgtgctccagcttctggctctgcttagccaattatggaacagacagaatgtacttggctgccccaaacggctaaagggcagttctgttcccaaaatggaattctgttgtgcctcaagctaggcagcataattgtgtgtcttttggtaactccctgtcttcttctgtaaaatgggagtagagcctacttaatcctgcagctacttctaagatcagggattggggcgtggtgggctgttctgcagctgttttgtgatggatgagggatgatagatctatgttcaagtagcggaatcttagagtcaggagttggaaggaatcttggaggtggtctgtggtgacaggaagcctcttccaatagactgaacacggaagacttcctagagccggaggacaagggtttctttcctcttagcagtgagcttcttgtttttggaaatgctcaagccaagaatggatgttcaggcagaggggattccgctcggaaggggctttctgcactgaagtggtggccagcgggaaactccaggtttccaactcctgcacaaatcctttctaatatccatccactcaggtgagctggcagggcagtagctgtgcagggttcagggtcattatatgtcaatgaccttcagcacggattactaacaacagtaacatccgttaccgtttactgctttcctattaagcaccatgcactgtgcataacatgttatctttatctcatatctagaattttgggaggtactttgaatcattacgatctatctacttcttaggtgaggaaatagaggtttaaaatttagtccacagtctcgcaaggatggagcctggatcaaattttgggttatcagattccaatcacgtttcttagcttttcttttttttttccaactccagtttctgtcttgctccaaaaaaggggaaggagcggctgcggcgctcggtttcccgcctcctagggaagggaagggagacgagcagcgcggaggctggggcccccttccgggcggggcctactagtgggcggggcctgtcagtgagcggcccctgcccggaaggagccagtccggggcggagccgatggccttacaggggccggaagtggcctgcgggcggagaagtgcctcaggagtcctgacgcagtgtcttgggcgctaacggcggcggcggccttgtgtttagactccagaactccccacttgccgcgttctcgccgccgcaggctcccgggacgatggtgccccgcctgctgctgcgcgcctggccccggggccccgcggttggtccgggagcccccagtcggcccctcagcgccggctccgggcccggccagtacctgcagcgcagcatcgtgcccaccatgcactaccaggacagcctgcccaggtgagcctggcctccgggtccccgccgcccgccgccgtcccaggatcggccccaacctgactgcagtcactcatgactcctctagtgaacccgtttccgcccccaagcccctaccatggaggctgccacagcccctaatctggaagtcttgggacttttcacaatctcctagcacaggaacctcagaaccctcaaattctcttccagaacccctcgatgctatctcagattctccatcttgaacgcttctcagattccctctcctttaacctaacttccagccagctatcctgagtcctcttctccctgaaaaatgccagacctgcatatttccagcgccgctgtaatccctcgactatggtgtctcctgaagtactttaatgactgcctcacattcctacccggaatatgggtaggctgattcctaatacatcatggttaccattccttaacttctcccagcaccgccttcacccctgtcactcaggaccctcagccccacctcccatttctccagtactctgttctttcaccccccatgagcccccacaagcacagccctgaagtgttcacccttgtcctcaactgaccctcccccatgtttttaaatctttaatctcctaaatccagtgttcacccggaaacctttcactctctccaagccctcctcaacaggttcctcccctcaaaatatccttcctcacccacagtaccccttgtaagtgcagctcaccctcacagaattctagacaccaccctcagt

SEQ ID NO: 4127 - DNA, 6000 bp, Homo sapiens
ggttgtgtatgtaccaggaatgaatctcaactcactgtgtgaatgtttagagagcaggtgcagcctagagatgtaacgatgaggaaggagaggctgaggtttgaaagaggtgatggggacagtgaagaacaaaggcagttcagcctagccagtggttaaaggcacaggctctggggtcagacagagctgggtttgattcccgattctgctgcttctctgctgtatgcgcgctcctcgcggcctcagtttcctcatctgtaaaatgggtgcataacgatacctagtcacacagtgcgggggtcattaaatgggagtgcgtgtaaggagcctagagcggagtcaggcaattagtaggcaatggggtgtcggcgaccctgcagcccgggacaccgcgaagcagaggcagtgtttcagggagaggagctgggccgcggcggcccgggcgggcaggagatcctgaacccccttagcctcgtacaggtcccgcaaactcggcagcctcacctcgcggggttaggcgtcccccgggtcccgagaaggctcgggcctcagttgctccgcgccggtttcggtccagcccagttgccggaagccggagatccggggggcggaacctctccgcctcctccgggaagagccccgcctccttaaagagacagcagctcccagagaaacctgcgtgctgcggcgcgcagagcccgctcccgcccgcccttctcccgaggctgagcctcgagttcttaaagagacaggcgagggcggagtggtggggtcgctgagtgtgactacttgggctggccttgctccagggaacgtagaaaattctcgagtttagggttttcttactgtgtgtttatacctcttttcctaaggaaatataaaatcgggtgatgaaagacgattgtgaaagaaaaaattaagtcacccgcgtcaccagtccctcagtttcttttggccacaaaaatttcactggtgagaaagtacatgatgagtcaattacattctgaatgagtgatcgaaagcgcgatgtctgttcgtatgagcacccccagtaagtgagcgcttggaaagactttacatctaataatagccatatatagtgtatttttttccccaagatgatcatgatcaggctttgtacatgcaggatctctaattctcagaacaatcctgctatcttggggtgattatcctcattttacaaagagaaagctgaggcttagagcatgtgcagggcacttttggttgagtatgtaccaggaatgaatctcagttcatgaattcagctgtgctagtatatcagccacctcttatgtcccatttcagatcatcttggcctcacctgctgcttatttcaccgccactcatcttattccagcgtcagcagatataacctgagtgagcttgcctccagtctatgcctcaggcttctcactttctgcttcgaggcttgtttcttcatgcgatggggccatgggaccttgctggagccaatcagcacccagacaggtgcatcccagaagtgtaggggtagagagttgttaatgtctcatgaggcaaatctctgaccaatggggtcaacacttgatgaatatatgcttttcctgtttttccccctcaggcgccctttcatatagctttcaaactacctagcaggattaagcaaccaaatgcctttggaagtgacgcatttgacaatgcatcttcgcaatgggtctccttccttccctgatatacaagccctgtacttcactcctggtgcttggattcatacttgccaataaactactcatatgaggaagcaatatgaaggcatgttggtaccaaaagtggccccagaaaataaaaccttaggttggcattttctaactgaactgcgcaccagtcacatggcaacaacaaatatattgctggtgttaaggggagagagaaggaggggggtggtggtggtgtgataacacttagaatagaatggcatcacaattactaaggtgtctgtctgcagttgattgggataacgtgcaggtagaagataaggtgctgagttatctagtggctgtggcacaggaacattaagaggacaatggtaattataaggactatggaatggactgggtgttcttaactccattggaaaccttgaaaataaaatgacagacttagaacagccaactgtcaacttgaggcactttgtgaaagctagagagcctctatggcagctttgaagattcttattcttctatagccttgagaaagactggactgaaaatcaggcccaagatctaattgtaagggtggcaaagtttcaacgaagactgaatgcacagcctctgtaggtctcctccatcaaagctggggcattgtcagaaaatgaatgggaacctgagaactgggatgaggatatttgggtaggaaagcctgagacttgaccatccctcgtttccagtttcccttgaatctttcaagggaaaggtggctgtggcagaagtagtcctttcccccttgttaaaggaaagcaaagtcctcttgcttacggatcctgcaatgattacctgcacaacattgctttggactaagggaccaatttaattgtaaagaacatgcaacagtgacacataaccatgggtcttacccactggtcttaccatgtgactcagtcatccaatagtaggtggcctaataggatggtggaatggcttgttaaaggcacagttagggctccaggttggggaaaatactcaggagactggggcattgtcctccggcatgtagtacatgtactaaaccaatggtttatcaattatttataatggtactttgttctaaatacctatagatttgcaaaccaaggggtagcacttcttactatcactttcagtgaaacctacacacatagaatgtgtgcctcctgcgtcacaagtttaagttctgcttggttggagatcctggtcccagggaagcagggaaggcggagagagaacacttccattccagttacagttccactgaattggaagctgtaactaccacttaggcatttttggcttctcataccactgcaccagcaggtaaagaaaagagtgccggctgggcgcggtgtctcacgcctgtaatcccagcactttcggaggccaaggtgggcggatcacctgaggtcaggaattcgagaccaacctggccaacatggcgaaacccatctctactgaaaacacaaaaattagctgggcatggtggcacacgcctgtaatcccagctacttgggaggctgaggcaggagaattgcttgaacctgggaggcggaggttgcagtgagccgagattgtgccactacactccagcctggacaacagagcgaggctctgtctcaaaaataaataaataaagagtgacacatggtggggaaaatcagccctgattactttaagaagttgggggctgggcatggtggctcattcccataatcccagcattttgagagatcaaggaaggaggattgtttgaggtcaagagttcaagaccagcctgggcaacataaggagaagctataacagtcacaaaatttgccgggtttgggtggcactcctgtagtcctaactactctggctgaggtgagaggatggcttgagccaggagtttgaggctgcagtgagctatgatcacaccactgccctccagcctggtgacagaggaaggaaaccccgtctcaattatttaaaaaaaaaaaggtcttgggtgtattttaaaacacttcccaactctgagctctatgattcttctttcagtttctccaatgagccatgctgtctctggcttctgggcctttggccatgtggttccttccaccaggacactatccccactttagccagctgactgcttgccgtctttctggtttcagcatagaaatcacttcctcagtgaagtcctcttgacttctctaaccagaattagcttccccttctccctgctctcgtagcccacgcacaccctccgcctctggacttcatttaggaaatggtagttttttgtttacttgtctattccccgcactagaccatgacttccttgagagaagagggtgttttatttgtcactctatgcccagtgctaaggggagttgcaggccccaggttttgttagaaatggtcccatttctgtctctgccctgggaggtttgagatccatatcccctggggagggctctgactacagaaatagtcaaccaccagctagaagccatgattgggggccgggtgcggtggctcgagcctgtaatcccagcacttttggaggccaaggcgggtaggtcatctgaggtcaggagttcaagaccagcctgaccaacacggtgaaaccctgtctctactaaaaatacaaaaattagccaggcgtggtggcaggcgcctgtaatcccagctactcaggaggttgaggcaggataactgcttgaacctgggaggcagaggttgcagtgagccaagatcgtgccactgcactccagcctgggcgacagagcgagactccatctccagcaacaacaacaaaaaaccatggatgtttgttgggaaaacaaagatctttgttgggaaaaacatctttcattagtaaaagaagagtttgtgtataaagaataactaatagccaaatctactgacttgtgagagagcatctaacaggttctctttaagtgtggtctttttaagtacttgttttttaaaaaattaatcagagggagaatttaagatgtggaatctaccaatccaagaatctctcaaaagctcaggcaaagaattggaaatgataatgattaaaacagacctttgtgcacctggttaggaattttctatctcatgacagaaaggcaaacatcttctgacctgactccttcccctgacccggggttggctgctcctaccctgcaccttcattcagctccgcccagtgttgcctggctgcagcctctctgcccatagaactcagagcttactctggctttgccgagatggggctgccccagccagggctgtggctgaagaggctctgggtgctcttggaggtggctgtgcatgtggtcgtgggtaaagtgcttctgatattgtttccagacagagtcaagcggaacatcctggccatgggcgagaagacgggtatgaccaggaacccccatttcagccacgacaactggataccaacctttttcagcacccagtatttctggttcgtcttgaaggtccgttggcagcgactagaggacacgactgagctagggggtctggccccaaactgcccggtggtccgcctctcaggacagaggtgcaacatttgggagtttatgcaaggtcaggaggctgccacacacttgaggggtgcttgaaatagcagtggtagagggggatgaagagatgggttggaaagtcctgaattctcctactacttttgctgctccttttggaccttcttgtcctcttcctgcttcctgaaactagaacttcttgtggattgtttctctaagtaacatcaccaccttcccaggcactcaaatcacaaaccatccagtctggcatttcagcccctggaacactgctcttactgtacaggctgatctgcctgggctgctctttgcccacctctctgcctggttaactcttgttcaatcttcagactgttgctcaatgacgcttctttcgagaagccaagcccaactctcccatactaggctaccctctctcatctgcctgcttaacatcctaaacttttctttattacacctgtcgcggtttgtaattatgtacggctggctaggattcatgtctgcttccctcactagtctgcaaactcaatgcaggtcgagaccattgctctcacccactattacacccatgcctgatggtggcacatggtagctgctcagtaaatacttgttaaagagctctcggctgggcgtgatggttcacgcctgtaatcccggcactttgggagattgaggctggcagatcatga

SEQ ID NO: 4128 - DNA, 6000 bp, Homo sapiens
ctgagcctgtcctctctcctgaccctctcatttcctgccactctctccccctgctctctgctccaaccagtctcgctgaggcttttgcactggctgtttcctctctcctgaaatgcttcctgggggcttgctcttcagcaacctgggtgtctcttctgaccctctccctcccctgtcaccaaactctagatcactcctgtgcctccctcccttcctctcctctacatcactgcttcaccctcctcttcttggtattaacccaggacagtctaggagcctggaggtgtaggtgtgaagtgaccttgggtgagttaggtgagttaatgagttgctggtgtgaccaggaggcaccactttactgggcaggcactgaaagggcaagggtgggagggctggaagcacagagaacttttctgcctttctctccaatccactcatctgtggcctaactggaagcccacaggaggggccatgacttgctcaaggtcaccagcatcatgaaagaggctgagtcagggctgcagagggaagacagactcctgaccaagccatgttactgtccccttccaagccaaagtggcctcgctgtgaatgggggttccttgtgtccactggcagagtgcctgaccatggagccacgtgagggccagctctgccactctgcagcccccaggaggcaccagtttgcttgctggtttctttcctcctgggcccgaccatccagtttcttcaccccctattcagacctcatcttgtgctggccaccagagtctcagatgacagggatcctcagagctcagacctcccccgtgctttccttgggcccctcccgggcttctgttacccgctgggtgggcttggtgacccctgcccctggagctctccaccttaaatcagcccaccccagtcagaaatccctgtgctaccccctcggtggctcattgctgctcactgggatctttctctctctaattgaaaaattaaaatctggttctcatctttcccatgcataacctctgtgaaaaatgtcagataccttagccccagcaggtttcctgcctgcatttcctctccggcctctctctcccaggcatgcagattccatccctctattcacacacgcatccagagcctaccctgtcctagcccctggggatagagcagtgctcaaaacaaagtccccaccctgtgggggcttgagttctagttgaggagacagacagacaagagacaagataaatcatgcatatagtatgataggtggctgtgagcactatggagaaacattgagaaaagaatacagggaacccctggggaggcgattctgcagtttcatagcaggatcagggaagccctcactgtgaaggcgacatttgggcaaagtcctgaagaaggtaagggagggagccatgcagctacaggaagaacagcactccaggcagaaggaacagcaggtgcggaggccctgggatgcatgcgtgttccaggaacagcatggggccagggtggtggaatgggtgagtgagagggggcgtggcgggaggcaagctcagagggttgatatgcaggcagcgcgggccaattatccagagcctttcaggtcatcttaaagcatttggcttttactctgatgagatggggagccattccaaggctccgtgcagaagagtgacatgatctgacccagtattggggctgcaaagacacttcagaggtcaaggatggaagtagagaccagttagggagagaaagagatggtggaggctcagacccggtgatgagcagtcgtcaggggtgagaagtgattggattcttacatgttggaggtagagcccataggatgtgggtgtgatggaggaggtgaggttggtgacggggcttgctaaccggaaggatggggttatgggaggggcaggcctggggaggaagatgcaatgcaggcagcctgtgcacagcacttagagctttctcgccagctgtgtgtcggcgggtacgtacctcagtgcctttgcacatgctggcctctgtgcctaggaggtttctcctgccccgtcagaactccaactgccttctcaagtgtcccttctgtgaatctgtcccttcacccctcatccccatctgttcctctctctgctttgtgcacattcgggacctcgcacgcatcgcaaagccattaccgtattgtgccccagaaggtgccccagaagttaggactgagcgccatccatccctgaagccctgtgtgtacgagttcctaacagctcagtgtcccccacacagtaggggctcaaccagagactgcctggggacctgggtggactcctagctctactgtctgttcccaggttctgccacgttgggtcgctcgccttgcctgcgtggacctcgatgcttacctctgtcaaatgggcgtgctctttccctccctgcctcggggtgtcatgggagcccgctcgcaaggatcccgaaagctggggttagcgcgccctctgctggacgatgaaagactccgcgcgctctgctccccagtcccccaggtggcccgggggaggtgaagtaaggcgggagggcggggggactacaggagaggagggggagctgctgcacccgaacatttccagcgcaccctacacacatgtccttacttaatccctagcccgactctgtggaagagcttaggtgagacccattttccagagttcctacctgtttcctacttgctactgaatttcttactcgtagttaccttattttttttttttttttttaagaggagaagcgactcagagagaaaaggggcgaagaaggctgggccgtgtagaggaaagaaaaggcgcgagagaagaagactgcccgggtgaccgcgaggcctctgaggaatggctgaagagcagatccatctacatggggctgggaggggaggtgcggtcaccgctcagccgccgactcagccgagggagaccttggccagcccctgccactccgcaggctcggtttcctcgcctgtgaaatgcgggcgatgactcccctccccgccgcgactgctcatcaccgggtccgagcccagccgctgaccccgggggaagcgccttgctcagcgccgggcggcccacgaggccctgcaggaccgcggctgcggagaccgttcccgccacccgcctgggctccagggccagacgggctgaggtccctctgggcctccgtctcctttccagggaggggcaccggctaggtaacacggcactcgccctttcccttctctgagcctgtagtagatgatgataataatgtttccgtggaaggtcctgctttgttaatagtcacagattacaaagtacttgccttttcccactccccttatgtcccttccctgtacaaaacctgggaggtggcctaatacctatccccaatctgcagttgacaaaactctagcccggagcagagccacctgcctgagctcaccctgagaaccagacctggacatgacctgataactcagccctttcctgcccctcagccatcgctcagccagggcccctgagctccctccaggacctcctctgcgaactgtcaagtgcacctggactctgagggctggcgatggtgggtgtgaggaaggagaaacccctgttggaaaaagggcctatgagaaggacgtctagttagaggggcagctgtgagcacaggtgtggggttagggaacaagggcagccctgctggcaggaggggagaaggtgatgaccgccaacaggaaatccccaagcccagcaagtcagggagcccattgaaagccttttatcctgcatcggcgatttaaccccatgtaaacgccaagtgaacattctcttgtagagaccgatggtcctcattttcctgtaatcctgtaaaggaatctgatttcttccatcagcctgtccctaggactaaaatgcctcattagtgttattcttaggaaggcatcttcctagatcaggctgcaaggaaatggaggaagtgactgtcagtcactcacaccctgcaggggcactaattccgagagccttaggggtgggtggggagcagttcattgaaagcccaactgggtggtgcatagcgtgtgaatgtgaaggggatggaggaacccaaggaggccaggcctggagacagcaccaaatctgggaggtacattattattcccattttacagaggaggaaactgaggtaacctgatcatgaccacactgccccacagtagaggagccagaatccaaacccaggcagcctgccttgccaccagagccacgcttttcaccctcaagctgcagttaagaagtatcacgccgtggctaggcccacggcctctggcttcacatcccactagctctgccatctttagctgtgtgaccttgggcaagttacttgtctgtgcccgagggtcctctgtaaagtggggatagtagtagctgcttcactgggttcccttcaatgagttaatagctgtaacatgtttagaatggtgccctgcacatagtcaccagccagtacatatgggccattattcctgaaccctggataggcacatgtccttgaagagtgtagaattcttcaggattctgaaatgccagcctgtgggatcctggaatcctccaatagcattctaacagctctcagctgcagaactgtaccctgttttctagagctggaaggtgtgaggctgcctgtccacccagctcaaccccacagtaggcaaatgaggtgatgtcaaagccttggctggggcccagccccggtaacctcccactctccctcccctgtgtgctccctcgctcagattcacacacacactccaggccagccgggcccagagggaaggtgagagggcaaggagtaaaggtggctgggtgtgggtccgttgaagcgagccgcctccagccctgttgaactggtgggcccagggactggagcgggattgaaagggatcttgctctcccttgaagccttgagttgcagcgatttcagtgtcttctctccctgtgtaagcctgtctcggtgtttaggctgaactacagccaccccctctcccgggggtgtgcaggccagggactggccaggcagccatggctgacgagaagaccttccggatcggcttcattgtgctggggcttttcctgctggccctcggtacgttcctcatgagccatgatcggccccaggtctacggcaccttctatgccatgggcagcgtcatggtgatcgggggcatcatctggagcatgtgccagtgctaccccaaggtaggtggtagtggggctgggtggggccaggtcagctggggccaggagggctggacactgtgcctgtatgccatgcctcaccccctatcctttagttgtcttttcattcttctcattttgactcggtcttctctctgctctcctgagcgtctgtcccatccatccatccatccatccatccatccatccatccatcccttagcctaagggttgatcagaaggcccctggatctggagccctgagccggaagctatggtatagacacagcaaacacaacacaccatgtgcttgaaacaaaagctaatgagcgctgaccccctgccaggcactcctgcgttcagggtgcagttcagccctcatcctaagccttttggtgctttctgtagttccaccttctgagcctttctgaggtccagaaagagaggctgcacagctaacgagcaaggtttggagctcagatgcgtgtgacttacacgtcacccttcaccttgggtcttctacctctgggtcccagagcgactgagagctccagggtaggtcaggtctaaccttggtggcatgcactgggcagtatcctttagagtcttcatgtattctcagccttatgtgtaatttagtgatgggaagagcactggtttgggagtcctgagttctagttcaagtcctgttccaaactctctatgacctttgtctttctgagcctcatttttttcatctgcaaatgag

SEQ ID NO: 4129 - DNA, 6000 bp, Homo sapiens
ccagcctggataacatagtgagacctcatctctattttttttttaaagacattctttgttttttgttgttattgttgtttgttttgttttgttttgtttttttgagacgcagtctcgctgtgtcacccaggctagagtgcagtggtatgatctcgggtcactgcaatctccgactcccgggttcaagcgattctcctgtctcagcctcctgagtagctgagattaccgatgtgcgccactacgccctgctaatttttgtatttttcgtagagacagagtttagccatgttggtcaggctagcctcgaactcctgacctcgtgatctgcccgccttggcctcctaaagtgttgggattacaggcatgagccaccgtgcctggccaaaaaaagacactcttgaggattctcagatataaacgttttcaggtacagctaaaccttgtttaaaaatttattggataaatttttaaaattttaaattccaaatgagagccaaaaaaaaagtttacattaaattaacacagaccgagtatagtggctcacgcctgtaatcgcagcattttgggaggccgaggcactttgggagcactttgggagcccttgagcccaggagtttgagaccagtctggacaacatagagaggccttgtctctaaatataaaaaatttaaaaaattagctgggcatggtggtgcatgtttgtagtcccagcttctcaggaggctaacatgggggaatggcttgggcccaggagttcaaggctgcagtgagttatgatctcaccactgctctccagcctggacaacagagtgggaccctgtctcaattatttatttatttttcttttttttttttgagatggagtcttgctctgttgcccaggcaggagtgcagtggcatgatctcggctcactgcaacctccgcctcttgggttcaagcaattctcctgcctcagcctcctgagtagctgggactacaggtgtgtgccaccacgcctgggttattattgtatttttagtgggttttccccacgttgatcaggctggtcttgaactcctgacctccggtgatatacccgcctcggcctcccaaagtgctgggattacattcatgagtcactacacctggcctgaaaaaattaattagttaattaacaacacaaaggaagaagggtggttggtgaggtaaaattaattaacagcacagaaatgtagagaaaatcaggttaaaactgatagagatgatgtttcctggggtggccagggaggcagcttttcagaaggggttagacttgagtctagccctagaaggagggtagggcttacagaacattccaggcaggggaaagtgggtaggtaacgaacagaaaagccattggtgttccatggatatggaatagataaatttgctcagagtaagatcctccagaggtgaagtggagattaggttgaagagtcagcaagaaggggccgggcacagtggctcacgcctgtaatcccagcactttggggaggccaaggcaggcagattacctgaggtcaggagtctgagaccagcctggccaacatggtgaaaccccgtctctactaaaaatacaaaaattagccaggtgtggtggcaggcgcctgtaatcccagctactcaggaggctgaggcaggagaatcgcttgaccccgggaggtggaggttgcagtgagctgagatcacgccatagcactccagcctggaatgcgagactttgtctcaaaaaaaaaaaaaaagaaaagaaaagagtcagcaagcaggggagagtttgaagggccttgaatagcaagaaaaggagtttggacttggtttcatggtcaacttaaagttacatagctttttgaaaataggggaatatgttcacaacatcatttaatattaaagtaagaagaggcaggctgggtgtggtggctcatgcctgttatcccagcactttgggtggccgaggtgggtggatcacctgaggttaggagtttgagactagcctggccaacatggtgaaacccatttctactaaaaatacaaaaattagccaggtgtggtggcgggcgcctgtaatctcagctactcaggaggctgaggcaggagaattgctggaacctgggaggcggaggttccagttgcactccagggtagggccaacaacagcgagactctgtctaaataaataaataagccagtcatgatggtgcatgcctatagtcccagctactcgggaggctgcagtgggaggatcgcttgagcctaggaatttgaggctgccatgattgcaccactgtgcaccagcctgggtgacagagtgagaccttgtctcaaaaaaaattaattaattaaataaatacaaaataaaataagaggaggccaggcatggtggctcatgcctgtaatcccagcactttgggaggctgaggcaggaggatggcttgaggccaggagtttgagagtagcttgggcaacatagtgagaccatctctctacaataaataaataaagaagaggtgcaatagccaggtgtagtggtggtgcctataatctcagcttttcaagaaggatattaaggtggaaggattgcttgagtccaggagtttgaggccagcctaggtaacatagtgagattcaatttcaatttaaaaaataaataaataaaaataaatttaaaaagaagagaccaatgtttgcaaggtgattctttgagataattggtctccacctttcttttttttcctatttaatttttattataggttcagagctacatgcacaggtttgtaggccaggtgcagtggctcacgcctgtaatcccagcacttttggaggctgaggcgggtggatcacgaggtcaggagtttgagaccagcctggccaacgtggtgaaaccccatgtctactaaaaatacaaaaaattagccgggtgtggtggctggcacctgtaatcccagctactcaggaggctgaggcaggagaatggcttgaacagggaggcagaggttgcagtgagctgactgtgccactgcactccagcctgggcaacagagcgagactctgtctcaaaacaacaacaacaacaaaaaaaccaggtttgttacatagacaaattgtaggccatggggtttgatatacagattatttcatcacccaggcaataagtatagtacctgataggtagtttttcaatcctctcccttttcccactcaatctccaactttattttgcccccgacttggaaagcctttccttctccattttacctaaattaatctcagactctggttaagacctgtttaagttctaacccatgctttcaaaaaacataatagatctcttcattttctgaggtctggcttccatctggcaatttgcctgttatttccctcagtagtttgttagttcctaaaaagcagaaaccatgctgatattgtgtgtcttcttaccatgactaacaagtgttacatttcttttaaaacaaggaagcaaactacaaagcaccaagtgcatgatcttaattttatttatttatttatttatttgagatggagtcttgctctgtcgcccaggctggtcttgaacccctgggctcaagtgatcctccgacttcagccccacagagtagctgggactacaagctcacggcaccactccgggctaattgttgttgttgttgttgttgttgtttttgaggcggggtctctctctgtcacccaggctggagtgcagtggcaggatcttggctcactgcaacctctgcctcctgggttcaagtgattctcctgcctcagcctcctgcgtagaggggactacgcatccaccacacccggctaatttttgtatttgtagtagagacggggtttcatcatattggtcaggctggtctcgaactcctgacctcgggtgatccacccgcctcggccttccaaagtactgggattacaagcgtgagccaccgcgccccgcctgaaagtctttatgttgtagttgttttgtatctattcctcatcttcctggggacagggataccattttacacatcttcccacaatcaatcacagtgtttaacaattactgtatgtactctatgaataagatacctgaagattgattctctttatcgttaatgtgtggactgtatcaggcaaagtaaaacccctatcatcaaaagcctaaagttattaaagggagtggaagaaggctatcgggacatatttttctcgaaggtgtgacatcacaaataaaagaaaattaacgtatagtgaaatcatcactgtagttagagtcaaaatgccttgcctgtgttccaaactttgggccagtcaacctacagggtgcacggtttcctcattagtttcttcagagagtaaatgagacattgcataagctagcacctagcatacagcaggcaaatactgctggatttctttcttccactaaatgagaagaaaataatgactcccacatttacacgttttagaatattttattttgcgtcagcgaatagagaaaacaaaggagggatgagagaacaggaaaggaaaggggcaaaaagacaaagtgttaagcggattgacccaacgctttcatcgatatcctcctcaatttccttgatcttgggtctcgctctacacgcaggcctccaaccacaccggtctgtccggatctccctccccgtcagtggcggctgtccccaccacgcgcggtctgatccgccaccccgcccccacagcccacttttcccaggcccttggccatcccgcgcccggtaggaattcacctgcacgtaaacagccagggcaaccgtcctccctccttggagcccgcctcccgcggccccgggctccctcccccgccccctgcgccaccccggtgccccgccccgggcggggagagtcggggcgaggggagggcctgccaggtgaggcgcggtcaccctgggcctctcacttccgcccaggtgaggcagggccgacaccgagcccgcccgacccgggctcccacctgctcctccagcgcaccaggtaaagcgtgaggtcccggctgtgcagtgcgcgctcgcccctgggtgtccccgcgcctggaggccggccgggggcagctccctcggggcttcccgggcctgcctgccctgcccccgcgctctccccgcccgcccgcctggagtgggtgggagccggaggtggagggcgccgccgggcgctcagaggggccgcggcgaggatggggcgcccgcggcgtgcgtccgcgctgacccgggaggcggggcgggggcgccgtcctcctgcgtcgggcccgggtgaccccacggtggtccccgccccgccgcgcagggctcgccgaggccgcgggcagggaggggcgccgccccgcctccccaggcctttcgggcctcgaatctcggcccactggtattcgggggtggcacggatcctattttgcgcccagatcggtgcccctgtttcgctcccagagctgggcggagtctttccctccatcggtggccgtggaaggagggaacggggtgaggggacaaagaggagggggtgctcagagccgggctgagggggcgacttgggcccggccgcgtcgcggcgcctggtcatcccgtagcggaggttcccaagccagcggtcaggccctgggctctgccagccttgctgcgtagatggggaggttctgtcggaaagtgcttccagccttaggggaaattcctggactcctgcttttaaatcaagctcaggaaagcattttcagatcactcccactctccaaagcgccccagccgtcccgcacgcaggccgaattaagtgaacaccccttcacttggcactttgtcatatttccaagtggctcttgtcactttgaattccagttggttgtttactggcttgcctctgccatttagagggtgcccctttcagggccttatttttcgactgcatttagggtctggctattggtaggtgcgcgacaagtgtttcttaaa

SEQ ID NO: 4130 - DNA, 6000 bp, Homo sapiens
cttcaacatatgaattttgagggctacaattcaggccaaaacaagttatatgcaatttgtaccatgagattatctttactctacatacatgaaatggccaccagaggttgctccttttgcaaaagacatggcagaaagacaagtaagtaaggggatttgaactctgattttttggctggtgagaaataaaattgttagttgggctcttgcccatttctagtttcatcccaacttttctgtagtggattacagatggccggaaattctttcctaccttcccactgagaggcagaatctatttccactctccttgtatcatggctaggttgctgtgtgacttgtaaggctggggtgtaagagatctgcaacttttgcctttgccgcttggaatgctctctctgggaagtgagctgccgtgtaaaaagtttgcgaaactttctgaagagagaagccctgtggagagagggctgaagctgttcacggatgtttcagcctgagctgatctcccagctgaatgcagcctcatgagtgacctcagacaatcccagtggaacagatgaaccacctacctgaaccctgcctagattcttgatccatagaaacatgagcaaataaaatcattgctatataagccgctaaattttggagtaatttgttacacagcagtagataattgaagccatcacctattagtcaaactgactttagagattaatagtattcatttcatattctttcccatctgcctttaaaatgcaccaactttttttttctttttttttcccaatggagtctcgctctgtcgcccaggctggagtgcagtggtgcgatctcggctcactgcaagctccgcctcccgggttcacaccattctcctgcctcagcctctcgagtagctgagactacaggcacccaccaccacgcccggctaattttttttgtatttttagaagcgatggggtttcaccgtatctcctgaccttgtgatgtgcctgcctcggcctcccaaagtgctgggattgcagccgtgagccagcgggcctgggcaacaacaacttttttttttttttttgagacggagtcttgctgtgttgcccaggctggagtgcagtggcgcgatctcggttcactgcaagctcctcctcccgggttcacgccattctcctgcctcagcctcccgagtagttgggactacaggcgcccaccaccatgcccggctaattttttttttgtatttttagtacagacggggtttcactgtgttaaccgggatggtctcgatctcctgacctcgtgatccacccgccttggcctcccaaagtgctgggattacagacgtgagccattgcgcccagccaacaacttttaagatggattatacattagtgtaatttgatttcagataatttttttttatttttttgagacagggttgtgctctgtcactcaggctagagtgcattggtgcaatcatggttcactgcagcctcaacctccctgggctcaagtgatcctcccatctcaacctcctgagtagctgggactacataagcacaccaccacacctggctaatttttatatactttttgtagagacagggtttcgccatgttgctcagtctggtcttcaactcctgggctcaaaggatctgcctgcctcagcctcccaaagtgctgggattacagctgtgagatactgtgtctggtcgtggtttcagagaaaattttcagataagaacagtaggcttctggtggggatgcaaatatatatatgtatgggctgctatatggtaggaggaagaagacacttcaaagaaaggctatgaaaaagtgagcacatgttaaagacaaatgataatagctattatttattgattgcatactatatgccaggcagtatattcaagttttatatgcatgatttcattttactctcattaaaattcaaagaagatgacattattattaattcttttttttttgtaggtgaagtaattatgccagagacattaggagactttaccaagttcacacagctagaaagtagaagaactaagatttaaatccaaacctgtttgttttcagagtcagagactagttcttaatcacctttctacactgcctctaaacttgatctgctttacaattttgctatggcttatcctttttgcttatagtaaatgctatcattcaaaatgcattttctgaacatctgttatgtaaaggcactggatattcacatgtgaaagatgatacctattgaaggtaaagagcaggagaaggtatatagatggcagtggtgagacaattcagctatgagttagtgactgtgatgtctcttccgctatttattcatgaacattttgagcattaactttttgttaaatactgggtcagaagctgttgggttgagaaacaggaaggagagattgataccaacttccatcactttaagatgtatactttttacatattaatatttctgaaattatatgttttacagtaattactagcttaaatggtagcattgttttcttcctcagtggtacataaaataatggtgctttttacaagtggtggaactttagattcaataaagtatgatttttggtctgccaaacatggttcttgttcaccagatgcttaatatttatgatcctgcaatgtaatggatttctccctacatttgtaaccatgtaacatccttcaccaatgtgcctttctccttttggcctgagataatgcatttattcaagtatggttgtttattttctctctatactgtctccatcattattcagcaaatgaaacactttcatctctctatcttcaccccaatttctttcctgggctctgattcataactgacacctgagtattacaactttcttgtctttatgttaccgtgaactcaatacaatgaaccatctttccctccaagccagattattctccaggcttcccaagatctatcagttcttgggaactgtaatgcacacttgaaaccttgggagccatccttgattcttccctctcctttgtttcacttgtacatatctagtatgctattaagacctgtacacgaggccaggtgcagcagctcacgcctgtaatcccagcactttgggaggccgaggcaggcagatcacctgaggtcaggagttcgagactagcctgaccaacacagagaaaccctatgtctactaaacatacaaaattagccaggtgtggtggtgcatgcctgtaatcccagctactcgggaggctgaggcaggagaattgcttgaacccgggaggtggaggttgtggtgagccgagatcgtgccattgctccccagcctgggcaacaagagaacaagagcgaaactgcgtctcagaaaaaaaaaaaaaagacctgtacatgtttcttcttgcattgatctctccctttgcagttccactattgccatctcagtccaagcccttgtctaatcatgcgtggactgctatagtctccctctgattcatctgatccattttcaccactttaagttttctctaacactgtaactgtactgtatacttgactccctgctaaaagtcatttaatagccccttactgatcactggatacattccagacaccatagcctggtattcaaggctctctacaattaccagtcctttccagcttcatcacccaccacctaaactagaggaaatgttctacacttttcagctgccacaatatttggcttgaaccatttcctttgtctagattcttactctcattctctgggcttatccagccaggctttccttcaaagctcagctgactcctccaggaaaagcatttcctgatggtttgcagtttacagtgaaccctcttctcctaactcctacagtgcttagtgcatatgtaagtaatgtaacatttagtatgtgtttccttctatagctttttatccttttatgcataaaaatgtctttccaatgagaattaaatgccttgagggcagggacctgccatatttctccatattcccagtgctgatggtcttttagatataatcatattttagacctggaagttcacctagccctactgatttctttcacagttgaagaaactgaggcccagagagaagttattcagactcagtagaaagccatagtcctagccaaatatttgctaacacttacaaattataggggttggcttacgtagaatggcaagattcagaagtggggaatgagggcactctctgaacaaaggaaggcaagtaaaaatcatcacagccgtccatgcgtgattggacagaagcctagactgagatggaaatagtggaactggaaaggaagggatcaatgcaaaaggaaaagtgtgcaggtcttactaacttactagataggtatttttggcaagtttgggaccaggtgattcaagctgcccgctggggcacgtgtagtggctactcgagggcagggctgtccttttgcacaacgcacaggctctcgcaaatggttggatgttcaatgtttcttactttagggggctgcccagtcttcttcttcgcaggcatgtggctagaagaaagtgaagcaggttggctttctggctcctcgagggcacaggcccagaggtggtgaggaccggccaaggctctctgctcagtgcagcaagccagggcccgcccctgacaggaatccgttggctaagcagccgctccggccttggccacgatcccaggaaagaagagcaaggggctttccacctgcccctagcctaacccggggctggggacctctcgggttccatcggctcttgccccgcctcctaagccggccgcctcctgtccaggccaggttgcccgcccctcccctcacgctcgacgggctcgctcccgcaccgggcgcgcgggtggtgcgcgggcacacggaggcggaaggccggaggggcagtccgccgcgggggcgagcgcgcatgcgccttcctgggacccacggcaggcgcgaatcccagcggccggcgggcggcggggtaagagcatgggatcccggaggttccggaccccaggccagtgtggggaggtgccgggggctcggacgcgccacgagccggcgcagagctggcgacccgtctcccagctccgctccactcccagggacgcgacgcgaggcctccccagcccttcctgcagggtcgcttgtgggtcgggtgaggggacgcggtgatagtggtggcacttgcaggctggggcggtcctggcacccttgtccttgcggttctgagggcctggccctcaagaggaggggcggagaaacgcgagaagggatccctttcgccccatatacacgcccgggatagctgcactccccggtgttgtgtccactgcggtggaaggacctttcagactaaaaggagcaaagtcggttctgggatggggacggcgggcttggcatttgtcgagatgcaccgtcagggcaaaggaggacgaaaagcgcatctactgcctgcctagcaacttcgtggccagtggatgggttagaaaattactgttttctgatttacaggtggaaaaagtcgcaaataaccctttttctggtttaagcagaagagagtcgttaaaagcctcgcataatatctttaaccacacagggctcagtaaaattagggtacctccccgcttcgtacacacagacgcacacagctccattcagcaaatacttcttgggtacctgccttctgctaacactgttctacaagtggggaacagagagcaacgactaagacaggaggatccctgctcacagggagcctttagtcaacacatccaagtaatttccttttacactttttttttttttaattgagacagagtcttgctctgtcgcccaggctggagtgcagtggcacgatcttggctcactgcaacctctgcctcccgggttcgagcgattttcctgcctcagcctcacgagtagctgggattacaggaacgcaccaccacgcccagctaa

SEQ ID NO: 4131 - DNA, 6000 bp, Homo sapiens
tctacatgtggaagaatgttcaagttgaatcctaatgccgtgaatgaaacacagtctgtgtagggaatgagcaaaaaagttgaattccaattgctttttggccttttggctaaaataaatgtagcatctaattttatcagtttaacatctgatatgtcttctatccatgtacaatattttaaatggattttgtggagcagggagatggaataggagtttcccccacccattccacacatcagcctggtaatgcagtaactgcaggaatagttcacctccgcctcactaaaacaacaacaacaacaacaaaagacaaaatttgaattccagaaatagttattgcagcaacaagtcagtctccctgctggaaacacctatcagggaagctggctcaagtagcagattttgattattctaaagataaatcatggtttttgggaatagtgatacatgttggtttgagattaaaagactgggtttaaatcctagtttttccatttatagacttttttttttttttaagagagtcttgctctgtcacctaggctgaaatgcagtgggtctgtcacagctctctgcaacccctaactcctgagctcaagtgatcctctctcctcagccctcttgagtagctaggactgcaggtgagagccaccatgcctggttttttttttttttttcagacggggtcttgctgtgttgcccaggatggtcttgaactcctggcctcaagtgatcctccagcctcagcctcccaaagtgctgggattacaggcatgagccactgtgccaagccttacagactcttatattggacaagtttcttgaactgagtcttaattttatcacctgtaaaatagaattctaacaaccctgcaatggaggaattaagaactgtgtatataaactcttaacaagcgggtactcactaaatagtaattattgttattgttactgatagtaaataagacaaagtatatcactgtaggtgggtattggagctggaattacatggaaacctcatattctagggagtgacacaagtaggaaaaggcaacccaaagttacttttaccttggtccttattccttatctccttgggtttacagagatctgtctacataaaatggcaaagaggtttgcattgtagtttctgtaaagggaatagctatgtaaaaagaagtagtgattgagcattaggaaggaaaaccaacatttacggatttcaattagtgttgcatcattcttgcatttaacttatgcactgacttgcaagcctaccccagtgtagatataacatcctggcatttatcttgtgtgcactgccctaggtgttaccatatatatatatatatgttttatatatatttttttctcacttaattcccccaaagattctgagacaggtttttgtaaatcttacctcaggaagctaaagcatggagaaatttacccagagctggagcttgaggctatatatttttttttttctgaggatagggagagatgatactgtgtatggtaaacttattaatatttgttaattcagccaacattttgtgtatactgtatgcaagatgctaatagatatgctggagaaaattaagacagtgaatggatttgatgccctgtgaagcataagaggttactgttatttctaattactacaagaattcttgcttcttggtgcataagatctactgtggggaatagtacaagtgctgaccatctgactttagagctgaacagtttgggacttgatctcagcttccctattcactggttactgggagcttgttttcctatctgtaagatagaggcaataaaacctagcttatcatgcgagactattgaatgcaaggagagaatattaaaattcatcccagtaagtccactgtagtcctaggcagcatgacagaggtcacagatcttacaagtaacatatcaatggcaagttggggataaggatttggtttttagggttttactttctgtttttgatgactcttatttttgagaaaatgtggaaggagtaagtagaagaacagtttttttcagtgcaacatcaggcaaaagaaaagcagatttttttcagatggttaaagcctatggcaaaatagctaactttctctttaaggtgattggtaacctggaaaggacagctggcgtgggcagaaaacttgttcaagacaaacactgtcccagcattttttaaattccagacattaccctggggcaaacacctcaactttttctttcataccaccttccaatatcttactcctgagcctagggtgctcaaaccaaactctgcttctgatgtgttgtcagttttctctaaaatcacttatcttctgtgggactggagtcaggctgatgtggaaggctcccgcaaaccctatttaggctctctggagacagaatgggtggttggaaatggaagggggaatgagggaaatttaaccccatagaatatcttccccatgagagtagcttagcactacacgaagaaagctaaaaaccacagacttccagggcttgtctgatacgcaggttcccttgagtgctctaataggtattagaaataatatgatagggaaacaagctcttgtaggggaggaagaatctttttctctacctatcttaggttctccggctgggtccttgtgcattagactggccaaagacagatgaacaaaagtaaagcaagtttatcaacacgtgcgttgttcatataggtaacatgggaatactcagagataagcaactcaaagatttggttagaacttgggtttatacagcatattagccaaggaacaataaatttttaaagaaatgacaagataaaggatcttgagtctctaggggcagcaaattgtcggaaaacaaatatatgggagactagttgcagatgaaggccaaatactaaggtttatcatgtagatttttcttgtgttgtctccaggctgacaggggtctaaaattgtctctggtgattaatctttgtctttcctggtagagcaggaaggaggtacaccttcgtaaacttatatcctgctttttggcaaatagagggagggcagagtgcttttctagtaccgtgtacctatttgcttcttcctaattgccttcagctcaaaataatccttaaaccaaagtggcatacactgccaatgctcttgagtagattgaaggctccaaagtaaaaagtgctgtactgtagtattggatctccaagcatcagcagtgagtcaggtattacaatgctgttttcagtgagtgtgccatccgtctatgaggagaaatgagaggagctagaaaaataaactgacagctagaaaaatactccactgaatcaacaaatagacatttcttgaaacagtaacatgctcaatgtgcaattttgaaaaagtaaactgagcaaggatcatgaaacatgatggtggtgagaatttatacttctcaggtagccaggggaagctaggtttccacagattcctttgtctttcagtccttttgaaaacggagaaaaagcaagagaagagggacggcaccatcaggtagagtggatctcagctagaatgaggggaagtggcccagaatccaacctcctccaaagagctgtgtgacaggcaagtcctatcctttctgcacctctttccttaaatgtaagttgaagcatttggaccagactgtttcaatgatcttctagattgcttttgccaaaacagaactctccattcctgtaagataagtacacaatggctctcagagatctaaaaactggccttggttacctgcaaactttgaggccccaaggcacaaaaataatagctttttttttttatttttttttttaaggttcatgaaagcttcggacacaaaagcttatatggtcttcgtctctataaataaaccagggagtaaagaaaaaccccgctagtttcagtaaagcgttgctattaagcaaagcaaacctatgcaaatatcaagttcttaatgaggagtgtttcctaaggggcctgtcctctggtaccccgcctctcctctgccacagtcatgtgaaggcagacaggcacacactcgcacactagcacgcacttgggagctcagggaacataacactggttagtgagtcggtgtccctctcccatcgattgcaacttttcccctccttccctctcctgcctctccccactttctacatctccgttctcaggaaggctcagggaggatcccccgctgcgtgcactgcgttctgagaggccggggagagactctgggcccgcggtcggggcggagccaaggtcccaacccacattgaacgggcttgaggattacttggagggctcaggatctaggaggagggcccagggcactgggttggggttactctgggaaagctctgtgggaccaggtgggaccttagggctggagatggactctgcgagctgggggcggagttctagactggcaggagcggagttctgggtggcgggggcggggtcgggaccagcagggacggcctctgagagttgggggcggaattctgggccggtgagggctggggcgggaccagcaggggaggcctccgcgagctaggggaggagctctgcattgtctggggcggggcttcgagtagcggtagcgaggtctggagccgcaggcgctgcctccgcgaggtaggggaggagctctgtactgtcaggggcggggctctgagtagcgaggccgggtctgaactatcaggcgcggcctctgcgagctgggggcggggttctgcaccggcgggggcggggttgtgagtggtgggggcggggtctggagcagcaggcgccgcgtttgcgagctaaggtcggagttctgcaccggcgggggcggggctctgcgtggccggggcgggctcgggatccgcggggcgactcccggtctggcttgggcaggctgcccgggccgtggcaggaagccggaagcagccgcggccccagttcgggagacatggcgggcgttaaaggtacatcgcggtccccggctcgcttgtcgtgtggtggggttgccacctccgttccggtcaagcctggggctgcgccttccgcgcgccgttggggaacggcctcaccacccttcccgcctctccggttcgggaggcgatcgaccgctcccttcgtcccttggggtgtgggtggagcggcgtttcgggggagccttggccctttttgcaaggccgctggccttcctgctctccagtggcggcaccagacccctccccagcctgagccctcggcgagagcggcgccctccacctctcctgagtttttaaacaaggtttccacttcttgacgccaccctaacgcctttcttctggttttctgcccctccgcagtttcctatttgccacaaaggaccctttgtctccagcgttcttagcattgggaaacttaatcctctttttcctaatgatttttccaactgggcagagttgaccgcgggcgggtgtcaatggaaagcacccagaaagacggtgtttctcgcagtcgtggagagtagattacgtgtaattttaatactgctttcttcggtgttttctctgtttatggacagagaagaaaccagtgtgtgtgtagtatgtgttttttgcatggggcagttggtaaaaacaccgcgtcccttatctgtatggcttcagagcaatgcgagacggaaaaggttttttgcaaggcttcctgtattttggtaggaaaacattccatttctaatctgtcgaatagagtagcatgacttgtttttatattggcttttatatcatccttgaaatttgcacccaaagatatccccagttaacatctgctataaacatgtagatagtatatatacgagtacgcctctgttcactatgaatttatccgagtatgtgagctgttagcagcagacattttatcgttatttctggctgacttttatacttaatatcagtttagtaaacatggtttacttggagag

SEQ ID NO: 4132 - DNA, 6000 bp, Homo sapiens
ttgggaaggagagactggaggggaaaggaaatattattaacatttgatactactctgcagtgtttgatttgtagaaaaggatacttaattgagattcttcctgcctctttagcagaggtcctacaggccaaaataaaaaaactaatgcattcaccactgaagacagtggtactttggaccagtgacttctggtgtgtcacatgcttctctgtttcctaagctgagcattcattgtccctgttccaccattttatatccttggagcggggcagggcgaggtgggaggtgcaggtaacctgggttttttacttgtttgtttataggctgtggacccagaggaggcatatctcactaggtagccaccactgctcatttttcagagagcttggatctcagctggatgccatgactggacaggactttgggttgtctcatttgggaaatcagagtattttctatgtatgagaagcatggaaaaaaaggacatttgaagccagaagagtggaatgtagaaaagaatcttaatgattatacatccacatttcagagtacttctcatagggcttctgttgatgtactctacaacaaaccaaaaacaaacaaacaacaacgacaacaaaaatgaggaacatatgtgtggttttatgtgggaatgtttgtgagaaatttgccttttatgcaaatcactctcctttttataagaacttgccaaagttttgcaccaccaaaagttctggctctgatgatcaggtaaccagccatgacatgatggaatctgtgaatcctgtaacatatgtttagatttagctgctaagaatagcagagccagtttgtgaataaagtttatgttgtgtaggaccctgcagctatcacagctttaaatttacctcatgtctcactttactctttaacctttatgttcatttaacaaggcatccagcaatctaaagacctctcaaaaacgcactgctgctctccaagacatggcaatttccatgtggtttgttcatcttttttttttttttttttggacagagtcttgctctgttgcccaggctggagtgcaatggtgccatcttggctcactgcaacctctgactcccgggttcaagccattctcctgcctcagcctcctgagtagctgggattacaggtgagtgccaccatgcctggctaagttttgtatgttcaacagagatgggatttctccattttggccaggctggtcttgaactcctgacctcaggtgatccacctgcttcagcctcccaaaatgctgagattatatgtatgagccactgagcctggccagtttgttcctctataaacaatgtttgtgcttgttaaatgtcagttgtggagaaggtataagtctacattttaagaattatggagattattcataatctgagaatctggtattgcactattttaattttatataaactttttcaatacataacactacaaatatattcaggagttatgttgctgtcctataagtttaatactttggagagatgagtaaaactaacaaagtaataacttttagaaatgaaacttttacaaaatgaagcagttaaggttgaacagttaatcttagattctgagttttctcattataagtaaaagtttaaaatgatgttaaaaccgtcttaccaagtttaacgagtgccagcattcatttgatgccctaaatgactatgttagcaaccacctcctagtatttatcctgacaagtgacactttaggaaaagcacatctcagttattcatagaatagtgtgattacgtattttcagggtgtttggtatcagcaatgaaccaaattagacatttaaagtaatggaactataccagaaatggaaactgaactagtatttcctagaaaagactttgtcactgtcactgtggttatccacttaattgagcttttgatttacaagtacattcatttacctaacagctacacagaagaccatatcatacccatagacttaaaaatgattacattaacaatcacagttgacattttgggttgtatattaggctcttgcttcatcaggcatcgtctaccatctagggtttattctttagaaagcacagaagcaagtttgtctttgttgttatttttgttttcattgttatttttgtttttgtttttttctctaactagacaggcaaccactgacaaaagccatgcctgtattagtgaaactcccagatattaataggaggagaaggcagaaaaaagaagtggggaaatagaaaggcctctacagatggtgatttcatacagaaaggttaccgacttgctaagaaaaattatatttaattttccaactaatttttaactgtcgaaaagtgtgaagattgaacaacacctacaatcccgttgaactggccaaaaagaatgggatctctccagaacaagtcagttcaactcagtaaatacttattgactacctgccctgtaccactcagtgtgccagatgctgaagatgagggatccttgcgtgcatagagtttataatccagggagcatgcaggataagagaaccactgttatcaatggcaatcagtgcaagtcttcacttgataatgtaagtctaagttaaacaatatactgatggacctagagcatgataatttctcaaataatacttatgtaagagttgtcatcttctgactttttttttcttgcatctagggaaaagaagagaataaagaagattatcattgctacctgcatcttactgtattctcataatttgttgtgcttgcttaacaaccagattcaagttctttcctcaacagctctcatctgttccctcaaagaatatgccttagatgcatttgagacaccattttgtgtctgacttctgcaattttgtaagatgctgccattagaagttaatagagcagtggtctttcaacattttagatggtatactccttcagaaaaaaaaaaaaagcatttttgagaaacatccccaacatatgtttggttgtttttttatttccttgaaaaacatatgtatgccgggcgcggtggctcacgcctgtaatcccagcactttgggaggctgaggtgggcagatcacgaggtcaggagtttgagaccagcctggccaatatggtgaaaccccatctctactataaatacaaaaattagccgggcatggtggcgcgtgcctgtagtcccagctactcaggaggctgaggcaggagaatcacttgaacccgggaggtggaggttgcagtgagctgaaattgtgccactgtactctagccggggcaacagagtgagacgctgtttcaaaaaaaaaaaaacagaaaaacatatgtatatttatatgtgtgtatatacacacacacacatatgcacacacaaatatataaattaaatttttaaatgagatagagtaaaatgcatttttgaaattattgatttattaacaaaactaaaagccttccttctcactaaaaagtgttgaaaaatccatgaattatgcaagattgttataacatttggctatcataatcttattcttgatatcaatcagtttttaaagtaatgagaagctgctgcatttttatattttttaacaaatggatttaaaatccactgaactgctcaattaaaagattgaaacaaaatagcaaattgtttccgagtttttaaaagcattttctgtgatgacaatcataaaatcttcagtaagaaaaacacacaataatgggaacacttcgaaatatttgttttcaaatcgtctcttcataacaacgtatcacttggtgtgaaaattaccttgaagaaacaacaaataaacctctggggttttttgttcttcaaaaagatctattagataacatgtactgagagccatatatcaatacagaaaagatcagcaaatttaggatatttggggtttttttgtaaaaataaagaaaataactcactttaagacaacttttaaaatctttgttacaaatgatttctacaattatgtatcatctcattacaaagtaatattaagattctagattctacgatttaaaagattttagtaaaattattcatgtagataaattactaaagcatgtaaactacagtatgtcacaatcccataaagacaatctactgtacattgttgattccaagatgtacatttttcatatttaacatctcaaacattgagagcggttttaaggtaatgcccagaagcgtggtatgcagttgtccacttctgcgggctcagcaaacctgtactgggctcagtggactagaagaaaactccagagacaacggggtgggggagggggggggacttaaaaaaaaattcgatagataatatacatatgtttaaaatctaaattttatttagagatatctaaataaaatctctaaactaaataaaattttagtttaaaagattctaaatgttgagaaagcattgttattgtttacctggcagttctttttatttcttactagcgcataaataatggtatatcttataattaaggaagtcttagatttaaagaaatctaagctgacgggtgcagaggctcaggcctgtattccctgcactttgggaagccaaggcgggaggattgcttgaggccagaagtttgagaccagcctgggtaacagagtgagagtctgtctttacaggtttaaatacagtttttttctaagtaatattgtcataaatattatgtcatgaatattatgcagagctgccgacccctctgtactctgggcagttttccctcttgcctgagaacaccacttataacacgggacctatacgggagtggtgacacgccatctgttcaagtttaacttttttctcattttttagacagcaaatacaaatggaagttccagtatgttctgcccgcactccagtgggcggtcttgtgcacagcccacttgggaggcctcggcgctcaggtgtggtaagagctgggcggtgcagagcacagagaaaggacatctgcgaggaaagttccctgatggctgtcaacaaagtgccacgtctctatggctgtgaacgctgagcacacgattttatcgcgcctatcatatcttggtgcataaacgcacctcacctcggtcaacccttgctccgtcttatgagacaggctttattatccgcattttatatgaggggaaactgacggtggagagagaattatcttgctcaaggcgacacagcagagcccacaggtggcagaatcccacccgagcccgcttcgacccgcggggtggaaaccacgggcgcccgcccggctgcgcttccagagctgaactgagaagcgagtcctctccgccctgcggccaccgcccagccccgacccccgccccggcccgatcctcactcgccgccagctccccgcgcccaccccggagttggtggcgcagaggcgggaggcggaggcgggagggcgggcgctggcaccgggaacgcccgagcgccggcagagagcgcggagagcgcgacacgtgcggcccagagcaccggggccacccggtccccgcaggcccgggaccgcgcccgctggcaggcgacacgtggtgagtgaccagtgactcggggtcggggacagagagagccccaggatcccggaccagcggggtgtctgcgtgcccgggattccgtgtctcgcgtctcccgagggggcttcggcgacggcttctctctttatatatatatatgtatatatatatttttaaagtcttccaatacgatccgaaatggcttctcttcatcacagtcctaacgccctgggcacagatgttcacttggaggtactgggtggtggtttggctggatggaggggagggagcgcgcggactgagcctccaaggtactctctgggccggggcacagagtggtgggctcaaacggaagggaggggacggcgactggaaaagggcagagggcacccctgagggtccagccttggttcaggcccacagacgtggctcccg

SEQ ID NO: 4133 - DNA, 6000 bp, Homo sapiens
ccccaactgttaggccctctcccctgggtgttcccatcagtcctgcatggatgcatttcaaataccaactttccattctaatcttttagggcagcatgtaaccaggcctcactgagaggagaaatccaagaagagtgtagagaaacacacatgagaggaacctcacaataaaaaggaaacaaactctgggaaacatggttaagaaatatcagactcaattaataatggaggcttcaacagccttggagagatccaatacaaactaaattcaaactatatgccagtgcttctagccatatttactttttttttctttttttttttttgagatgaagtctagctctgtcactcaggctggagtgcaggggcacgatgttggctcactgcaatctctgcctcccaggttcaagcaattcttttgcctcagcctcccaagtagctgagactacaggtgtgcgccaccacacccgactaatttttgtatttttagtagagacggggcttcaccatgttggccaggctggtcttgaactcctgacctcaggtgatatgcctgcctgggcctcccaaagttctgggattatagacgtgagacacagtgcccagtccatatttacttttaattgattatgtttttttttttaaaaaaaaacttagaggaaaactctttaagaaaaacaaatcaggctaaaaactacattcttctaggtaatgaaaagtaggcaaacaacattagttttggattttttaaaaattaaaaacagcttttcttaattggttcatttgaaaaaaaatggaaacttccaatagggaaaggtagagctgagatgaagttaagggagaatgttactgaatgggaaaatatataatattttaaaaatgcaattttaaatcatgcgtaacttgtcttggagttcatcccagataagtatcagtatagtcagggatgttgacgaattctggattagaagaactgtgcaaaggtttgaaatagcagtaagctcaagtcttgggaatgcaaactggatgacattttggaatgtcctactatcgaaaaggagagaaatgaagcttaaccccatatgtcagtgtattctcataaacagctacctaaaagggcatagccaagatgcagttaaacatagctacagacacacgtgtggacctggacagctagatgcctgctttaggatatgaaaaatttcctaggtcacaattataacagtgcaatgatttctagaaaaagaagatcatttcctatcctggctcagaatgttaaaaaaaatgactttcccataacattttctaatggatcttccagtcacagtctcctatggaggcataatttatgtagtggatgacaaagagttttatgatatctggaattcatttaaaatctttagattggaaaaattgagatccaattaaaatcttaataaatgactctgtgttgcatataaatatattaaattaatatgtgtgcaggctgaaattggaaaagttatgagagtcagcatgttaattctatttctatcagggaactaactgtatgttataactctgagaattattgggtaatggggctgtttacaatgaggcaaaactgaatttaaatagcaaatattcacccatgacttgtcataactcatgaagtctccaccttgaggcatggtgaaatctcactagtgaaaggcctctgaggagagggaaggtggaccaggaagccaagaagagccctagggaggctgatgtagtgaaagggccaggtccaaggatctctccatgaaaggaagcaaaggctggcaggctgctctgtggcacccccacgtagtaggtgagatgcagcagtgagaatctttgattggaagtcattctcatgcacagaaggtggtaacagcttggttggtgagagactgatgagaagtgctgggtctttgttaaggtatgacccaggggctgagggttgaaaaatacagggtgagtgtatgtatccggtacactcagattgatagagtgtacctatcctctgcatactcacatatttaccctaggttttgtatcctagtctgtatcccggggaggattcatacttaccctaagttttcctatggctacactaagacaacagatgaaatgtgaagagtgacaaatgacagaaattgggcttctaacatactggacagctgaatgtagcagttaagatggcaaacccacaagtccctagattcaaacccctgttcccctagttaccagctggggatgataacatccatgtggatgttgtgaggatcaaatgagatactttctttaattgcaggatgctccattttgttattattatttttggaaatagaaactcttggctttaagtcacataatgttagagctggaaaattatgctacacctatggatttgactaagctgttcctgtagtttggccagttttaaaacaaaaaaatcctggcaacacactcctatcctcccagccccaacaaatctggctatctccattccctggtaggttcaaaacctgtttttatttccatccaaaagcttcccccccacccccagacatcgagtggtccatctaaaacagtgattgttaatactgttttgtaaatcttccagtccagatttattctagaacttgagtttgtttttagattgttataaatgtgcctttatttctagctgtttgacataacttttggatgttaataaaaaaaataacaccttgggaagtatggacatgggtggatagaaatgtaattgagaaagccatatccaagtagattgagggaattagtaaaggcctcatcacggcatacccaagtcataacatgttaaaagtttgctccgttggtgttcatcctcctgagacacccaaggctgatggcaattatcctattcatcttctcccacaagtctgtctttagcggaagatttttttctttacataaagagctatcatataaaaagtgctcatagtgccagaaattgaggtaaatgcaatttgcaaacattattatctcatttaattctcttgaggatagataatattagataaggtaaggattaaagagaggttaagaaacttgatcaaggacacccagcagggaagtacttagcagggctgttcactagggcctgctgtttctctttccagatgtacagactttctagagagaacgatgtgctctgcccaccctcacccctttgctctgctgttctgccagggacatgcaggagacggaggccttcctcttaaccgcaagaggccttccttttttactaatattcctcagcacagaccctttacgggtgtcgggctgggggacggtcaggtgtttctctttctccttcctgagatctttgcttccaatttggctaaggccctttccatgttatagtatcatgtatctcttattcttgtctttctcacttaactgtgagcccaccttgatgttagatattctgaaagtcattctcctatccctgaaaggtcttcaataaagatttttcctccacttagtggaaggtgaataaagtttattcttccatttagtagtggctcaataaaaaagtttgtggaatcaatcaagggatgagtaaatgaatgaaatactgaattttcctggcctatgaaggaccatgagctaaagcagcggtttaaagtatatagtcccaaacaaagaattcttactaaaaacacaccggatctgtaaggcagaggagggaggggcgggaggaagaagtcgaagagcagggtgtggtattccagggagactgaagacaggagcttcccatgggacaggcagttcatccacaggctcagcttctgcaacctccttcctgtggttactcctgctctctaagaattctgcatgttctcatcaagaaaataccaaattccttgaaagcctggattctgccttgtggtttgtgagccaatctcatgacaccaccagcccacagtgcttttcctgattccatggaggcaaactagacggagcttctagcaagtgaaacttcttttgggtagatatttgggggccgcttttaaaatttttctgacagaccaagtggtaaaaatctgtgtgtgtacacggaatgctctctcccttctgcaatgcgtttactctccttgtagaaataactgcttctcttagccggctcttgcttggagcagggaagagcaaagtcctatcatgtacacatacacagtttataaacatatactgtacaatcaacatgtacatatataatacaatatacacatgtgtgcatcctgtatctgtatactgtatatcatgcatatacaatttcataaacaagcttgtaccaggaaaaggcaataatttatatattatacacacatacatgtatatgtaaaatatgtacacacacacaaaatataccatacagagtgtaaggttcatgacgtctttctttcgttgatatttgtgctcacttattagcggtaaattattaattttagataagcccatcacagagtgaaggctcaatccttgaacagcccagggagaacttcgttgctacttttgaaaagccctttgatgtgcccaaagtctccagaagggcgatgccaaacccactcaactttgacaaagtgtgaaacgtctgtaaaaaggagttctctgatgtgtgagaggagacggaaccgagaagaaaaggccgtactctgccccccgcgggacccaggtccccgcctgctgcagagcgcactctgcgcacgtcgagccgcgaaaggttcacagaagaaaacaagagaaagaagtagcaggcactgaggagccgccggcgccggcgcccaggacggcacgtgacccgggggcggggccgcgcgggccgcgggccagtggatggggacgggggcggggccgcggctcggggggcggggtctgtggcggcgcagcttacaccgcggtccccttatttggatctgcgggaatgtgggctggagaggtcctgccgtggtaccagcctccagcctgcccccaggactgcccctgacccaggcgcgcccgctgctcggtggcaggagggccggcggagcgccatggcctgcatcctgaaggtaacgacttggatctgtggctcggacgcgtggttggccagccccttgctgctcagaggcacggagtcagccgcggtcccaccgcatcctcatctcagttgtcttttcctggcattgattttctttttgttcctttggcaaatgcatatggagggagattctgaaacatgcagctggcacagcttcttttcccaccattcctgcctcctgctcgcgcctgcattgaaggagctgcagactgttggctccaggggagagcagggctgtgtgccgaataatggggatggtagggagaggaggggtgttcccgcgggtcccgcggctctgtggagcctgaggcctttcaggggccacggggaggggtggagtggctaggcgtgagttgctggtggtgaggggcatagcgctttaaatggagggaagagtgagcggaggtgggctctactgtgcatttgatcatgtgaagacagaaacttctgagtttacaggtagtcccttaggaatgagttttctatgagatctgctagctctgtttgcccttagctctactttggaaaagttcacacgaggatgtatatgttagtagagaacctctcactctctttatgctcataaatttgaatagacaaaatgattttatgctctgccagagtgcgctcagccatcccttctttgttgagttttctttctccaagaccggattcttagcctcacctgagcatctttctgggttcacagacttgtggcctcaggtgggagaacttggtgtgagggcctcacttaaaaagaactttccatcccactggtagaggcctcccctgccctcgtttttttttttgcactacctttctacaagaacataacctggatgcatgaatcaaaaacatgaacagcatgaaag

SEQ ID NO: 4134 - DNA, 6000 bp, Homo sapiens
attgtttttcaatactgtggttactaagattcctccttttcttggcaactgaaacttgcaactctcaaggctcaggcctgtgacctcttctattctgtggcttattcctaggtgatctcatccattccacttgtgatactcatttcacatctctaagcccaacatcatactgaactgcaagtgcctgtgacatctcacactgattgtgtctacatccaaattctccctccacagccccctaatccttctctcacagtgttccccatactggaaatagcagctccattctccagctgcccagtccacaagccttgcagttttcctcccctcctctctacttctattataatgtctcatacccagtaatcaccaaatcttgaattcagtcacttgtaaaagttctatgacctcctttcacctagaccattgcaatatagccaaactgatctccttgtttccactctcccttctccaaaagctattctcagcacagcagtcaggtgatctttccaaggcattacggatccataatcttcacctgccttaaaccttcaggtgggattccttcacaccatctgtttcatggctgacaaggtcctagatatctggctccagactgcctctctgtcatcctcctctaccactctctggctccctttattccagcctcactagcccccttgctgtctctccaacatgccaagcaaggtcttaggcaagctctctcttgtctcatggtctttgcacgtgatgttccctttgcatgggatgaccttcctccagatagcctcatggctcactctcttacttcactcatttatctgctcaattgttgccatcctagctacaacagctcctacacttcaatctctaactgcttcccctgcttttcttcctagcatctgacattctttttttcttgacacggggtcttgctctgtcagccaagcttgagtgcagtggcacaatcatgcctgacttcaacctcgacctcccaggctcaagcaaatcctcccacctcagcttcccaagtagctgggactacaggcatgcaccaccttgcccagctaatttttgtatttttttgtagaaacagggtctcaccatgttgcctaggctggtcttgaactcctgggctcagcaatcctcccacctcagcttcccgaagtgttaggattacaggtgtgagccaccatgcctggccctattgtattagtttatcatccttgcttaaatataaacctgatgaggcagagtctgtgtgtgtcttattcatatctccatgacctagaataatacctggcacacagtagatgctcaattcatatttgttgaattaatgaatgagttactatcaccttagtttatgcagagcttcacagtttacaaagcagtcacatacacaatatcttaataagccctctaacgatttgtggtataggctttgttatatccattttatagatatgttgacagtcccttgctcaaggtcacacagcaattagaagtaaaagtcaaactctggtgttttgccttcaagcccagtttattaatcataaatataaaatactattagcaatttattggtgttgttcaagacatttgcatctcgtttaaccttcacaacaatgctttgaggtgggtactattttgcagatgtggaaactaaatccctgcgaagtaacataccctaggtcacagtgctgaaaaatggtaaagtcagaatctgggtcctgacagcctgattccaggagcttattctcaacagatggacccactaggcctagcctgtaaaataaagagagttaaggaaactgcaaacataaatggacaagaatcaaatttgttccatggggactttctgccattaataaaatttttgctcttgcttcatgtagtaaaactttcttctttttctttgagatcataatgtggaaagcaattgtatctcaaatgcagttcattatattgttttctggtttttatccatctttgaaatgtttgaaacgtttgtttctaaattgagaagtcacttaggaattttaggaattgtgggcagagcttacggatttccagcagtctgtctttcttcctcctttggtagctttgtgctgccttttgtggcatgagcataggctagcgttccctctgagcacggattccacctgctctctcaccgccctatgacatgccttgtttcatcaattctcaccttcattgtatcacataacctacattgcagaacactcaatttattttcctttctttttttccttttttcaaaaggaagaggctatttgattggatgtgatggcaccagaggcagaaatgtggcaaaattttaaatggtgagaaatccatctcagctacctggattttgagaaacaaattgtgatttctcgactcactttgaattgaactgtgcaagttagatgaactaaaaaagcttcattgacttgtctacttgtccgcttgtctccaagtcagtcaagtgtttgtgaatgctgcctgttttctaccctgtataattattcaaatgattaacttaagggtgaatataaaggtatataaacataagtagatgcccttgaaataacaaagccctcagaccttacataagcaggcatttagaaggtgaaaaacaaatcaggtgtgttgattgttcctaaagattgtaacagaaagattctaagcacttacctgggaatatactgtgaagagagcatgtggtctattgatccaggcatccctaatacctggcacatagtaggtactcaacagagtaagtgcttaacataggaagtgcttgataaatttgtgttgaatctatagtactctgtcttttattgcctagtcatgaacttgtctcaacacacgtgcatacacacacacatattaggttgtgagctcttagaggagaaggtctgtcttattcaccactgtattctctaatacagaaccaccaaataagtggcaatcattaatgatcatcaaattgaagtaaattctatgacttgttttctttatctcgtttccctcaccctatcttgtccatttggctctcaagccagaatgcctgaaatggctgcattaatctaatcaaatatgtaaaagccaagaccttgaaatctttcaaatcaagctctgaattacatttttaaatttaccctggccatttcataagtagatttagcaactagctaactgctatcccaggaggggaaaaaaaaacccataagcttaatgaatttggtcagacatacagtgtaacagatgtccaacatgctgccatgaacttaaatcatagatatgatgcctctgtttggcatggcaaaatatattagaactgtttcatcagtcactgggcaacttgctagatggagggggaataatcctgaaaaatgcaggagctgcttctaatagcatctaaaaggatccctggagaaacacagataatctgcttgcagtgattcatcaagttggtcctttgtttcattaatttgagtgtcaagtgcaaccatacaataaagaattgccaagacctggtaagattctcctctggctgctgcttttcctgccctaacaactggtactattcatgcctaaagcacaaactgaataaatagtttcaaggctggcaatgttggacagtgcttcctattttgcttttccttgaaaggctaaatcgtgtgctttcttgccctctcccaaacacgttgcactgatattcattattgcaccaataattttaactttcttaatactaagtatggaaggatgcctcataagataaaaatagttcctgttgtatcatcagtccagcaatagattagggaagattaaaaatggattgtaatgccttctttggccttgagaaagctcttattgtgcccatggttcagtaggcctgctgatcatttccatcttaatgtaatctttaacattacactgctacaggtgagatgttaagtaatacattaagacaactattttcactgagcaatttcacaagaaatatgtttttagctaaattagacatttaacaaatgccatttgtaattcaatgcagaggagacagcatccttaaaacaagctattgatgtgactttcccaacataaaacaatacttatgtttttttaattttaattgaagtcctgaatgtgaaactatcgccgtcagtgcagtagaccaacggaaagcaccaaataccttaggattatgaaataagccatatgcagttttatctctagcagacagaaattcttcatccaaattaggaagaatctacaggtcaagttaatcatgtagctgtgacgtgctgaatgtttttaaaactttaagatcatttagatgaacactaggaaactcagaggtcaggcagaaatgtaaattgtaatattcaatgaaaataataaatgaaataattgagatgaaatattatctaaagaatgcatgagaataactgaatctgataaagtaaaattaaaattaagagagaagagaaaataagaaagtgagcaattgaaaaacggaataataaataattttttaagaaaaataatttcatcatgtatttctctatgctacgtacataaacgcaaacgctataaatagagttattgacatttgggaggttgatttgtttttatcaacatcgcaaaacagaaaatttaggttgcagattttcacatggctatcacgttcagaatccaatcaggttctccttctttactacttgatgacttctttaaagataaataagcccgcggaccaagaagtgggtacactggctcggttaactctctctccccagaaatttcactactgaaaagattattatttgggggcggggaaggggatgtagaggtctttaggacccagcaggcggcggcaggcggcagttgtgtagatcgctgagagactacgagggtccggttcagttttaattctgtctctaatctctgcaacagccgcgcttcccgggtcccgcggctcccgcgcgcgatctgccgcggccggctgctgggcaaaaatcagagccgcctccgccccattacccatcatggaaaccctccaggaaaaagtggccccggacgcgcgagcctgaggattctgcacaaaagaggtgcccaaaatgaagaccctgatggtgagtcagttgtggcaactccaccgggcaaagagggggatccccgggctcagggtccacgggacgcaccgtggagactccgagacgcctaaccctgggccgcgaggtcgcctgttacaaagggacaactttctacccgctccgcgttccctcccgattctccagctctgcctggctcggaatcccagagccaggatgggaactcggggttgcctcgcctcctagatctccggcgagaggtccgagggggtggcggagagctgcaggagcgatggaggagtgggcagattgctcaagggatgggggtgcccaaaagcaacagcctgccaaaaactaagagggacggggaggggggacctttgcagactttcttcgttttcttagatttcaaacttgcaaggatcgcaaggatccagggccccaggaaaggaggggtgtgaaggactcaaaattccagcagcttggctggggtggctgcgccagacgggcccttccccaaagtgcaaacccacccctgtcctcggccccggcgcgctccctccctcagcccggggccgtacaccacctgccctctaccgagagatctgggcggcggcggccgaaagcagcgacgcgcccggagcatcccttgcgatacgctaggggacggtgctttctctgtcccagttgcgtgcggcggggctggggcccaggccgccccaaatctcccccactagagtgaccaccgcacagttgtccccgctgggcgcgctcctccggtgtctgcgctcagccgctctcctcttctctctcccgcccgcccgcagcgccatggtctggcagtgtgtttagcgctcaccaccatgtgcac

SEQ ID NO: 4135 - DNA, 6000 bp, Homo sapiens
gcatcagtcacaaattaatttacatttgtattggaaatgtaagggagcataatggaagtttaatagacatgtagaatattggtctcatcttgacccactgagtcagaatctgcatttgaataggtgattcttgggtataataaaacttgaaaaacactgttctggacagcttttggtacattttagaagggaggtctgtgcaggcccattctgttgctgagaatttatttagagattcatagccccagatacctgcaccccaagaacagaagggggagccctaatcccccagttgccagttgaaaaactggttatagttgcttcctgttcttcacagggcaggtaatgtgaaatggagtattagaagcagcagaagtagaggaaggagaacaaaaaatacgtgctactccttcccagtggggttgcgagcaagaggagaatctggcaaatccctggggtctcagaaacatacggaggccactgtcagagcaggaagcaatcaaggggaaactagggaagaacagagtcgaaatcttgttcttctacttctgtgtactgttctgagtctccctggttatttttcatctctttaataaattgcctacacttctgctttctcttttttttttctctcaaaagtaacagtagtaataatgataatatcttatatccacatgatgctatatactctctggtatatagtagatataacagtcttttacgaaaggcaagtttaggctgttttgcaaatgataaatgttccatacactttctcccatttttaattgggttatcattaaaagtatttcttgtttttcattcattttggcaaattttggagggtttcggtgtgtttgtgtgcacacaggataatttgttgagttattgccaaagtgaattgaatgaggaaagtgaggaaaaatactaccattaagtagatcaacccccttattttgaaggtgacaaaaccaagccacaagagtttaggtgatgtgacttggatcctatagcaagtgaataaaaccagtatctcccattctttacattccacagtacactctactgatatgcatggaataaattttagagaacctgtgagctaaatcttaaccttgtgtccaagacagatctcacctaaatggtcctttaagaagataactactcttactattctttaatttccacagaagcagaatttataagttcctgtgactcatgagatacagtatgattaagaagggctttgaaaagtgcaaagcaccatacaaacatgagagattgtttctaataatgaccggtgcccataagcctttattgccgagagtgtctttacaatatccaaactcagtgcctccttctgcaatgtgagacagtctctgttttgttcaactttggaatcttttcaccatcaggttctcaagcagctatctctgaaaccaactggcttatcctgacatgctcaattctgagtttatgtttcattgtgtttcacctttgcgcttgatctccatgctttgacatggtggtgatttgacaatacaaatggcttcccagaccctatctggaccatccactttgttcctttgctttgaaaatgagtctaaatttgaaggaaattggataaaggaggtaggaaatgtaccatctgggcccttggcaaactgtgttttgtttaaattcttagtcttgacaatttgtctctcttcttttctgatttatttcacagggattacataaactaacgtggcccatgagctgtgtagcccaaccgtacagtgtactacactttcctcttctaaatgggattgttgaaaccaaagcctgagaggaactaatccaaaattttctttgatttccccaaaatgtcaaatctcctgacttctctgacaccaattggatgttttattcacttagactgtgggtctataccagctgactccatgaaaaaaatagacaggcccttctggggccaggttgaactacagagtcagacaatgaacaaagatgtgctttagattcttcagttactgaaattgaataactcttattttcttgaaagcagaataaaagcaaagcagattcctagagtttatataacattgaaataaacacttaaaaactgtattcctcctttcttttcctttaggtatatttcctttctcagatattataaaatctaaaatctatggctatgaccagttaatttttgtttaatgaaaggataaaaagttcactttattgacgaagtcacacttcacaaaaagatgctgtgctcagtataatttctaattcctttactcaatttcattttctccaccttttcaggctgtaaggtcagcctgatgaaagaagaaggcagtaaaaagagaccttcagctggcccggtcccaggcctggttgctgataacaaaaagggctctgaattagacgtttaaaaaaaatcagatagataagagtagatatcatgcctagactctcaacccgggctaagcaaagcctgagtgagcttgttcaggtttcaacccaagtgaagctggacaaaattgttcatttgtagctgttctttataaagttgcatgcactctctagccaatattttccaccctcacatcccaagggaaccatagtaatgataaaaacaagtggagagagtgctgaatatcagtcctcaatcactccctcccatagcaaacaacctatacaagtgtcatgaaaaacttccctgagtgttggcaaaaagccgctcttgcagtgtgcttacgagtttagtttttgagcatattggtttatcgatgggaatatttgtattcttaaaatcacaagaggttggcataagaaaataaactgccagggatatttgaaatgaagtgcattgttctgctcaatgagtcacatttacagacagagcctttggagctgccacacctctggccttctactctgaagacacagtgaacaagcagaaaaaaactagggctgggaattcagtttgggagaaaaggcagctaagctgacctttgaactttagggtaagacccttgggcagccacgtaatgaccagcgccatcccattcttcaaggagagcaccatactcaagcactgcctgtcaagagggagcaagagggaaactgctctagaacagaggagatgccttctagaaaacaagggtgggggaaagaatttttacactataacccggggctccttcactatcttgttttatttacttctcctgactccattcattcagtcattcaacagagagtttactgagataggtgctggggaagtactgaatgaaaacagactccatcccttccttcatacagcaggaagctgacaatcaattatacaatataaatttgacattgttaccatgatcatactgcaaaggtgagttatctgatgctatggaagcatgaaagaagggaatttgacttagttatggagctcaggccaggcttccaggacacagctggaatttgaaggaaaagcaggtgagaagaagcatgagaaaatgattcaagcaagacagcaaggggaaaaaaattccctcaacatctgtcaacattgcagtgcaatatcaaagcccaagttcagaagactccaaccttgctgggaagaagagtgacatcacactgcccatgaagatgttgaaaacagacaatgttggtgaaatccctgttgagagcagggacagaccgtttcctaaatgctacactcccctccccagaaatgttccgagacggggccacagcagggaagagtcacaggttttgcttgctgtggacctctgacgctgtgaataaaactttttctttagttttacaatagatgtcactgtgcggcattcttaaacacaaagaagagggagaaacgaggttactaagataatttagtaactaagagagaacatgatatattgaaaaacagtggaatttggagtcagttggttcattctagtacgatgataatactcccaaccttgaacaagttacttagatttttttgaacattagttctgtcacccataaaataggcataataaaatccatcactcaaaaaatgttagtttcttctctcattggctaattttcataatcagaatttccaagactcattattttcatttgaaaagtacaaattatacctgcatcagagtattgatatttaaatgagttcatttgtaaactttaaagcatgaggtaaatatcaggtattatgaatcagtcataaaatatttgcgatggttactatatattagatcctgtttttggtcctggagaaatggagggttgactgaagcagggccttgcccttaggagagagctgaaggagaaatctattcttcttcctgaggcagagagaaaaggtagcaaggccagagggaaagggctgcacaggcacccaagttcctggcagttggccctctctgggggatatctgatatctgacctccagccatcagctgagagcttgcccagactatctgacccaagggctgtagggactgggctgcagaatggatttctaaatcttcaaaataaacaggcaaggaaatcttgcaacaaatgaaaaatgacttgagggcagtagaaagtacttgtgccaactgatggaggaggttatgaaaaatgaggagaggaaaatcactatagacttctgtgtttctactgcaagtggattgaacagtccagatatactgatttccagcccatatttcctgcttttaagctcctttggtcttatttccctcttctttctgaaaagttataaaatgaatgaagggcagaatgtttcttgcccaaccatgattcaggaggcagctcagccacagaacaggcaagtgtagcattgcctggaggaaaaggacttgtagaggcaggtcccagatggatccaccccagacttttcaaagaagacacctccttcatcttgtgttctaaaaccttgcaagttcaggaagaaaccatctgcatccatattgaaaacctgacacaatgtatgcagcaggctcagtgtgagtgaactggaggcttctctacaacatgacccaaaggagcattgcaggtcctatttgcaacctgaagtttgtgactctcctggttgccttaagttcagaactcccattcctgggagctggagtacagcttcaagacaatgggtataatggattgctcattgcaattaatcctcaggtacctgagaatcagaacctcatctcaaacattaaggtgagtggaaattatgaaattgatactagcatcccatttgatcagacctgtagccttatttagaagctaactaccctgcctggtttgtatttgagtaatacagagaacagcatttttaaaagatagcgccacaacgttatgattatggctaactaagccagtttgttcatctaattctgtgtagtctcagctcacagagtgttgatctagccctctattttgttattgttggttgctactaatttcagctcttttgttttcctacatgactgtttttggggtagcaacttagaaaaataacaacccattgtggcaacaaagattgaatatttaactgatgaataagcatgataatgagcatgcttgttaaaatcatattgctagattccatcctgagggtgagaattctcaggcagaaagggtgagagtctgcacggtgggccaaaaagcaaaattatttcttttcacttgaatgtgctgtaacataattgactatttttactttaatatggcaagggaggatcatagctctatgatgtaagagcctccatttagtattgctttagtgaaatcagtagcatcataaggtgtggtcttgaatgtgcccacaggtgtgacatgaaaaggatttgttccacaaaagcttaaaagcctttctcaaaattgggaaaactatgaaggcaagcacagacatataattagtgtcctaaaatcttccatataatcatttaaagtttttttaaaaatttgctcctatgttttccc

SEQ ID NO: 4136 - DNA, 6000 bp, Homo sapiens
agttcactaaatgtaaggtccatacataaaaatttattatatttttatataccagcaataagcaattagaaaatggaattttataaaaataccatttacaatagcaccaagaaaaacccctaagaataaacctaatgaaagatgcacaagatctctatcctgaaaactataaaccacagttgagaaaaattaaataaaacttaaaatgaagagccataccatctccatggtttgaaatacacaatataataaagacgtcaatttttccaaaattgatctgtaaacttaatgcacccctataaaacccagatatttgtatgtgaaattgacaagctgcttttaaattttatattgaaatgcacctaatgtagccaaaatagtcttgaataaaaacaaatctggactgtttacactaccagataatcaaggtaaggatagtcacacagaccaatggaacaaggaacagaacagagagttcagaagcagacctgcacatctgtagtcacctcatgcacaacaaaagcacaactgtaattcagtaggggaaattatggtcttttcaataaatactctcaacttactggctatcacagaggaaaacaaaacaaaacaaaaaccttgaacctttcctcacaccatacacaaaaatattttgagatcaatcagtatacctaaatgttaaaggtcaagcagcaaggcttctagaatcatatattgtataatatcttcatgaatttgggaaagctgtcttaaatatgacacaaaaacattatacataaaagattaaattggactgtactaaaattaaaaatctctattcatctaatgatactattaaggcaagctacaaactaggagaaaatattttcaatatatctttcaatacaaaagactcagtatccagaacatataaagaactcccataaatcaataagaaaagacaatttaattaaaaattgtgcaaaaaaaaaaacttgaagagatacttcacaaaagaccaatatgtatataaaaaggtctttaacaacattagccattagggaaaatgcaaatcaaaaccacagaacgatatgactacactcccaagaaaatggatagttagaaagactgacagtacaatgtactggtggaaatgtggaataacttgtacaaccacttgaaaagtatttgggagatcaacataatctagtatcaaagaaaaacttcatgcaaacacttgttaaagatggtaaggggtgggaggcatggtgataggtacaaggaccattgcaaggaggtcttgcagttggggagagaaagtagattaactccaactccaataaggacaagtgggaatttataaccaaggagaagggtggggtcagtggatgaaaaatgcctatgaggaaacatcaaggataaggaatgtctggctaaactgacttgatagggttattgctgaaggcaggccatggtggaaagatgctgagaatggtcagataccaaacgtggggattttccctaaactgacttagcaggattcttgctcaaactggattctgcaaggacagagagggaagcccaaggtcagacctagtcagagaagactcaggatcctgacttaagttttggtcaaaggagggagtctttgtcactagatagatgtataccctgtcacccagcaatgtcactctttgtatatttgcaactgaaatcaatgcttacatctatggcatcttcattcataatagtcccaaactggaaatagtccaaatgttcatcaagagtgggtggtaagtaaattgcagtattttttacagtggaatggaatggaaaaagaacatattactgctacattcaacaacttggctgaatctcatatagaaaatgttatgtcacaatagcgaaatgcaagagtacatacagcatatttctgtttatatgaagttcaaaaacaggcaaaattaacctatgtggcatagaagtcagaatagcaattatcttttggggggatttactggaagggaatgcaaaggaaacttctagaatgctggaaatattctttggtgaaaggttgtcccttagggtgctaactccctgcatctctggtttctgttatttggcccatttgggctgcctctgacaaagccagatcccagtaccatggtgcagtgatttatctgagccaaaagcctccacacatccattcaatccagacttgggaacgggagagaatggaggagctgcccccacaatctgcacagtgaaggccatgctaaactaggccctcttcctggggaaagctaagaagaaacactggtattaggagatgtgtgaattttagcagcagccaggactctccactgagcaagcagccaagacccagcttgcagggaatgccaagcaaatttggagagcacttaaactgagtctgtcacaccagatgacctctgtcatagggaaatgcagcagctgcagccaacaagggcaggacaactaaagaccccactcagggatgaagggtgggattaccccaacaagagaacaaacaatacagatcaaccaaaatgctgagtaaaagtgagggaaataggtgataaaggagggagattataaaagccttgagaccagctgtaacagcaggcattgcaatttatttcaataaccttcttgccttatgcacttgagcagattgcaattgaccaccactttgaaggagattctgtaaatgattaaacttgtaccttctctcaggggaaaagtgagacagctagtgctcacacacacagaaacacaaatcctacattataatattggagcttgatatgatgaaagtactagagtgaatctgagcagctcagagtgaactgtatcagactcttcttattgaacctcctcagatttgcttggttccatctgtctaccgggcactcagtcatttgctccacctcagtcactatccactccttgcaggtccaagcagttccactgcctgaggtcaagctgccacctcttgtaacccctggctcctcacataccacaaggcatgggggtctctctttctaagcgactgccgaaagggctggatgacacagccaggaagtctggggggagatgatcacctgtagaagatgagaaggagccaaacgcttttccttcctctctccaaagggctgctccaaggcgtggtttctttgcacagccccttaggagacaacccacacaggaaggcaagggcgcctgtgggctggcctgctgggtgtctccattgcagggcttagtaatgctcctcctttagttgcttcccagccttccctgactcatttccccattccctcattctcactgctctgggattaaactctcaaactcttagcacatatgcctgccttaggctctgttttttagggaacccaggcaaagacacatacatttggggtctgagatatcttggaatctacatttttaaattttgtatgaataataaatgtatatgtattttgatataaaagcatattttggatcatctggacaaccacattataattgagcatttccactctatttcagtgtttcccttttaactgcttaagattatgctagatataaagggtattcaattaggaaaagaggaagtcaaattgtccctgtttgcagatgacatgattgtatatctagaaaaccccattgtctcagcccaaaatctccttaagctgataagcaacttcagcaaagtctcaggatacaaaatcaatgtacaaaaatcacaagcattcttatacaccaacaacagacaaacagagagccaaatcatgagtgaactcccattcacaattgcttcaaagagaataaaatacctaggaatccaacttacaagggacgtgaaggacctcttcaaggagaactacaaaccactgctcaaggaaataaaagaggatacaaacaaatggaagaacatttcatgctcatggataggaagaatcaatatcgtgaaaatggccatactgcccaaggtaatttacagattcaatgccatctccatcaagctaccaatgcctttcttcacagaattggaaaaaactactttaaagttcatatggacaagatgaaattaatgcttatcaccatctgaagaccaaatgaatttatgaacgaagagatatttcaagtatttcaatacaagaaaatggggggccaatttgaggttccacctgaggtttggcaaattgaaagaatatacacagccactgacagcccataattcatgttcctagggacatttagtttcagcaaaataatttaatgatgttaattggaattttattgactggtaggagctatgcaatagagaaagcagaaatctgatgaggaacttggagtatgctttgcaaagtaagatatacattttatctttactctccattataaaatagtcaataatatctacatcacttgctaatgcttttggtacaaatggatgtggaatataattgaatattttcttgtttaaggggagcatgaagaggtgttgaggttatgtcaaggtaaacaaaaccaccattgtggtaaagaccaccatgagggataactgaatatatggcttacaaaatgtttactgaataagcagaacagtctggattttcctgggcaggagggggttgggggctttgggtgggttggtgtccatggcttggtaaacatttccaagaagtaaacaaacctatcagcggccaagctgcttgtcacctgtgagtgcttccaaggaaccggatgtgggctcccccacccttaccccagcatctggcacagctgaaggcagatggaaatatttacaagtacgcaatttgagactaagatattgttatcattctcctattgaagacaagagcaatagtaaaacacatcaggtcagggggttaaagacctgtgataaaccacttccgataagttggaaacgtgtgtctatattttcatatctgtatatatataatggtaaagaaagacaccttcgtaacccgcattttccaaagagagaaatcacagggagatgtacagcaatggggccatttaagagttctgtgttcatcttgattcttcaccttctagaaggggccctgagtaattcactcattcagctgaacaacaatggctatgaaggcattgtcgttgcaatcgaccccaatgtgccagaagatgaaacactcattcaacaaataaaggtaagttcatagtaattatccatacttttttaaaaatagcataatgttgtgatagagagaacatgagtgccctattccagctgcacgacactggcatgtatttttatgtctaagtctcagtttcttcatctgtaaaatggaaataataacaagttaaccattaggattcttgtgtcagataagataatgaatgcaatgcacataactcagagtgatatactgttggcaactgataaatgataaattgatatgtactgctgtggattatgtcactgaaaattatttagttctatagtaaggcagagtcagctacatttgacagatattgtgagatgcacagatcctttgcctgattttacccttggcacgagtcagactctccttttattctcctaataggaacccccttccctgtgatcctaaaaggagccccagatgcaaatctctgatataagaacaaccctgaccttctgatgggagaaaaccttgcattttatcagtcccaattcaagggatcctttcagagatttcttgctacctcttatgtagcagaagggaaaggaagaagacttcctgtcctggcaggggtatctataccattgaagaaggtcttgtacaacaacaaacagctaaaactaagagggaaatgctttataaaagaccgccctggaatctggctgtaacacatccagaggcagtgctgtactagtaacagtattagtctgtaaaatgggaataataataataaatatctcccttatcagattttgtgaggatcaaagtttaaaatgcatgcatataa

SEQ ID NO: 4137 - DNA, 6000 bp, Homo sapiens
agaccagcctggccaacatggtgaaaccccgtctccactaaagatacaaaaaattagctgggcgtgggggcgcgtgcctgtaatcatagctactcgggaggctgatgcaggagagtcgcttgaacccgagaggcggagattgcaccactgcacttcatcccgggtgacaatgcgagacttcgtctcaaaaaaaaagtatgatgatacaatatgcaagggagaaattacatctaactttgcaagtctggaagtggaatgtgagttaagctttgcattctattgaaacatcttagttcagggagaaagagataaagaaacaaaggccaagagtaaattaatttgccttagtcagttattagaagttaaaactaaaaaatacatttcgttaaagtagtgtacttcccactaaattatacgtcatgagtatgaattcaataggcagagtttgagagaaaaaggctgtgtatgatggctgtctttgggaatatttggtggaatggtgtggctgtggctgatcacccagtagttttatttgatggtaagttaggatgttccatcctgtgggggtcacattcacaaaaaaatgagtaagttgattcctgcctcaaaaggtttcagtctggctgggcgcggtggctcacgcctgtaatcccagcactttgggaggctgaggcaggcagatcatgaggtcaagagatcaagaccatcctggccaacatggtgaaaccccgtctctactaaaaatacaaaaattagctgtgcgtggtggcgtgcacctgtaatcccagctacttgggaggctgaggcaggagactggcttgatcccgggaggcagaggttgcagtgagccgagatgatgccaccgcactccagcctggcaacagagcaagactccatatcaaaaaaaaaaaaaaaaaaaggtttcagtctaacatgtacttaccagctagagttgcacagctaccacaaatttttgaatcatatctaaggcagagtccaagcacatgtattttttaatctctcctcctcccaacaattttcatctacacacctccagttgggatcactgataatagagctctatgaaggtaactgaagctgattttaatagtttccaaacagatttcatacttccaggttttcagacctttgcttgtggattctctaattcattcatcaaacatttcacttatacatcaagtatagtactactctgtatatgtgtcactagagataaaacagtcaacaggaaagacagggtacttccctttgggagtgggtaggagaatgccaaagaacaagaaattattaaagaaaactatggaacgtatctcagagaataaatattgatcaccactggagcacacagaaagactcttaatccaaacttgagggatagcgaagctttgttggaggaagtgatttctctactaagaacagaaagagagtaagtagaagacagccatttttgttgtagggtaggagaaagggaggaaaggatgagacgctgggaagcggcttgtaggtaatgaaaacaccatgctcaaaggtctggtgagggagaatacagtatgtgaaataagctaaacaagtgatgccaattctccacttgtacctttctgctctcctaatagaagtaaatgttggggaataagcctggatagacaaacaagtgcctccttaaggaacattgaggaagacagacttcaccttaaaaaacaataagcagccactgaagagttttaatcatgacagatttaaattttaggcagatcacttgatgcactgtagagattggaaatgaaataatgagatgggagactagttaaggaagctgttgtaattctaggcaaagatagtagcctgaatataaatactaactgtggaaacaaaattattaagtggactggcttagagatttttaaggctttaacgactaattgaattcagacagtgaaaggaaagaggatttaaaatgactatttttttttttttttttgagacagagtcctgctctgttacccagactggagtgcaatggtgcaatctcggctcagtgcaacctccgcctcctgggttcaagtgattctcctgcctcagcctcccgagtaggcatgcgccaccacgcccagctaatttttatatttttactagagacggggtttcaccgtgttggccagactagtcttgaactcctgacctcaggtgatttgcccacctcagcctcccaaagtgcactggaatgagccaccacaactggccaaaaatgactaatttttggcttgggcaattgggaagctgacaaaggcaaagccaaccatttagattctgaatacagccagggataattcaaacggtgaaccaagacgctgttatttctgaggagagagatgtttatggcctgagtgattaacaataagtggatggatttgagatacttaggaattaaaatcagtaagtttcagtaattccctggatatgatatatgtaaggaaaggagtcaaacatgacatccaaatttctagtttggattctgtgcacagtcactgtggtacgctgtttaattaattcctatcattattacatatggaattagttaattccataaatacctcctatcctggtatgcacactttgcaaagtgactctgtcattcctcccatgtagagatgaaatctatttctccatccctgaatgtgaactagtcttgtgacttgctttgagaaatatgtgatggaagtaatatatgtgatttccaaggcaaggctttagaaggcattgtagcttttgctcttttggagtgctgccctgagagtgccatgaaaagaagttggtctagccgactggaggatgagaggtcacacggaacagaaccaagtcctcgagctgacagcaccaactataaacagtggtaatcctggaacctttcggtttagctgacctactaggtcaacaaaaagcataaatgaggccaggggaaaaccaacataggtggagtagttctactccactgacccagaattatgagaaatcattgctgttttaagctactaggttttagggcggttacacagctatagacaactgacagtcaaagacagagggagatcaaaaaaagacaacctgaaatgttatctcgaatgacctaaagatgtgcaaaaacccttaaacagtagaaagtttagggagaggtgatccagtaattcctagcaccaaatgcctgaataacaagataattggaatgttaattacagaagttaagaatctaccttttggttaaagtagccaaagcaaacagccaggatgctttcaagctctttgagaaaggtaagtacaggtgttcatagaggactccggtgtagtcccttaacaccctcaaccttggataagtaaattaaaccaggtctccttattagagactacccgaagaattaagctaggataaaaaaacgtaaaagctttcagcactgtgcctaaaattttactattcacacagcagaacatggatatgagaagaaataagttaaaagtacacttttcccattcaaaggtcacccatctattctgccaatagagaaaaatgaaataaaaaacgctgccttaaagaagacaacgaacatcatttaaaaaactaacttcaaaaatgaattatactttggtatagataactccttttactccaacaacattgtttaaaagcacaaatcgcactcaagcgcagccagccgtatatgaatagcagaggagaacggaagttaagagactaacagaagtagtgaaaatgagagagcacgcgcgcgagagaggtaaacacaaactgttcgcctggaccaacgacttgaagacttgcctctaagagttggaagtctcgtcatgagtctcttgcatttctgtccatttaaaaacaacctccacttcttgccaagctttattattcccccctcccacctggtgtggtttacagattgtttttagcaagagccgtataagagaagctacgtacccaagacaatctgaaatcaagagaaaactgctgctagaaacccaaggcggggaaggagaaggatcaaccgagaaattaagccacgttgcattctggccgcagcagtcattaaggaagcgcagtcctccccacccttttcaaccaggaccgaatgttgcgtctttctcagctgcaatcactcctactctccctgtggcagctgcgaaggtgatctacactcaccgcttgaagcacagtcgccaacaacaaccgtagcccaaacgccggcaccagacacccactcggcccagccgccatcgctaccattttccgcaggtttctggctgcctagaaggacccctaagctaggggcgtccactccagagcctgatccaaaacagaacgctaacggccgttgcccttacatctctcatttggaagtgacaggtattaaataacggcatatgaaagcttaaaagtcatcaaatacaatcactgggtgctttcgattacccaaatcaggcacttgcctaaactccccacttctttacttctgcggtctcctttcttttattcacgacacttcgtcaagcagccaagaagccacgccttcgccagttttagccccgccttcttctccaagtttacccaattgaatgtcgtcttgattgagctctgtggcagaggaaaccaaccgtaaaccgaaccaagagcgaagcgcaggggctcttccgtccaataagcggacccgaacggggggaggggcggggcttctggttgccgagcagcgtacgcggatgcgtgcgcgtggtggcggagggggatgggcgggggcggggatgagggcggcgcagccgcagcgccggtggaggggcgcgcggccgcgagcaaaggagggagggaaggaaggaagagagggaggcgggcaagcaggcgggcgcgggggtcggggactgaggcagtagagggaggcgagagcccggcagccgcttcgcgctgtttgctgcgcgggcttttggagggggcggccgtttagtcggctgaggagaagcggacaccagcggcgttggtgatagcgcctgggggagggggactggagaggcgagaaggggggtcgctgcggtggttctctcgctgtcgctctctctttgcctcgctcccggctcggcgggctcctcccggcgtctctctcgcctccggggtcccgctccccgccccccgcggtatgtcttgatcccgagcagcgggtttcatggggctcctcaggattatgatgccgcccaagttgcagctgctggcggtggtggccttcgcggtggcgatgctcttcttggaaaaccagatccagaaactggaggagtcccgctcgaagctaggtgaggaactgaactgccccgggctgagtgctgtggaaggggccgaggaggcgctgccgccggagcaagtgggcgttcatctaacctggggtctggctcgggggctgaaagcggtttcaaagagaaccgggaacaaggggcagcgagagcacgagctccaagaatgggttgaattaagcttgagcggcgtgctgggctcgcgaggtcacggggcagaggttgcaaggttgggcttccctagccaaagggtagccccgaagtaggcattccgcggagagagagcgagagagaagaccgaactcagtggggagcgtgtgttgctggtctccggagacagaagcgcttagcatcgcgtgttctcttggaagtcgtacaggaagccctggcaatgtcagatgaggggtattctaatttgagctatgggcatctggatacgaattcttttgggggctcatgaagggataggtgcgcagaaatgggaggagatgctgggatgacggagagcaacatgtgaacactgtagcgagttgcactcttgtgctccgggcagcaaaggaccttgtaattgccagctgagggaggctggccgggtagtgcgggaacgcgagtgcaaagcttcatcggagtacggaaatgagggtc

SEQ ID NO: 4138 - DNA, 6000 bp, Homo sapiens
gatctctgttcagtgtgattctccctcagtcctgcaccaacctcaactcccctgtaggaggctgtgttctctatggttatgccttccccaccagagtacaatatatttaagaagaggaattactatatttatcttggtattctccctcacctctgtcaggtcctcagtgctttttttatgtgttgtaggcattcaatgtttacttaatagatataaattcaatgtttaatacatttatttctttaaagaaatagaagattttcattctcatatttttcaaacactgaatcgaaaaaaaactttagtattggataagattgtcttccatttatcataaaaattttctcaagactcagagaaaatcaaactcttatcaaggtggccacatggagcatagcttaatgttgatgacactcagagattttctttaaattttggttgtttttcagggaatcagcccagaagacacctgccaaacccaggagttaggtggttatttcatgtgggtcatggaattcaaccaccagaagaccaaattgtagtgattgtttcattttctattacttgtgactttgcttgtgtcactggatagaggaactggccacacttactgttcattctcatcccctttatcacctgagtgtaaagaccctattgagatgttgtagaaacagaatattttcatattggcttcttcaccagattctcagcttgccaaaaagagccaggaggctggactggttattttaagataaagtttagggccaataaggcaaaggtaaaggatgtagtccttctaaatcctgcttctgtttcaaaagtttaagttcccttctctccataatgcattttctgactacttccacccatgttattcaatcttcatttcctttgagcagaagatgcccttgattgttttccgtgttcaactaagttgtgggctgctggggtcagggaccaagttttatgcttctttggtatcacccatgatgtctagcacactgctaggcacaaaataagtgctgtgaaacaaaaatggaatctctggaccccaaactgactaagccaaaagaaaagctaagcttgggaactgagtcactaaaaaaactgctttctgttattggaaaaaactactttaaagttcatatggaaccaaaaaagagcccacattgccaagtcaatcctaagccaaaagaacaaagctggaagcatcatgctacctgacttcaaactatactacaaggctacagtaaccaaaacagcatggtactggtaccaaaacagagatatagatcaatggaacagaacagagccctcagaaataatgccacatatctacaaccatctgatctttgataaacctgacaaaaacaagaaaagaggggaaacgattccctatttaataaatggtgctgggaaaactggctagccatatgtagaaagctgaaactggatcccttccttgcaccttatacaaaaattaattcaagatggattaaagacttaaatgttagacctaaaaccacaaaaaccctagaagaaaagctaggcaataccactcaggacataggcatgggcaaggacttcatgtctaaaacaccaaaagcaatggcaacaaaagccaaaattgacaaatgggatctaattaaactaaagagcttctgcacagcaaaagaaactaccatcagagtgaacaggcaacctacagattggcagaaaatttttgcaatctactcatctgacaaagggctaatatccagaatctacaatgaactcaaatttacaagaaaaaaacaaacaaccccatcaaaaagtgggtaaaggacatgaacagacacttctcaaaagaagacatttatgcagccaaaagacacatgaaaaaatgctcatcatcactggccatgagagaaatgcaaatcaaaaccacaatgagataccatctcacaccagttagaatggcgatcattaaaaagtcaggaaacaacaagtgctggagaggatgtggagaaacaggaacacttatacactgttggtgggactgtaaactagttcaaccattgtggaagtcagtgtggcgattcctcagggatctagaactagaaataccatttgacccagccatcccattactgggtatatacccaaaggattataaatcatgccgctataaagacacatgcacacgtatgtttattgcagcactattcacaatagcaaagacttggaaccaacccaaatgtccaacaatgtggcacatatacacgatggaatactatgcagccataaaaaggatgagttcatgtcctttgtagggacatggatgaagctggaaaccatcactctcagcaaactatagcaaggacaaaaaaccaaacaccgcatgttctcactcataggtgggacttgaacaatgagaacacacagacacaggaaagggaacatcgcacaccacggcctgttgtggggtggggggagggggaagagatagcatttggagatatatctaatgttaaatgacgagttactgggtgcagcacaccaacatggcacatgtatacataaataactaacctgcacgttgtgcacatgtaccctaaaacttaaagtataataaaataaaaaataaaaaaattttaaaaacctgccttctgttgttaccaggtagctgcaacaatagaaggccacatatctccccagatagcctccctcacaaattgcttacagtgaaatgccttgtgggtccctaaatctttcagaatgcatatccctcctataaatgagccctaaaacacagttctgttgaatctcactctgacaataacagctcatcttcatatgtatggtataaggacaagacttggaaatcatccctctgcccaccccaagacaaattcataattgactttccccctattttcacatttatcttatgtaaaatgtagatttactgagcatgagaggaacacataatcagtattcctctacccactcttcacacgcaaaatgtgaattcactgggcactaatcaaagcctcacaagaatgtaacttcttccctcattgcctaccttcccatttcccttttttttctttcttttctccttcccctcctgctggctctttcccctttaaatactgaagtcctcaaaaactctctttgcaaaaggcacagatcacagatgttcctgtatttgtgctttctcctggggaatgtccttaaccttggcaaaataaacctctaaaacgattgagacctgcctgtcatttttttggtgcttaaaatccatgatggaatttttaatcactattttagacttgggtaaatctggctgtgaaagtagtgacagagtcttttagaattttcttctaccaaaaataattaatcagaaagtccctgagagaatttcagatactcctgtaaggatcaaacctaaatttaaattagacttgtagatctgtgcatacccagtgtctcacacatataaactcaataaaaatttatcgaatgaccaagtgaagaaatgttctttcagcttttccttcaagactcagaaaaaagatatctgcagttccagaatggactgagtgaacaagaaaagaacagatcagtgacacaaagacagccttctttttccctttcagggtgactcaaattgtagtcctcatctgaacagtctgagacacaactcttgtctcatattaactcgatagggcatttgctatactcccatttacacaaactgctcagatgccccaaatgctgagtctgttcgtcttcattttattcctttgggagatgccggtacaaacttgttttttctttctttttttaaatggagatgtgaccaccatagcaactaaaagacataaatcttgcctaattgaatcagtgtgctcaagataatagccagggcagagactgagttaaaactggggtaagggtgagagtggggaaatggatgaggatgataaaaatatttatgtccctagaatttgtgggtttggattaattctgtttcgtaaggaatattgttggccttcaaatgcagtgccacttgggagagaagcaagcgggcagtagttgaggtgtctctgcagttgaatcgcagtgaaaggcaggttatgagtatagggaccgcccctcggccatgtggtcccctccctatcctgaggataacgacatttgagagaagccaatggtattggaaggccagaatcgaacttaagccgcttagttggtacaactgtaaaccctccctcacagaggctgggccctgcaatctttctaagcagggtaaagaaaagtaaggggacttccttttcgaagaggaggttcccgcgtgctgcacccgacctttccctcagggcccaacacgcgttatataaatgccaagttactcagggacgcacacgtgagaaggctggggcccgacacacgcggtgtagtgccgaagtcaccggtgtggcgcgcctgggggacacgccgaagcccatttccctcccgcttctggaaagcagtccccgctctttccagctgctccgcggggcgtatggctgtgcgctacctcctgcggaccccaggctgggcgagggggcagcgatggccacatggcgcgctcggggagatggcagctgcgctttgtttccagcagtgataggtgagtcactggctcccgcagccccagagctgggcaaacactcaggcccaggcagctgaaaaattcacagcaggagcagctaccgaagcgactgcagcctcttcctcctcttcctcctcctcctcctcctccgccactgctaccgccaccaccgtggtagccgcctccgcgccctgcctccgccccgtcccctcctcctccacccgcgaacttagtcagcggttcgcgccgccgagcgcccattggccagcggaacgcgtcgcgtcacaatggagccggtcggaggcggcgagccggacagcgccggggcttcccgctgagcccgcagcctccggcagccgggaaagtgcgggcgcggggccgcagcctgcccgcccggagcggcccaggagcacgccgcggggagcgcgggcgtccggggctggagtcgcgcaggtaggtcggagcgtgacaccccggttccaggagggcgagccgcgccgaccgaggtggtggaggaggaggaccggatacggggacgcagcaggtggggctggccgaacaggtgcggttacctgttcacgcctcacctgcgagccaggctgcgggccggtagcgcggctgcagagacgagtggccgcttcgttgtgctccctgccttcgggagagacggagtcccacgctgagaggacctctcctgtgtgctggggtcatttggagcaagaggtgtgggcggtcgcgccgagacggtcacctctctttcccccgggagtctcggcgttgcacctgagcgtgagtcctcggggcggggcgggaaaggggttccgctttcccaggctggcgtctcgctccagatgagcgcaactcccctgagggtgcccccatttggtcgctctgttttgccccctgcgctggcgctgttgggaactattttatgctcttgggaactattttatgctgttggatacgcgttggttgcctataatttggtggtggtgttgggcgttgatttgtttgagaaagaaagggcaagcgttaccaatttaagaagaagactcaagagtttcccctgagcttagttgagcaggtgctgagaggtcagaagggaggaggctcagtattggctcattaatctgtgtgctcaactgacttcctaaagtccatagattgcctttagttagatgacatttgtggaaaactttttttttctttgtggtcaaaaagacacccctctaaaagaacaaaaccgacatgtgaacttccttgaataaattcacttcgcctaaagacttcaaacaaacaaacaaaaaaacactccactggtaaaagataacagtatgaacattttaaattgtagatatata

SEQ ID NO: 4139 - DNA, 6000 bp, Homo sapiens
tctaacaaaggcaaattaacaagagaaaagcataacaaatttatttgatcgtagttttgtgtgacacaggagccttcagaatgaagaccccaagatataggggcaactattcctttattattatttttatttttgatttagggtctcactctgtagatcaggctggagtgcaatgtcctgatcatagctcactgtaacctgtaacttctgggcccaagtgatgttgcacctcggcctcccagaatgctggggttataggtatgagccaccttctcttggcccatttttatgcttgggttcaatgaagtatggaaagctgtgtagaaatatgattggacaaaaggggtatgatccagcaaggggaatggggaaatccagcaaggcctgtctgttcagatttcttcttggcctttcgatataacattccttcctcccaggtatggggtaggaccccctggaatgagggtcttaatttctttatggccagcagttagcaagaaagagaaagggaagggagggagaagattagagtaaaatgtttaggctctaaggctggttttggggaaaaggttctggtttatatgacccacctcagggaagaaggattccagtttctatggcttgcttcaagggagaataagagagtgagagacaggagggcaggagaaagctagacagagactttgcttctgaggctgctttttattccttcattttggggtatcatttttagccccaatagaccaccatctcctctggtacaaattcaactgccattttgggatcaagtccacatttgacattacctctcaggcaactttctgggcaaaagaattttctagggaaggttttatttttccctgtctagcatttttaatggcacagagtcaaggatttcaaaactgttgctaaaggtagcatttatcttgcaggtattaattcagaaagtgctaatggttgcaacagtctaaacaactgaaacttaaaacaacaacgttttcttttagctcagcctcttcccacaaagctcagaaatggtatggggagcagatgtgcacagggtggatagagaatgcagcgtaaaatcctgctggtggttttggtttagaatgtagattttacttgcactcttaccaggtaggatcaactgaaatcaaatgcaaaacaaaacaagaatagcaggttgatctgaaagaacaatcccagcattgacatcatcaaggtttaagcagatacatatacataatacataaatttagtatgaattatttatgagctaaagggttcaggttttagagcctgtagtataataagagttatactgaaagtcagaaccaatacaagaaactgaaacacttaaaaactcattatttcaatatttaatatcaggtcctgtgcagggtattgataatggacataaaagtgaatcaagatacagccctgccctggagaggctcccagactctgtagtgaagaggcatgtaaagagacaaatgagagcatgccatggtaagtgctgtggtcacacaaggaaggaagagttatacttgcctagaacctgtggaggcttcatagagaaggtgacttttaaattatgccttcaggccaggcgtggtggctcatgcctataatcccagcactttgggaggccaaggcgggtggatcacctgaggtcaggagtttgagaccagcctggccaacatggtgaaaacccatctctactaaaaaaaataaataaatacaaaaattagctgggcgtggtggcgggcacctgtaatcccagctagtcaggaggatgaggcaaggagaattgcttgaacctggaaggcggaagttgcagtcagcgagatcacacagcatgagactctgtctcagaaaaaattaattaattacgccttcaaggaacaactcagcccagcctgagttttcttacagctaacaacaaaacaacaatgtgacacaattgctgttaccatacaacccactagaggggttacagatattctaagtctcaccacaaccctaaaaggtagttatattccaatagactgatgaggaaactgaagttcatagctagagatacaagatttaagcccagacctatttcattccaaatcccttaccatagccctgcatagcccagaaatatctacttctgcttctatcaccaacctgtacatggttaacttgtaattacacagtctttagtgtgagaactactaactctggaagtccaattagaatgtcaaaatttagcctaaagaattgggtataaagtgaaaggtcaagacagagtctgtgcacccagttcatctagctcacagtaccctctccttcctggagatgtgctgaacttcaagcacatttgcttcaaaatggtttattctggtttgtgtgtatgcatgattcccatgaactatgaacaccctgaagtcggagaataagccttgtacttctttaagaccctcactcaagttgactgattgctaattctaccagtcctttacagagagcttgctaagtgtggatgttaatgtgaattaggtggactgaggtaagatcactagatttaaggtttacatgctacaaaataagaagaggtgaactaaccagtgtagcatagtttttagactagtggctttcaagcattaatgtgcatgtgaatcacctgcctacacgtgaagaactacccagttgatccaattagaaggcagacacaagagtagccaaaagtattgcaataaagcaacttggggtggactcaacttgcaggggattcagatcccaggtttccaaacctttttgctattcctggttcttttgctttcagtgaagagtagttaagtacaatagtagctctcatttactgactacttacaaagtgattggcactgttcttggtgctttgagcatattagctaattctcacagcaccctgtagtactatacctatagggatgataaggggatgtgggtggtggggagggggcagataaaaagaacagtaaatttcctaagtttaaactggaagaatagggatttcatcctggttcacctgagtacaaagtctaaggttcaatgattccttgacactgggtagcaagggagcatttcagggatgcctaagcttgtggtcaggtgccaacggtacaaagatagaagtatatcagagagcccttgcagaataaggccctccacaggagggttgtgaccttggtacttgcctcactgtgtttaaattcaggtaaggtaagagaattgaagaggtaaagctaccttagagagtattgctgcatctaccctggtgacttacaaggtacttgaatttttttttttctagcaaactgctaaagttagcctttgcctttttcccagagactctctaggaatttttcccatctgctgactaggaggtaagcccggacctaaatttttgtcttgttgtaggttaattaagactggtgttagattcagctcctaaggcctaagagaatttaaggttgtcttctgggaaggacacccaacagcagcattggaattggaaaaaaagtgtaggattttgctgagtgagcagggggaaagcaatgtaaagcccaagagaatatcttttgaacaaacgtccttttcattttggtttagaaatagaaacgtggtaaaaggaggcgactgttttctgaaggcttgtagcacgaaaacaggccaactggccagcaactagttgtctatcagtttctctactcacatacatctgccttttccagactgccagcgcggagcactagtttgactttgggtgctcttcaaatagctggcattgataaggcattcccagaagactgtgttacttagtaatcttgtcggtacattttttcactgggcagagattttccaaacagagagctgccagctttcaagacgtcagagtgctttttcatcctgaaattgggtgggaaaatggggagaagaaaagcacggttcagatcaatcaatgagagagaacccctccctccatactcgttaaacaacaggtggttttgctgtgcaccgtcaactcctttatgcgggagctgtaggcggggcattccaactgagtctccctggaatctgccccttagcccgtattgcaggggcggtgcagttggggattccggcctgaaaggagacttggttgtcaaggggctcaagggcttcatgatccaaggatattgggttttgcttttctccttctccatcttcctcattctatcccaccgtcccctccccacccttctcttaggaggccttcgcttctcctgtggaggggttatcttcatcctgaccctggccttcggaggagttcccagaagggctatttttagtggtggctgctcccctctaacttacccaggggaggagctgcggtggctgagccgacgctgcgcgcacagccgcctgtggttttccgcgcattgtgagggatgaggggtggaggtggtattagacgcagccgaatcctccctcagagtccgccaggtgggcgtctcaggggtgggagtggccgcgtcgtgaagcggagagaggatttctctcctggtcctggagaaggcccccggcggccggcggcatccctcgctggcgagtcccgggagcgaggtggtctctgcaggggaggaagttcccgggcggcgcggcctgcgtcacagcggggctggcaccgcggagtcgactcggcgggcggtggcgaccccggggccgggcgctgggcggcgctggctgccgctagccgggctgcgtgcggggcggcgctggaggcggctccgtccgcggccggggaggcggaggggaggagggcttgcggggctggggcgttagctgcgtcccggctggaagcccgcgaagagaagtaggaggaaggcgccgccgtggccgcggccgcagtgctcgggcgcgacaagccatgagcagcgaccccgcgggcgacgccgccgtccctggcagccgctgagcccgacccccaggcagctcgccgctccctagcaccttctccagtcgacactctcgcgcccggaggtaagggcgggggatccgcggagggatggagaggggcagcccgcagagggccacccgctcggtccgctgtgcgcgccggaccgggactcgccccgcctcactcgcgtccttgcttccccccggctctcagacaggcagaatgtggttgcccgcccggcgtgtggtgctgggaaccttccgctactgcggctcaggagcccgccaacccctaccccacccaatccgcgctagcccgagcggccgcgcgaggatctcagcctggcgcccaacgccgcgccgcagcggcaggtcctgcagactgggcgcgggggtgggggggcggtccgcgaggggaaatgcgtccgtggccggggcgatcgttgttctttcctacctcgaaaatctctgagaccccggggccagtcctttccggtctatcacccccctgccacctccgaacccttgaagttagcacttttgggcagggaaaggaattggaaggtttctcgaagaaacgtgagagcaccgtgtgctcacctgcaggacaggagggaaggggttcagcttgatcgggcgggccccagaagccaggtgtttaggccagcggttgaggccaaaaccgctgccttcatcccacgcctaggctcgctgatctttccctttccagctggttcccaccaatgagatgattagggatggagttagcaactcaggagccttagatgtgttctgtggacacgaatgcctttcttttctccctcagccggttcttccctccccaacccccacgcctgcccggtatacagcaaagtccaaacagtttcttccaaacctcgcatcctccgtagttttgcaacagccggacacctagcccgcatcctaatgcggatatttcagagtattacggctaaacttcccttggtttcaaattccttaaacatgttaaagcctcagcaaacgttaggaaacatt

SEQ ID NO: 4140 - DNA, 6000 bp, Homo sapiens
gtgacagggcaagaacctgtctcggaaaacaaacaaacaacaaacaaacaaacaaaaaacaacccgcaagagtttaaataagtctgagaagtgaaatgggtttaacccatataaagaaagtttgaaatgggtctaacccatataaagaatagaaagaacattaaagtagtaggtagcgcaggggaggaaagaaaatgagaaaacatttgttttaccatttacttaggctgaactcctaccatgtaattttaaagcatcatatgtattgagttcctgtcttttaaaaataaagtgctctagatattgcatattatgttagttatgttattaagagacacactagattgagaaatttgatcacacttataatatgtggttgtacttaggtaacatttactgagcgatgcctattaagcagttggctaagccctttccacatattatgtcatttaactctttccctcataatcaactgaggtatgtattagtattcccatttcagagatgaggaaactgagagaggtgagagagaggctcaaataatttgaaactcttcagcattactaccactttcaagcaaatatactgtacatttatttgtgtatgactatgcaggtatatccatatttagcccaccagggctatttttcattttccaacgaattcatcatgacattactcataagccacctcagtgcatttgagatcaatttataaagtttgattgctgcaaaatttttcaaaaacatgtttacagattattgaaacccatattgcctaccatatgttaggcactctgctaggtgataaaatggaagaatgcaaaatcactcctccaaggagctcagattcttcttttgtaggaaagtcaattattcattccctcattcaaaagtattattgagtgtcttggagcatgctatagtttaggtaagaacaaatcaagttagaatcatcatacttggtaagaggagatgcacaaataatgccctttatcttacatggtccttttaggcagtactgtgattaagtgcttggacctctagagccaggccacctgacctaaaaaggtagctctgtcagttaaaggctatgtggtattgagctagtcacagagcctctttaaagccttctgtttcccatctattagatgaggatagtatctcatagggctgctgtgaagacttaaggtatgtgtaaagtatttggaagaggacctacgtaagtattagttgttattgttgatacagatttaccatgtgctgaaacagttgccaattctcataacaagtagcaaaggatagtaagtgctctattttttgttgaatagaacttcctagaagccatgtgtttctctgtagatatgtctagagtagcctcagattccttttccatcatatttcttaattctgaacccaacatcaaatcagttattgtcctttgctgcctccgttctgtttttttgtggaaaaggggaaactgatgggctgatttttttgtttctgtttttacatcatagataatcagagttatttttcattacttatcattggtagacttcttactagtttgatccatgctatagtctgaatattgcgtcccccgcccctccattttatatgttgaaatcctaacccctaaactgatggtattaggaggtcattcctttgggaggcgattaggtcatgatggcagagccttcatgaatgggattagtggccttaaaaaggaggcctgagagagaccctcactccttccactatatgaagacacagcaagaagtcaccctctctgaactagaaagaagacacacacacacacagacgtggaatctgctgttgccttgaacttcctagcccccagactataggaaataaaaatttttttttttttttttttgagacagagcctcactctgtcacccaggctggagtgcactggcatgatcttggctgattgcaacctccacctcctgggttcaagtgattctcctgcctcagcctcccgagtagctgggattacaggtgcctgccaccactcatagctaatttttttatttttagtagagacagggttccaccatgttggccaggctggtctcgaactcctgacctcaggtgatcctccagcctaggtctcccaaagtgctgggattacaggcataagccaccatgcccagccaatttctgttgcttataagccacccagcttatggtattttgttataatagcctgaatatactctaaaacaatcctttaaatttttaaaattattattctgattatcagagtaatatgtgctcaatataaaaacaattcaaacatacagaacttgatgaaaggccctagtaatcccacacccagagataatcaccattaacagcttgttatatatgcttccagacttcttctgaagcatacatttaataacatgtatatcttaatgcaaaaaagtacaaaaaaatggaatcatactattcatattgttctgcagcctccttttttttcacttatagattttggacatccttccatgtaggtacaaatagatctagcttatttttgttaatggctgcttatggtttccttctacagatctagcaaaatttgcttaaacagtttcctactgggactttattatttgatttttacaccattacatgttcccactattacaaacaatgttgcaataagacacgtatatatatatttttgtacatgtgtaaatatttctgacataatttttgcacaaatatgcttaaagcacaaactcttagacatggacttacctattcaaagggaacacacctatttatcaaaaatttccaaattgtcctccaaaggggtttgtccaatttcctcttacttttacagtgtgtgagtgtctatttctccacatttgactgttttctgaatatcacttttttcttttctcgatttataccaatcttaaaatcatgtttttcaagtctagaatcacaatttaaaacccagggaagatcaaaagaacaaagtacagaagattggtttttttggttttttggttttgagatggagtctcactctgtcgcccaggctggagtgtggtggcaccatctcagctcactgcaacctccgcctcccaggttcaagcgattctcctgcctcaggctcctgagtagcttggattacaggtgcgtgccaacatgcccagataatttttgtgtctttagtagagacgggttttcaccatgttggtcaggctggtctctaactcctgacctcgtgatcctcttgcctcggcctcccaaggtaccgggactacaggcgtgagccactgcacccggcctataatttttttttttttttacaaacagcaaaacattccatattcattataatagtgggctgttttcaataaaaatatcacaccactagttgttaagttttaaaagacctctcatctcttagatcagcaaatctgacactgattagatcacttacacacactccctgcccatacacctccttcttggcagtgtgtggaacaggagtggctgctggcaaggagggtcggggaaggaaagtgagagcaaaagggccgagggctcagaatctggtggcatcttgtaacgggtctcgggcagtcccttgagtgtattctggacctctctgttcatgttcctgtttgggctgctcttcttcacgtccaatgcctgagggccaagtgctcaccatccaagggtcaattctatcagctcctctctgaatccttttctgaaaccctggacaatcattctctttaatgtctcactgtctctgaaccgacaccttcctgagtacctgtaacatttgtgcagcatgcttattaagaatatttagatgctgggtaaacgttgattgaacatttgctgacatggagagatattggtagaagacagattagacttccgatggtttacagaaacacatggattcagataaaagaagatatgaaagcactgggttgaaccacatattttattacaaccaaataactccaaatatcccgccttaatttatttattggcccctgcctctgctcacccacaaaaaagactgcaaatgaaccccgatcctacaacaacaacaacaaaaaacggtgacattatcgggctgcaaaaccctcttagcatagaataatcttttcatctgcctctttcagatgtaacatatttttgacgaaaagaatgggatgaaaacggcgggctcagataaaaacaagaaccgactttccaatacagcttcaataacagacggaacacatgaagctgagaaactctccatgccaagtagtagttgtgtgtgccccaaagctcagataagtacttctccttagagttggaaggcacttaagtgactttttaacgtaattcaactccccacccccagcgccaagtcttaatatcagagttttagtcgacgggacagcctccttcgcccaggacgggtgaaggctcctgaccatgcctcgcagctaactggcagctgcgcctgcccggcaccgagccctgcccaggtggacgcttgcgagagcattacggcgatggttatgtaggctgccgttcttcccctcccaagcacctgctccgcatctagcagtcgctcgccgccagtctccaaccccgggtcccctccctcgccacacagaccccgtccggtcaggcgctgcagggccaccggagaaagcgctcgcaatcacatggaggcccgggcccgccccattggctgcggccgggccagtcgcggcactcgccggctgcggttggtcccagagctgcagcgcctgcacgggcccggagtccatgttacgctttgtctaattcccctcgttacagagtcatgtgctgctgctcccgtcgccgctgctgccgctgccgctgccgccgcccgtggtgccccggctcctccgccgcgcttcgaggtggcagccgcgggcggggccgcgggagcagggtccagggtgcagcgcgccttcgccgccccggcgcgtcccggtgcagccgccgcccgccgcgggtgatgccgccacctccggcctcagcataagccgtggcttggcggccgagctgcaccccaaggttggtgcgcacctctcccggcaggggccgggggctgcgagggaaggcgacgcgcaggtggagccgcgccgagccggagcgcgcaaccctggcgcaggcgccgcggcccgagctgcggttgcggccgggaactcattcggggacgtccgggggtcgggaggaggtggcggcgagcggagtgggctcccgtttgctgccgccagggcctgggagattgttccgctttctgcagtctgagcgtcggccgcttcggccccgggcggccggccctgcgggaggggagtgcggcttcctggctcctgaacccctcgcgcgcgctcccttctctcacctccctccgccctatcggaaaggcggggagagccggtttcggctctgctggttcctcccggaggtgggtgtttggtgtctggccttgctggcccggcgtccaaaggtgagccctttaacttctccagaatcgcctcccctccgcttccttcctgtgcagggtgggctgcgctgggagcccggcgggcgggggcggggaggtgaaggcccgcgccccgccccccgcgcctgtgggagggagctgggggcccgcaggtgcacccagccgtccgcgggccgtctccgggttgggtaccggtataatccgcttctagcttgtttggaggcgtgggctcttgggagcgggacttctgctcaaatcctgtccaggggcttgaaaaggaggagaattgggggtggttgccgggaggaccagcacctccagttactggagggttgataggggccttctcctttccgtcaccctttactagggggtatcccttgcagataaatgagattttttgatttcttaaaaagccagctgcagtgaagaagaactgctgcaggtcgaggggaagagaggtaggtc

SEQ ID NO: 4141 - DNA, 6000 bp, Homo sapiens
actatctgagtccatcagaaagtctagtagtggtgaacctcaaaaaggaagaggttgagatctcaatctctttcctcccaggaggctctcctatgcaaacttccccaatgccagcttgggctaactagggctatttgaagaaacagccttgtcaggatgtcctttccttggtgcagttgggtacctattctccttccatttctaattggtaagaggggcttttcaagtgactcttttctgagcaaagatgatttgttctcagtgacttgaggtgtttacctttccagagaaatgattggcaggtctctaaaaaaaatttaagatctgcctccccagacaccctactacatattaatagaattatatatgaaacagtagtagtacaaagaagataataattaacttggcaatggggtgaaggggttaggggggactggtcacagatgactgttcagagtaggagaccatgaacgcttcgttttaaaggataaactgagttgaacgtgaggatgttagggtaggaagggattcaggtagaaggaataggatattcaagggaagactacagaagtgaatagcaggcatctatctcctggggtaggggtagaatatatctgtaggaggggagaagtgccaagataggagttagagaggtaggcagagcttatatcatcactgggtttgtgtgagatgctaaggctattgcagtttatcttggtgatgagaaactagtaaggaatttgtttgcatctcattacctttcctgatgagcatgtaccacttctgtgtctccgaccttgggtaaatagtatcaccctcttagacactcagcaaggcaatatcagaatcaatgtaaaaattttcttcctatgaattaattatttcacctatttccattttatgtgaatccacaaagtcattttcttcctatttgatctgtgctgccctgactcacatggtcactaccttttacctagactatttcatgtgttcaaactggtccctctgcttgatggttcctccttcagcccactctacacactgccactagcatgatctttcttaaataaatcctgaggtcactactctttccccagacctgcaatacacctttctacatgcagaataaaaatcctacccggttggattggtgtttcagaccctccacaaattgacttcagttaaacattgcaaacttttctctcatttcacatgcctccctcagcctccatccacatcagacttaatcaccttcctcaatctgcttcggtctctgcatctttgctcctgttgtatcttcttcggaatcctcttttttccatctgtttttcaaggtcacagtgtctgcataataaattacccccaaatttagtgacttaatacaataaacacattaccttccacagtttctacgagtcaggaatttagcagcatcttggctgagctgtctggtttgagattactcatgaggttgcagtcacctgaaggcttgactgaggatggaggatctgcttccaagatggcccactcccatggctagcaagctggtctggctcctggtgggaggcctcagttcctctccagggcactttgagtgctctctgtggcagctggcttccccaagagcaagcaatccaagacaccaaggcagaagccacagtgccttttataatctggcctttgaagtcacatagcatcaccttcattatactcttttggtcacaaaactcagctctgatgtgagggaaattccatgagggcataaatattaggacaccatgatcaccagggacaatcttggagtctggctaacacaacatttcttccagaggctttctagattcactaacttcctatgccctgcctacctgttctcagtagctcaaattctttaaaaatcagagctcttggagatctcccccataaaatcacattttctgtttttctttattatttaatattatgaagtgtgaacttgcaaaattgcattgttaattatcaaaggacatagtgctgaggaattttgttctctaaaatcctagactgttagaaagtttgttgttctgagattctatcagtgagaacagaacatccctttcttgcctggcagatttgaactctttgagtcacttagagttacagaagcagtctccatttccagtgcagaagttcagataagggattttcagacacaatattctacattaatcttaaatgtatgtttctaagaactagaatcttgaatctgcttctcagcccaggtttgatattacatacagatctgatttgctttaggcctatcaagcactgctttatttagattttacctaaactcctctctttctctaaatactataatgactccttatttcttccttttttttgagacatggccacaattcctctgctgtatagtatcttttgctgtagcaaattaataaacttaatgggttccagatttggtcctggtgatttttgtcagatgggctttatcaatagctaaaattatttgagctcgaataactagtgtaattttttagaatctcccatgcttcttgaacaagggtaacttttagaatgttttgtcaatagatcatttctatctttcctctgactgttttgaaatctattttctagactgtttttgactaatcttgcttgtacttccttcactgttacaaactctaagatgataccgttactttctcacaaggttcccaactcttttctagcactttattactgaattagtaatttcctgttttgtcctcctgagtgactcctgcggtcctttagaatttagctacagaatcacctttgtcaagccttaagcctttattgaaagcattagacaaaactaaatattttcatgtttgtgttctcatagcaccttgttcatatctctaatatagtacttaccacatttatacttgattttttttacacgtttttcttctctaacagcctctggagaatatgatctccatgatctgttcatccttgtgttatctgtgccaggcatacttaattacgtaaattatgtgaggtcgttggggctcacaacacaatactccaaaatgaaggtctcagtagcaaaagttctctgccctactctggccctcctgtctctcagtcccgtatttccctaggctagccatagatattaggatccctattcctcaagacaagatgtagaaaccagaacctctatcccctaaagccagccataaaagcctaaacatattttgctagttttccctccccctttttctgtaaaatctggccataaagaaattatctgacctgccttgtttgactgtaggctgttaagagctccattccattcctgccctatacccagaaggaaggaatggtgctcagaaggccaagaagaatctagacaggccttgctgggtgtccccactcagtctgttagcattagattataccatttttgtccaatcacatttctacatagctgtccatactttgttgaacctaaacacaaaaatggacaattttccaagtatctttgggtctccattctgaacgctcccatgtatacacattaaatttgtatgccttttctcctattaattttttcttctattaatctgccttatgtcagcggttttcagttaactttcagagggccaaaaccttttgtccctccaggtaatgaaaatgtccacatgacaaatagtgaattagtaggagcttcagttctgcataatttagaattcactgttgagcacctctatacgcatgccattattgtacctcgtctttgtgatcctcataacctgtattaggcaacagctcatttatattgagaaaacacctagggcacagcaccactactttgtaggctactttaatatgtatgtgcattatgcgaggttttatgagcttattttctgacacacttgcttttctccagtttcctcagctgaaaacagcgattcactgttactgtatatatgctaggctcaatgctggcgataacaattcctgcaacatagggtcagacaggagaagaatgttgtaatctgcaaagcccttctgattctgggagtgaggccagcattaatacaacgcacgattgttacttctgaatgtccctttgcaaagaacagtgtttctcaaacttttttctgaccagatctgcatacattttacatcgccgctggcgatacatacgtgcaaaacactgaaatcgaaatttctctaaacaactcctttactacgtgatgtactgtgaaacttttctattttgttctattctcaattttattaaaaacggagggtgatgatcccgatctaccaaaccaatttcacaatgcgctagagattataacccgcggtttggaaaatactggcttggaaaaagctctttgatctgtgtcattctcctcacatctccctacacctctgcggagttccgattgtttggtttcgtcctgataatcactgtgctgtgttttccctacacgctctgtgacggggccgtccgcctccttcctgggctcctttaagagggtggtaacggtacatcaccgcgggagtggagaggcagggcccactaggtcgtcgctgcaggccaggcccgctcatccagttattgtgaaagccggggtgtgcgcgcgaagagtgggagggtaggggtgaggcaggggcagcactgacgcctcgcagggctgagtagcaacagctcctccgcgccgcgtttccggagaccctgaaggagtccgcgcgtgcgcagagcgcgtcccgggaactgttccgcccacggaggctgccgagcgcgctcccgccgggccaaagtacaaagtgggctccagagcgcgggcggcgcggcggcgcgagccagggggcggtcctgcgcggccggccccgccctctgctctcctcccagtctcccccgcgctgcgtgcagtaaggtagccgccgccgccgccgccgccgcgtcccctcgccggctcgctggtaccggcagtgccatggcggccttcagcaagtacttgacggcgcgaaactcctcgctggctggtgccgcgttcctgctgctctgcctgctccacaagcggcgccgcgccctcggcctgcacgggtaagaaggcccgtagccgtgcagctttcccgggctggagcgggcgctccccgcgcgctctctctccccacccggccgacaggtctctttgcccgacggggtcgggcggagagagggccgaccgcgactgccgtgggacttcaatgtcagggtgtccgcgagtccccgccacgacggcgtcggtcccagctggcctgtccggcgacctcgctccaccccgggagtgcgaattcttctgtgcccgcgggcgaaccggcgcccagccagcactcaggcagcggcctccagttgggggtgggagggggatgcggtgtgtcccccacccccttccctacatcacccccttctgtgtcaactttctgggtgtgttctggttttgccatctcatcttcagaccgtgaaggatttgttttggggacgtggatgtgtgattgaggatggggattggattcgccaggctggaggctggtgtctaagtcacttggacgaggtttggctcgattcccgactaactgctattgaaagtcgcgagggtggcttctatgaaactattcccggtccacttggcaggattgccgtctaaagtggtgagcccttggagtcggtgaaccctttggtcggtgaacatttggtcggtggcatttcatccggaaaggctggatcggttctgtcggacttagagggaaatgttttccttcctgggctctgtaggtgaaagatgagagtgtggtttaggtgaggatcaagctcctttttaatgacacgccactgcttccaccgcgggagaatttcagtgcttagatttaactttgggaggttatcagttcagaaaaagtaaaaaagagagagctgaattacggttgcgacatacaggtatgtatgtcacatac

SEQ ID NO: 4142 - DNA, 6000 bp, Homo sapiens
ccttccaccatgaatgtaagtttcctgaggcctcccaagaagcagaagccactaaacttcctgtatagcatgcagaactgtgagccaattaaaactcttttctttataaattacccagtctcgggtatttctttatagtaatgcaagaatgaactaatacatctgctgtattatttattgtatgtgaaaaattaccacatatgtagtgacttaaaacaacatgcatttattatcttatagtttctgttggtcaggagtctgggcacaatctaactgggttctctttcttttgtaatgtcatgtaatcatgggaatgactttccatcacatttaccgtgtatttttggtgtattaggggtcttcagagaagcagaaccaataggatggatggatggatgattgatagataagatagacagactgatagatattataaagagatttattataatgaattgactctcatgggattatggaggctggcaaatccaaaatctgcaaaaccagtgttctaatttaagtccaaaggctagaagctgctgtagaacaaggaaatgtcaatgttccagttcaagtccaaagaccactaggatgctgtagacggacagccaatatcccagttctaaggccatcaggcaggaaaatcctcttactaggtgggtggagtcagccttttgttctattcaggccttcaactgattggatgaggcccacatacattagagagggaaagctgctttactcagtccaccaatttaaatgctaatctcatccagaaacacactcacagaaatacccagaataatgtttgaccaaatatctggataccctatggctgacctattcaaaataatacataaaattaaccatcataattggttgaaaggtacaggtcccacccatatctgaagaagggaactacataagggtgtaaacaccaggaggtggaaatcataggggccttaaaatctgtccaccacacatactgttattcattacttctaattttattgcactgtgaaatttattgagcctccctttaagatctaatacacagtttatgtttttactttaatgtttcacatgtacctgaaaagagaaaggacatgtattcactgtttgatggaaacgtatatgagttataaatatctaatggctcaagtttattaattaaattgtacagaccttgtatatttgctttctgtgtgtatgtgtgttgggagaggagaggaagtatctactgtctacttgatctattggatactgagaggagccagttaaaaatctccaactataattctgatttatctgtttctgcctaaatttctgttagctgctgcttaataaatattaaagctgtattgttgggcacatttatgacctcccttatgaactttctatcttaagttttattttgtcaggttttaaaattactacatgagctttctttggttcacatttgcactatatccttttcaagccttttaaccttttagtgtctgttttacacaagtttcttgtagaaaacatattgctgaatcccttgctttcattcaatttgaaagactgtttttcttaattggttagtttaagccacttacatttattgtaattgctgctctatttaggaggcagcatagaatagctctaagtatggttctaagtatgggttctagatccagaccacctgggttcaggccttggttctgccactttctagcaagttagttaatctcagtttcatcatctataaaatgaggatgatgaaagtaatagtaccttcctcataaggttattatgaggatcaaataagaaacacccagaaaagtatctggaacatattaggtacactgaaagtaaaaattattattagtaattttatttctgctatcaaatttcatatattctaattattgcactttctttttattcctttttcctctgctctcttgcctttcatttgataaaattttcttccactgctttaaaagttacatgttttattcttttttaacggtagttacccttaagacctacattcacaaatatttatccctattgatttattaaagttaacaatttttttcgtcttcctcccatatgatagtaatttaacccagtactactctaagtactctaagtagtactgggttacttatctcatccattccagaatgagatttgagcccacatgtaaatcaacacacagcttccttcattgagaaagtcttgctacgaaagtgtcagctgaatcaaagagtttgcttatgacatagctgatatgcattctggtacaagctccttatctcttagagaacaattaagttttgtgaaccaccctttgaatggcactattttagatcactgtcctatcattttggcctctcattcctgagtcccacacccctcacaatattgatattgtctataattttaggtctgaatcattataaatacactgttctttgtttttagacttttgaaaagagtttttgtaagtcaggtttaatgaaatacagtttacatacaataaaattcaccttttctagtgtacagttctacaaattttgacaaacagataccactgggtcatcagtaccattctcaagataatggaatatttccatcacttcagaaagtttctccagattcccttcacccccagcacctgacaaccattgatctattttctgccttttccagaatgtcacataaatggaatcatagagtagcttattatatctgactttttttcacttaacatgcatttgagatcatccatgtttttgcatatgtaagaagtctgttccttcttaatgcttagttgtatttcatcgtatagatgcatcacagttatgtatagccacccaccagttcctggacacttgggtggttcctggtcttttttctaacacaacaataaattcagcctaaatatttggccactctcatgctatatctattgtatcatctcctgaatttgtttctcttcttgcttgattatgtcctccaagaatgtcattcaaatgaatctttcataagaatatttttattattaatacattctcacattctaatgacaatatggcttaatagaaaataagttcaaagttatgcttttaaatacttacatatagaaacattttgcttgagataaaccttttcaatctgaaggtttttttctaccttgaaatttatctccattatatcttcaaatatttccccttctctgtttttatatttcttcctttctgttctagttttaccctagatataagctagaaaatttacaaataagctaacttgttttttaaaacattttctactgcctctggaggtttgctgaaagtgctcttccaattactaattcatcgtcagctgcatcttttagactattgcacattactaatacgtagcatcaatattcattctaattattatttttatgcttaatatgttttagtttcatattttttcctgattcatattgctaatatcataactcattttaaataaatttatcatgcttatttaaaaatcttggtccatctgctctactgatcagtttcagatggcatatgttattcagttgtggtcttttaacagtagttgcactcctccagtgtctaattctttgtcctatgaattcatgttcccctggggtttcacctactctgtctgataaacatgcatccaggaaggcccagtgagtttgcagtgggagggtggtgtgagcccagaaggaaatcgctggcaccagagaaccactgtctatcattcccagtttctcccacttacccagatctttcctccagtcaggtttctacccttagggagaagcagcacctaaaggaagcaattaacctagcaaccctaagggtggcagggggaagggtagaggcttgattgagaggaggtggggggaggtcggcctgcagttttttttgtttttcgttttttaaattcctcaccccaacagtgcttttgcgctggtctgacactacctggaaaactatgccaccagtcgcttcagtggacactaccatttcaattgcgaagtcaggcaatgattgtcctaaggcaaggtgggagagaagtcagagtaaaccacctcgagagcgccggtctcccggagtgtctgggttcgactcctgcctccacaacttactgggtctcctcgaacaagttgcatcaccaatggccgtgcctcagtttccctcctccgtagattaggaataacaatagcagtgagaacagaatccagcacacagtaaatgctgcttacctgtttgctatgtggaatacgccactacactgttgctcggccctcaggaagggtctgctgagactttctacttcctgctcagggcagaggccgaccacccgcccaaggtcgtggcggcgccggctcagctttagtcgtcaaagtgcacatcctgggagccgctgcctcgaggtggttgaggcgagagggcagggaagcgtctgagcctcttcctcccaccagagcaggaccccagctgacagcgggtgagctgggcagaaacccatgccgggaagaggcggacccagtggaccgcagcgcccgcagtcgccgggccaggcgcagaggcgaacgggaggcggcgctgcaccgtgcccgcccctccccggcccggccccggctccagccccagccccagccccagccccggccccggccccggctcgcgggcgctgcgtctccgcgtacaggaggcggcggcggctcccagtcaccggcccccgccggcgagcgcacgatgcactgcctgggcgccgagtacctggtaagcgctcgcagcctcggccctcgggggaggagccccggggaagggtcgagtcccccgccttcacgcaccttccctgccggacgcttccgcctttcccgcgcctcggggatcccgcccccgcttagtaccttggggccacctggcggggaggaacctggaccctgctccagtgctggggcggaggcgggggagacgcgggccgcggggcgcaaacttggggtcgtcctcaggtgcacctccaggtaagcacttggcggcagggggcttaacatccgctccgcgcagagcaggtgtttcaaaggctgtgtgaaagagcttcaggtggccacgtaaaaaaataatattaattttaaaaatttagaaaaagattggttactttggcccctcttcgagtagatttgggttcggtttccaggttgagtccacctgtttatcttctttttctcaactctccctttttctggaaggtttctgcagaaggagcccctaggcaaagggagtggcgaccccagatttataggaaatgcacagatacggcatggttattcctgttctttctcttttggactggtttggtaagtgtgggtgcttggtaggaaagaggccagagtgtgtgtgcacgtctggaaataactctgtcccaaatgtaaatcgtagttggtgctgcagtgagagacttctgccgttaacccacaataaacatcagtttgtactcgggagaattcttgtcctagactcgctagaaaggctgtctttttgctacaggccatgttctaaggggtgactccattaggaaatgggaattaacagtttgcaatgtgattgctatttagtaaggccaatgtgtctccttttactctccgaacttactgaacagaagttcttttagcacctgccacacccccaaatcaaatattcctcaagcttttggtgcacctttaacaaaggaaaagccagggtaagcctagaaataaactgcatttcctttagctgaacatcacacacacacgcgcgcgagagatatgttgtgtttagcagccaacactgttaaccatagctaacaaggaatgatttttcccactctaatttcgaggtatgtatgattgctggtaaactccatcaggctatgcggttataatcctgagagagtctgttggaagccgaatcttgctgcttttatacttatttt

SEQ ID NO: 4143 - DNA, 6000 bp, Homo sapiens
agaatagagaaaatggaagggaggaaaacagcaaataaataaaagaaaaaatttgcaaatgagataaaaaagactgcttggtatccagcacaaccactgaaaaaagacctatttgtaaggtgcatcaatatgacatttcagactactagggaaaatggaagattctagaaagaaaaataggtcagatacagaggagtgggaactagaaaggcattagacatttcaatggcaacactggaaaaatgctttcaaaatgctgagggaaaataattttcaatccatctaaattatcagtcaggaataagagtagaatgaagacattttcagacaggcaagtactctaaaaatttaccctctagtacctcttctgagtaagctactggagtctgtgatctggcaaaataaaagagtaaactgaaagttgtgtgtttgggcattggaagatattattgatgggcatttgatagatatgttgaagcatttgtatctaaaatttaggttagatacatttttattttatttatttatttattcttgtagagacatagtcttactaagttgcccaggctggtcttaaactcctgacctcaagcaatcctcctgccttggcctcccaaagtgttggaattacagttgtgagccactgcatccaaccttagctacatttctttttcttttctttctttttttttttttttttgagacagagtcttgctctgtcgcccaggctggagtgcagtggcgcgatctcggctcactgcaacctctgcctcctgggttcaagcgattctcctgtctcagcctcctgagtagctgggattacaggcgtgcgccactaagcccagctacttttcgtatttttagtagatacggggtttcgccatgttggccaggctggtggtctcaacctcctaacctcgggtgatctgcctgtctaggcctcccaaagtgctgggattacaggcatgaaccaccacacctggcccctaattgttgatttgagtgaacattgtaatatggttatgttgcaaggaagcatgagggcaaagttgttgtggtggtgggtaaaagagctaaatcctcaaataccataagatgtcaataaagaatatgtaaaactgaaaatcaagaaattctgttacaaggttatcatttaggagatgaagaacatggtagggttgtgtggaatgtagggtgaagacaggtggggagaagcagggccgggggctgatggcactcattgatgttttttgttataagcctttaagaattatttgatttttcacttatgtgtgttactttcactaaaaataaaaatgcaaacaaaacaatacacatacattgtagaaaatatatcacatataataaaatgcgcaaaaagaacataaaaagatggccagaatctcatccatccagaaaactgagtgtgcctgtagtctcagctatttaagaggctaaatggggaggattgtttctgtattttatgggctgcctccatagatgcctgggagttagaggctgtcatgtgatatggtatctgtgactggccactgtactcctgtaccccagcatgggcagcatagcagaccctatctcttaaaaaaaaaagtctcacccacccagaaataaccactggtaatatcttgaaatagtttcatctgaaaacaaatgaaagtacttttaaaaaaaccttttggtttgtttgtttgtttgtttagagacagggtctcactctgttacccaggctggagtgcagtggtgcaatatcagctcactgcagcctccaactcctggtctcaagcaatcctcctgcctcagtctcccaaagcacttgggattacagacataagccagtgtgcctggtgaaagtatttttaaacacttataaaactacaaacactcttaatacactaaaactaccaacacaggaaaaagtagtgcttggggttattcattttttagtaattcagcctttctgatcaaaatgtttggcgtcatttagtttgtatcttcactaacagagcagagtggagaattaaggcaacttctcaaaatatttttgctttaattataatttttagaaaaaaaacagcttttggtcttagtttttcaaacaattggttctattcagaagattaagaattttggaaaataaattcatcaggaaaacttacttcatttaaaacagtttttggctggacatggtagcctgtaatcccagcactttgggaagtcgaggtgggtggatcacttgaggtcagcagttcgggaccggcctagccaacatggtgaaaccccgtctctattagaaatacaaaaattagccaagcatggtggtgcatgcctgtgatcccaggtattcgggaggctgaagcacgagatctgaaactggaaggcggaggttgcagtgatccgagatggcaccactgcactccagcctgggcaacagagcaagactctgtctcaaagaaaaaaaaaaaagagtttttgtatttgttgcccatttcaagtgtggataaatactttcatttctctgatctgtttgcttgaactgtttcagtgaataacaatataaaaagtgcaattcggtctttatacatcccatttaaaatgcagaaaaacttcatatggtaaatacagaattctgagaaagtatccttggaaagggaatattggtgaaacaattaataatacagatttaatgaactggatatatatatatacacattatatatatatatatataatatatatgtttgtttttgagacagagtttcgctcttattgcccaggctggagtgctatggtgtgagctcggctcacacaacctctgcctcccaggttcaagcgattttcctacctcagcctctcgagtagctgagattataggcaagcaccaccatgcctggctaattttttatatttttagtagagacagggtttctccatgttggtcaggctggtctcgaactctcaacctcaggtgatctgcccgcctcagcctcccaaagtgctgggattacaggcgtgagccactgcacccagccatgaactggatatttttaaagagattaagctaccctgaatttttcaggaaaaaatacagttgatgtattcttctacctcctaaggtcactgagttttaattagcttaaaacttgcaacattcaactactatttactgaattcctctcatagctcaggccttgtccttgatatattaacttatatgttctgtacaatctcaaaaacaatcttgcagttttcatgaggcatttgtagaggcctaatatgaaggaatatagtgggacatagagtatagtggatttctgtgggtttacctggctttggttactgctgttggtgttagagaattatgcatatcaaagataatgatggtgcatttatcaggaaagaacagagctactatcagccaccagagactagcatgggagagtttctgtaggaggtagtgttgatacagactcttgagaggacactgtgaaattggtattttctgggctgacttcacagatgttcacatataaccatcctgcccacagagagttatgaaatagctatgtgagtgcacaaggtagctattgcgcaaaccaaagttgtcaggtactgcacatattgtgaagggactatgatgggacaccgtgtggttcaaagagcactggagccctggtacatcctgagagtcttggggagaaaaaggggaacacgcatttgggggcctgaaagatctttctctctgcttgactgcagggcaggtttctgtccctccctgttctgtggtatagattttgtcttttccacatcagtccaggtcttcagagtcactatgaattattattaccattttaaagatgaagaaattgagcctcagtgaggttcagttagctaaaggcacacaactctaataaactgacagaattccaggttctgatttaaattctattgccctctcttgaaaataaacatggacagcttatatgagcttttgtgtatatattttctggtctaaatctgcggcagatatgtgtgtctttctgcgcatgtatatagtagatcaaatatgttagctctattgacatttcttagaaataaatatcctgttatcaatgatagtgtttacaaattatttatttagaacttacctcttttcaagaaaaggccttgtgattgctctctgcgaattataatgcatgagtatacctctttgttattttgttttgtttcagacaattatctctggttgatgcagatcacttggaggcttttggggctgtatataacaggtcagaacatctatttaatgtcaaactttatctactaggcaacttggaattctcagccagcaccaaatattcaaatccaacttccacaccccgacaacagaggggttccgggtgtaggtgtagtgctggtgcacccatgagggtgtttttcaggaattctggaggtggtgctggagagaacacgcttcttctacacgcgccccctaccagtttggtatgcacctgcagccccaaagaagaactggcgggactcgagtgtggccgtgtcagacgtggcaagaaaaaccagcagttgccttttcatctcttttctgatgatctaaccatgaagtccccagtatttgagcatttaaggcagaatgtaaattcataatttaagaagattttttgttacgtggctagcccaggtactgaccgctgcgggggcgggctcacacagttcccccgctggcaagttttgtgacttgctttggaaaacccgggaattgcaccctctgcccttggcaaggtgtgagcttccaggatctctccgctgcgacttcgggtgttagggtttttgggctctttccgggacccaagttccagggcaagaaggtctgctcggcggcccgcctcggggccccgcccactttggccagggtcggagccgcccggagcgggagccggagcccgagcggccgcggcccctttaaggagcagctctgcggtaacccgagcccgcagtccgggcgggcgcgacggccgccgcggtagctggagcctccgcgactgcacctccaagcggcccggaacccgcggcttccctggctcccgtgagcatctcaccgggcggcactggccagcgccagccctcgggccggcccggatgagcagactcctgtagacacccgccgccctctcccggctcggcgcagccgccgcccgcgcgcgactcgccccgggacccggcacaggtgacgccgtttggagggggggttggggaggaaggcgggcttgcctcgccccgcggctcccccgcgccagccgccaagcgcagcccgcggagaggggtgccgcggcttcccgcccctggcctagcgcggccgagagctcctgcgcctggaggctgggtgggcgtccggcgcgcgggaggcggcccggggctcccgggcgggctccggcaggtgtgtgcggaaggctcagcatcgtccccgcccggcgggccacggcgtcgctccgggagcaaatggtgtcccggggcccgcggcccccgcgccgcccgggcgccccgcattcctctcgcgtttctcgggctgcacgattccggctgccctgtctgcctggcggtgcctctcgggtctgagcttaaagcgggtgggtgcaaacctttgggcatccagggagagctttcttgttagagcccacacacaatcgggcgcatcaagtgggtaagtccccctcccccgccgccaccttctgaaacaagtagctcttatttacccttgcagttctcaagtgggtcccatttttagccactgagtgctgaaaagtctagtgggaagggaccaggcgtagagtcggagggagaaattggtttctatttccatctttacctctgtaacccctaagtgcctcggtttacccagccatgaaatgggattcgtaatgccagcagtttcctacccctccaagacggcagaaaaacctctgtgaaaac

SEQ ID NO: 4144 - DNA, 6000 bp, Homo sapiens
gcatatgaacttcgtaatcaaatgtacactaggactggtaaatgaggcccaactttactggagttgtagcccccattcccagatttaagaggtccctttaacagcacaagtgcatactatacatactgtgcacctttctctagtcttccacaaaggaagctgtggtgattttatcaggtaactgtgctagatacaggagaatccccaaggctttaatttatatttaaccctgactctgagatgaaaccaattcattgattctcaaatagactttagagcatcaagtgataactgaagctttgatcaacaagccccatagggtagcaatcatgcagggtagcttctccagtttccgaatgtacagagggaggaaagggcctcatctccctgaaatctcctcctgggcccctgactcgaagaataagtctactataggaaaaaaccagaagccactgaaatactcttcctcagaaatgaaaagtaagttttatttcaaacctatcagatccatgttctagagaatgttaaactctacagatccatctcagaatcaaaggaccatattcatattgacagttaagctcttataatggaagtaacctcattcaactcttcttagaagtaaatgatggacaagtagataatctttggcaatcctttccagttttgtttacacataggtttctttttccccctgaagaactaacaagaaaaagccagattcaattactatgatttggcagcttgaaacaacaaactggtttttcctgctcctgagctgaaatttcaattaaatagttttaaaagctatgatggcataggaacaaaatatttgtcaagtgacacctggaaacctgcagcttaattctctaagcactgaaatttttttcaatattttaaccattttgagcagaaattccttaaaaatgtctatcaacatagtccctgccctctttctttcttgtttgttgtcttttcattattttctcctgggttttctaacaacgtctgacctttatccattaaagtctaccagcttggcactgtctgaagatattgatctagagaatgtcattttgtgtgcataatgtttgcagcgtcaactgcactaaacataatttgatctggccttaatttctctggggcatcatagggaatcccagttattgtacaatatcataatgcactcatgccttcaatagggttgccacatttagcaaataaaattacaggacatccagttaaattagaatttctgataatcaatgaattttttaaagtatatccgaaatattccatacttcgttgcttatttgaaatttaaatttaacaaggcttctgtttttttttttttttttttttttttttttgagacagagtttaccctcttgttgcccaggctagagtgcaatggtgcaatccttggctcaccgcaacctctgcctcccgggtttaagcaattctcctgcctcagcctcctgagtagctgggattacaggcatgtgccaccacgccccgctaattttttgtatttttaggagagacggggtttctccatgttggttaggctggtctcgaactcccaaactcaggtgatctgcctgcctcggcctcccaaagtgctgggattacaggcgtgagccactgcgccaggcgaaggcctctattttatccgacaattctaattaggtaccactgagacacatagtcctatttggccctggctgcctttagactattatctttttctcatttgaaagagctgcagaccttgggtactgatttgaattgttggatgtccagacttgcagttcaggctcagctgacattcttgccctggtgagcttctgtaccttcctcttcgccctctgaaggttggctgaataatcaactgacaaaagtcagattaataagagaagaggcaggctgggcacggtggttcatgcctgtaatcccaatacaatgggaggctgaggcaagaagatcactggagctcaggagtttgagaccagcctgcataaaatagtgggaacccatctctattaaaagtaaaaaaaaattagccaggtatggtggcatgtgcctatagtcccagctactcaggaggctgaggcaggagggttgcttaagtgggaggctgaggcaggaggaccttggaggtcaaggctacagtgagccatgatcatgcgactgcactccttctagagagagaccctaactaaaaaaaaaataaataaaaaaaaaagaaagaaaagaaaaaaggcatagaaatttattagtgtacatgaggagaaatcacagggtgattactcttatcccccatgtagtacagaagggtataccatctttacaaagaatgagagctccaagcatggccaaaaatagattatggtggtaaatcaggttatagtggcaaaacaagttacgggagggacagaagcagaggcctgactaacaaaggtgggtagcagccctcagagagaatagatggtggaagtttctttcagacctttaaaagtgtcagaatctcagtaaatctttcctagatctggacaaggaagggcctcagagaaagcctggctacattaatgcagattctccacagatgcaaatctgccctacaagagacagttttgcagggctactgggctactttttttttttttttttttttgagacagggtcttgctctatcagccaggctggagtacagtagcatgatcatggcttaatgtggccttgaactcctgggatcaagtgatcgtcccacctcagcctccctcatgagtagctaggactaaaggcatgtaccattatgactggtacatgtttaaatttttattttttgtagtgatgggatctcaatatgttgctcaggctggtcgcgatctcctgggctcaagcaatccgctggcctcagcctcccaaagtcttgggattacaagcgtgagccaccacatctggcctgcaaaggctacttctgattgcaggccctctaaacagtcatctcaaaatatgtcaaagtagtatattttggggtaaaatattttgatttccttcaaagccattgtagggttaataattggcctaatttcaatattgctgtttattgggaaatagggaggcccaagggggagaagtgtggggaaatgggcagttggtggagtagtcagaacacacataacatttattaattaagtttgcctttctatatgagtgcagtacatggcacctgtattagtccattttcatggtgctgataaagacatacccgagactgggaagaaaaagaagtttaattggacctacagttccacatggcgggggaggcctcagaatcatggcgggaggtgaaaggtacttgcttacatggctgcagcaagagaaaaatgaggaagaagcaaaatcagaaaccccagataaacccatcggatttcatgagacttattcactatcatgagaatagcacaggaaagactggcccccatgattcaattatctccccctaggtctctccctcaacacgtgggaattctgggagatacagttcaagttgagatttgggtggggacacagccaaaccatatcagcaccccaaaacaattaccatagtaacatcaaagatcattgatcacaaagcactataccagatataataatgatgaacaaatttaaatattgcaaaaattattgaatattatgtgacacagagacacaaagtgagcacatgctgttggaaaaatggcaccaatagatgtgcttgaggcaaggttgccacaaaccttcaatttgtaaaaaaaaaaaacaaaaaaacaaaagcaatgtctgtgaagagcaataaagcaaatcacaataaaacgaggcatgctgttatcatcatctaacaggcacattttggtttcaaaaaaaactgggcatgtattaagatctaatatgtattttaccatccaggaattttctcaagactgtattgcagaaaattttaaaaccagttattctactctaatacagttacttatttttcttcaatatcactttttttctaagtatgtctctcttggacatggttttaatcatttgcaatataaagagacataggcttaatttatagcagccctgagttaacaaaaagagataatcctattcgcttatttgataatccagctgaacctgaagtactgatttcagcctgttcatcacctgaatgggctgccgtggttagagggtttccaacacagctactggaacacttttaaaaggtaatgctgtgatccatgcagccaggaaggggttggtccctcataactctgcaatcctctgggcccagttttctttttcctctcccggttgatgacactaggcccattggtggtacggctttgggtttccttcagtctcaagatctcagtcagggtgggtgaagtggaagaacaagccttcttgcagaccactggttggttggcagcctttgccatagctaatctggttgttttcaggtcagtgacagtcacttttaggagagggttcgtttgctttcaaaatccatctccccgttcctctcagggttctttgccccaaaggactttgcccttccttacgcagtggacaccttggcaccctctgcaaacagacagtcccgcagaggccctcgacgagtgtcactccatctgtttcgcgctcctaggagaggtgtagcagaaagcagtgccccaggcctccacgcgacggtgaagcaggaaccaggggctgccagcagagcagcccaggtgcgtcgccttagggacagagctgccaagtgccgagctggggctgccagagccgagccgggaacggcatttgccagagccgaggcggaagccggagcatttgggggacgggaccgcgggaacccggaaacgcctgggctgcaccgagctggcggtggctacggcgacgggagccggcggcgctgcgggtcagcggtcgcgtaggacccagcggactcggcagcctggggcgcccggcggagctgaaccgcggcccccggtggtgggctcagccggtcgagctgcgcgggaggtgagtcctcagcgcacctggggaggggcgggaaccaggaggctagcggctgcggggcggcccgggaagctcctggaggaggaggaagaggaggcatgcgagggggctgatgtgaagtctgtaggggtgaaggggacggtatcgaagacctgaaatacagtgctagctaagtaggggtgggagcagatgaggtgacacgttgtaactccgacggacgacgtgcggaatgtactgggtggaggaggaaaaaaggcccgaggagaggggtgtgtcaagcgaatgaagacggcagtgtgtgcctcagcgcctggtgcgtgcggagctagtgacgggtgggcccggctggggcccgtcattccttcagtgaacatcccatgagctctcgctcggtgttgagccctgtggtaggcacagatgcacccgaccagcacctggagctcaagaagccgcaggaacttaaagaaatggaaaggctgcccttggtaaggctagtaagaacacaaggactgtttgaagtggggtgagattctcatcagaacaggtgtgtgggtgcattgctttatagtaaaagacgatcttttattatgttctcttaaatgcagtatttgaaaattaagtcttttcgtttttgaaatcaacattcgactttagtagttaaagatgaaatttggtgcagtttcttacttggtgttcttattcactttcactggtaaactcagggtgtttcaagggaatgacttgtaaacttatatttctgaggctaactttcctcccaactgttgattctatctcttcagcatctcaaatttagttctcccctttttcattcccactacctgtctgctaaatatgctcgtctttcctcttcttacttgcactatagcaataacttccaaactggacttgtcctcagcctggcacccttccagtcacttgcctcca

SEQ ID NO: 4145 - DNA, 6000 bp, Homo sapiens
atcacttaaggccaggggttcaagaccagcctgggcaacagagtgagatcctgtctctacaaaaaaaaaaaaaaagataaattttttcgaaaagttttatatgaaaagtgtactctgaaaaaatctagctgtcatacctatccctccattcctaaccatctcttataagtaattattatccatctcttataagtaattattataagtattttcttagttttccaatttatctttcatgtgtttctttttaaaaagcaaacaaatatgcatattgctgtacttactgtgcctctttcacaacatggggtctttataaaatttctttggatgtttagaaaggtttgtatgctctaatttatactgataacattttatataatgcatttagagtccccaatttgcttgtctaggcctctactatttaatttgacacctttaaatgatgttctttgactcttatctaattgtctatgtgaccgtcagtgaatatattatctgttcatattttctgtagtcttatttctttttgattagaacatataatatttacacactattttcccatcctaatccccacctttgtaataaaattaattaaaattttaaaaaagtatatttaataacctactgatacttacctgaagtctctctggtcaacttttggctggatgaagctcttctgtagagtattcaaggagggcttgtaagtactgtacaatattctctgagttgtgacatgtttaaaatttcttctggagcctagatacttaaagtacaccttggccatgtagaaaatccttgacaaacatttccttttcttgagtttgtctgaatttgtgcttcactgttgggttgcttgatgttatcatcaagaagtgtggcaccacttgatttttttcccttttggaaatgacattttgtttgttgttttttacctagagacccagataattttttctatattattttatctatgatcctttttatctcatttttgttctcatagctgttttattcctcttctctgtatttcttactttacttttatttgtgtctctcaggtaccctgtgatttagttttcatttttagatgattttatcttttcagtatattgcctatgtttgttcaactctcattttacatcttactattgagtttaaaaatttttatttgctgtgttcttttatatgtgcaattaatgatattcatgttggagtgttgtatattatttgcctctgcttcatattgtctagagggtagtattttctattgattgaaaagttttcattttctgttttttataatagccttgtatggatttttggtggcttttctattcatgattaaatgtgtaggatcttcttcaatcagcaataacaggtggctctatagaatggagggtagaagggatgtgggtgacttactcagtttttagttaaagaggaccctcttctgttagcatggtgaagtgcagtttctttaataaattgtgcatggtgggggtgggatttggattctgtgatacaatcttgtttctttaggaatcttttacttttggccacttgcctttctttccaaggaatcccactccctttcaaggtgcctcatgaactgttttcatgaactttccaaacattggtttctgcttgtttctaagcctgattcttggccttctcattaattttcaaaacttccaatatccttccaaataattcccttttgcttacgttagcgagtactagtttgttagccagtgttagtttctgttgatcctaaccaaaaaaccctaactgagatatcagtctcttagcgcaaagtttgtgaatacggtcatccctccatatgaggaggggagtgggaattggttgtgggacttccgtggatatccaaatcagtggatgctaaagtcccttacataaaatggcatagtatttggttatcatcctccccatacatcatctctagattatttatagtacttaatacaatgtaatgctgtgtagtcatactgtattttttacttgtatttttgttgttttgtgggatttaaaaaatatttttattctgaggatagttgaatccacaggatactgagggccagctgtattcacaacccaaatcacatacaaagcgacaagttcatacacaataggcctattagaacaggactgttctctcttgtttatcattgcagcctttctagcacaaagcctgggacattctggacatttagtatgtgttaaatttctcttactacattatttccaacagtatttactgcaatctgcaattaccttccttttgttttgtaactgtgtcccccactagaatgtaagctctgtgcagatagtgtctcatttattgatgtatccctggcatctaataaaacactgacaacacaagcacccagtaaatattttttgaatgactgaacaataaccagttcataaggctgataaaattggtatagctagatgaagtatgattttgagggactatgaaaatcaaagtaaccacacaataaattatcagccctctacttccattcaaaacaagctcctgggaattgaattatgaaatctatcatattactttctctaaagaacttcaagttgggtgtcaactaaaaagttgcaggcgaggcgcggtggctcaaacctgtaatcccagcactttggtagaactgagtatctcttgaggccaggtttgaaaccagcctggtcaacataaccagactctgtctttacaaaagaaaaattaaaattagccaggcatggtggtgtgcatttgtagtcccagatacttgagacgctgaggcagaaggatcgtttcggaagaggctgcaggaggccatgatggcaccactgcactccagcctgggtgacagagtgagaccctgcctcagaaaataataataggccacgcatggtggctcacacctgtaatcccagcactttgggaggctggggcgggaacatcacctcaggtaaggagttcaagcctggccaacacggtgaaattccatctctactaaaaatacaaaaaaaattagccaggcatggtagtggggacctgtaatcccagctactcgggaggctgaggcaggagaatcacttgaacctgggagctggaagttgcagtgagccaagttggcactattgcactgcagcctgggcaacaagagcaaaactctgtctcaaaaaataaataataaaaaaagtttcaaaatgagaatatatgtttcaaaacaagtataatgaatatacttattgattggaaaatataattagaagtatctatcaggctataaattgcttttcttctcccttccatggaaattagtttttttttccatttttagtcagtatgaaaatacaaggaaaaggaaattcaatcaaatttactttttaacattttatttggaaataatttcaaacttacagaaaagttgcaaaaacagtacaaagaactcatacattcatttactgtttttccttttaccctatatattagttatttatagctgtgtaacaaataaccccaaagcttagtggcttacaccaagtacttttcatcttacactgtttctgagtcaggattccaggagtggctaagctaggtggtcctacctctgggtctctcatgaagttgtagtcagccaaaggcttgaccaaggttggaggatctacttccaaagtgactcactccgtggcatttggtaggaggctacaaacagttcctggacaactggatctctccataggctgcttgagtgtcctgaaaacacggaagcaggcttccccaggctccaagccccaaaatgaatgaaaaagagacccgcaaaggaagatgcagtgccttttatgacctagcctctgaagtcaatactgtcacttctgttttgatctatcaagagtcactaagcctagtctacactcaaggggaggggaattagagtccacctcttccagggaggaatatcattgaatctgtgaacatatcttagaactaccatacctagtttcagtacttttaaacattcgccattttgctttgtccctctcttttccccacctacatatacatacacatacatgttactccctaaccatctgagagtagggagcatgcggtgtatccctatccctcgtgtttttctcttaaggaaaaggatattctattatacaacacggtagttatcaatatctaattttaacattgtgatactttaaagtccacttccacttgtgtaaattgccctttctagcaatgttcccatcaaatttatttttaaacaatacagtaaaaacgtagagggccacaaagggtgacatcggtcaggtaaggtattttttttggcagggaataaaaaaggtcctgggtctagggaggtaaacaagcgtgagccagctgagttctagcgggggtccctgaacaccaaaaggacaagactgtttctgaaacactacattatctcttaagttacccattacttacggaaaatgattttttactgttcccttcggttcctgtcttggttagaacacagctggagattgtgttaatagcttaggacgtctgtttccgtgagcaggtaacaactttttgaaacaaattccctcatctgctgaagaagggggacaaaaacggcccctatcgcccagaaccgttgcgaggatttagctagctggtgacgccggagcacgaagttgtacaggtagccagcagcacccacgcgagcccgcggttaccctggccgcgcggctactgtagagtgggctggcggcgagcgggcggggcggtatcacgcgggaggggcggggcccgctcgtcggctgatcgcacgattgtgacgcgccgccggaggcaggccgggccctcaagatggcggcgggcgcccagagcggctcggcccggcagtagtggtgggacggcactagctgctggggcctgccgccccgggagtggctgcagcagcgccaggaatcgaggatggtaaaatgacccaggggaagaagaagaaacgggccgcgaaccgcagtatcatgctggccaagaagatcatcattaaggacggaggcacggtgagctgagttccgcgccggcgagcgtccctcggggcccccatccggtctctccttcagacccccacactgccgtctctaggcgtcccggtgcctccctcccttcccccaccctgtccgagctgccggtgcctcggggtcgcggacccgcatgccgccgctccgggaatcgtcctccgctgctcgggcttgcggcctccggggcccgtcctctttctttcccgcacctgccgccctctgctctggccgcctctgcaggccctgcggcctcgaaccccacgtgcgcctccgccgcggggaggaatgtgcggggctcccccggcggcccgcccgccgcgcccctcgtcgccgcagcctcgcctcgccttcgccgccaggccccgcggagccgtcgccgcgcttgtcaaggggctgggaaccatccctgctctcccatatgttgctaacggggtggcgtctggcgcggggatcccgctgcggccccgtagtacgttcgctttctgtttccacgtctctctgcgtcggtgctccggctctgggctgcttacagtaaaccctgaccggagatgggcttccctcacttcccggagtcggaagcatgacggcagacacctggggcctacattcgaacctgctagttttcaaagaaaagtcatcactgtgtgtcttaagatcaaaagtattagaatcagtcatggcctaaggatcggaggaggacactttgaagggaagaaaggtttgctttttagaaacagttgtcatcacagtaaactttatgcagtgtgtagttaaccagctggggacgtaggatttttaattgaaaaacaaaacaaaacaaaactgttttatgctaacatttctccgttgctacactgtgtggtctttgttgcatccgctgataccgcgttctgaaat

SEQ ID NO: 4146 - DNA, 6000 bp, Homo sapiens
ttcaactcttctgagttgaactatgtgaaagttctttactaataccacacagatcttttccattctgatataggaactgtgtgcatgtcctcatctgtatatttcagtgctagaaaggtgtcagcatagcagtctctcaataaacattctatgaattgaactgaattaggaaattgtgacagatgctgctaattgcctgcctactcatcatccactcttccttttttcttataaacagaatcctaatttatttggaggccaccatgtattcagctaaaatattgaatctcctactttttcagtgagatatgagtggaaatcactgcctttgacttcttagaaagttatttaaaaggagacaaactccactggctttgacttcttgcccctcacttttttccttgctttgctgactgaaatgcagatgtactgtttgatgacaaagccatcttagaattatgagggtttgttacacgtaaaagatgataaaactggatctgaaatcaatcttggtccttgatgtttctctctggtagttggtccagccttgaactgtgtacccgtagacctctatttaattaagccactgtgaaaggtttctgttacataaaggcaaatggagtcatagatatagatcctttgactctgtctagcttagtggggaagtagttgacattatagaatctactgagatggtttttcactttttctaccccattctgataatgccctgcaaaaaaaaatactcctctcatctgggtaagaattgctgccatattcttgcaaggataaaaataaaaaataaaaaaataaaagaaagaattgcttccacagtgagccacagttactgctaagaatgtcacttccctaagatgtgttaggccacccaagaaaaaaggttcagaatcatctctgcttcagggaggctcataataaattgactaattggaagtcctgaaagtgttggagttgcaatgcattcagtagttattaaataagtggaaagaagtatgcctgaagtatctcagagcccgattgagataccaactgatacagcagcatcagaagatgattataattttgatgtggacagtgaaggggttggtgaagctagactagaaacaatggagagtgctgaccctgataacagaatcttagcattggagggcaacttaatggccatccagttctatgtctcaaggcaaaacttgacttctaccatattgttcacagatgtcatccaacctttgcttgaatactccagtgattaatagctagtgaattcaaaaggtgatctattgcattattgaaaagatttaactggaaagtcctttttacaatcaacttaatatgattgtatctttttttaattattatactttaagttctagggtacatgtgcacaatgtgcaggtttgttacataggtatacatgtgccatgttggtttgctacacccatcaacttgtcatttacattaggcatttctcctaatgctatccctcccccagccccctactctaattattaccatataccatttatatagcattttactatatttattttaagagatttcatatgatcagtgttgattgatagtcataaaatgatatgaatcacttgaaataatactatctgagcatttgtaaatctgctctgagaggctacatatagttgtacaaggtttcacaattcctaggtagaatacctggacttgaagacaagactattagactctgagtccagatctcctttaaattgttatatattcaatcagtagggatttactgagctcctagtatctactggttactatgttaaaagtgctgaagcactaatggtgaacaagacatagacattcttggttcctctagagctaataatctggtaattgcctacatatgagttgtacttttagcttttggtatagcacagagtaataagtaaattccttcccctgtgcattaatcattcagttatcacattgcttcatgggtgcctcttctctagacaaaatatgtcctttttcttcaacataggagctattacttttctctggacacccttaatttcgtcagcatctttcttaaggagtggcattctgaattagacacccaggctcccagtatgatctggtgggtgtgtagtgctcagagactgtggcctcagaagacttgaaggttgaattactaggagtgcaacctggactcatcacagctattttgatttctcatggcagtgttcatttttatggttcgtaaaatcacaagaccttctttctgtgaattgtgaccaagtcagatctctcccatactgtactcaaacattggaaacatttaaatgctgacctttaatgcattcctattaaattttacttcgtcatctggaatattattacataccttgaggtcttctttatcttgcttctctcatctctaaggttgtctttcccagttttgcattattaataggttagataatcacgtgctgtattagtttgttttcacacgctgataaagacatacccaaaaccaggaagaaaaagaggtttaatggacttatagttccacctggctggggaagcctcacagtcatggtggaaggcaaggaggagcaagtcacgtcttacatggatggtggcaggcaaagagagagagcttctgtatggggaactgctctttttaaaaccgtcagctcttgtgagacttactcacgatcatgagaacagcacgggaaagatttgcctccatgattcagttacctcccacagggtccctcccacaacacatgggaattcaaaatgatatttcagtggggacaaggccaaaccatattatgtgctttatgctactaataaaaaggttaaaccgaacaagttcaaagacaaaactcagtagtactttattcagacaggttagtctaaatctgttaaccttatacttgcaactctgatcattcattaattctgcaaattttaataaatgctttattttaagctaaatgctgagatgaaaaaatgaaaccatatgagttagcaaagtagaaaatataggcatattaatcagtaaatgcagaatgataaatgctccatcaatatgcacttgttgtagtgaggccaccgaggagggtgcaatcctctcaacctgggaggagcaggtaggacttcagatgtcatccaactcaaagatatagtgagggacttgatcaaacatttgccaagaccactatgagttaaatgaatagattaggcatttctccaatgttgcaagcttcgaatcatatccaaactcagaacaacatagcttggtcataatgatcccaaggatcctattggccattgtctttgagcctcaaaggaacatattaaaactccataatacccttttgatctattctgaagttaagtagtgaatttacatgatgatgacacaaacactgtaaaggacctctgggttacttgtttataagctagtatttcctgaatcaatttttctgatccctagatatttggtaggtgaagtcatacctatatatccccacaccctagaacagcatctccaacttatttttccctccttgtcttttagtgggagccacatcagtatccaagaggagatccagaagcctctccaaccaggtagggacagttatagattccagacctcagctatggcctttgttacagagtacaaatgttatatagtacaagtttattgtacacatcccattgagtctctgagctttagaattttcttgtagaatttaacagttttttcatgccgtatttacatattattgctagtatttagaattttcttctccaaatgtataacgtttattattgcattttttgtatccactaagtggaaaatcatgcattagatattgtagaagtagatacaacaatgaacaagaactggtcctgaccatgagaggaactgatgatccaatgggggagatagacctgcacgtgtttaataaaaggaagtggctattccggtttctttttgatgggcaagcattttgcaaggccttgggctatgtgtgtgcaaggctaagccagttagttaattgggatttttttaaaaaggcacttcactggggggaaaaggaacatagagttggttattgtccccttgcctataataaaaacctattatttttaattttttaactgggtttgcggttaaatctcacagcccaagagatttgccacttcagatggattccatacacttgcatttaagtatgcaaaaaaattccaattatccagcaatttaaccaaattattggtaacttttctaaaacaaaaaaaaattgtttcccttgttttggcagcaatttcagttacagtcctttactttctactcaagaaaatagtttcaaaaagttgatgtttgttgctaaaagaactatttttatgaataaatataaaactaagaagttatggtgtcccttttttaaaaaatgactcatcaaaagaaataactttttcctttctcttgtaagagaaaaaaattaatctcttttagaattgcaaacatatttccttgatggagaaaatcaattcacatggcatagtcgttatttatccagttcaaaaaccagagtagaatttactactctgtctccattttttctctccccacccccttaacccacattggattcagaaagcttcattctgcaatcagcattgtcctttatctttccagtaaagatagccttttggagtcgaagatgaggaaaagcctgtattttatagtcttggaagtgtcttcttttgccaggacagagagaggagcttcagcagtgagagcaactgaaggggttaatagtggaacttggctgggtgtctgttaaacttttttccctggctctgccctgggtttccccttgaagggatttccctccgcctctgcaacaagaccctttataaagcacagactttctatttcactccgcggtatctgcatcgggcctcactggcttcaggagctgaataccctcccaggcacacacaggtgggacacaaataagggttttggaaccactattttctcatcacgacagcaacttaaaatgcctgggaagatggtcgtgatccttggagcctcaaatatactttggataatgtttgcagcttgtaagttatttcccttcatctgtttcaaatgttagcattcaattttagccctggttttggcttcagtcagttttgcgatagtagtgaagtaaagacactaggattttaaacagtaggaaaagttaatttagtctaacttttaatatgcaattgagttttgctatataccattgtactgtcatagttagagctgaaaattgatgtttttggtatctttttttccaaaggcaattgagtaatttggattctgtctctagtcggtctgtctctttagtttcctatacttgacaatgaggtcaaacttagcaaataacaaaacagctttgataaatgggcatcaaggttggaactgagaattctctctactgaagatgattccataaacttttttggcagtgacttcggtgctttttggctaccttgcagttagtttgaagcagcttaggaaagagatcagtctgatcatattttagacattatacagagaagaaggaggagaatactagacaaactagtggtaaatttgcttctgtctttttttgcttttgcagctcaagcttttaaaatcgagaccaccccagaatctagatatcttgctcagattggtgactccgtctcattgacttgcagcaccacaggctgtgagtccccatttttctcttggagaacccagatagatagtccactgaatgggaaggtgacgaatgaggggaccacatctacgctgacaatgaatcctgttagttttgggaacgaacactcttacctgtgcacagcaacttgtgaatctaggaaattggaaaaaggaatccaggtggagatctactgtgagtgctttagaaaatctttgtt

SEQ ID NO: 4147 - DNA, 6000 bp, Homo sapiens
attggagtagaatactctggaagaaagcctctcaattattctctctctcttcccagagttctttcccgtaattacttctcattcttatttagctcttttaaaagtacaaaaagtgcaaattaccccacaggcaattggggaaaactttaaaatcccatccctgaatgagaggtttgagctttctggatctcttctggagagtagctttgtctttctttttctctgtttttccttgatctgaataataagggcaaaacttctgtctgaaggaaggcatgagaatgatttagcttgaagagtaaaatgatgaaagaagtcatcctcgtaggtatcttggctaatgtacaactctaaaacctctttcagctcctgaaatacccactattgatcaggcatattcaaaactcagcaacagtatcactgtagaatgggctacagtgccgggtgccaccagttacctcctcacggctgaagacggggacacagtcattgaaaccacggtggccaattccccaggcactgtgacgggactaaaggctgcaacctggtatgaaatcaccatcagatccatcagcgctgctgggagaagccaggcgtcacctccaaagcaggcaaagacaggtggctggatggatgctcatcctccgttgagtgtttgcttgtgacttggatcagttatcctggtgctgcaaatgcagaatgtgatttggtgtcacatgagtgcctacaattcaaggcccagaagtgaaagctaccaaatgatgctgtttgagaattcagctatctgcggaggaggtggcatttaaatgccagctgctttgctttggaaaataaagcccatttctgggcatctttaaaagcatcccagcttttaaatctctgaaatagggatttctggttttaacacgccaaatgaagaacacagagaagggattttgctgcactctgaccgtatggcatatatgttaacaaaacaaataaaagcatttggagtttgtcatcagcattactgaaattgatttgataaagttgtacctaggcatatttctgaaaagttatgtgcacattaaaatggtgtaacccctaattttcccattgatttatattatgattataggaatgttttatctaatttctgactaacttcagttaaaagtagtgcctgatatttagcgtttctctgtttcccattcctctgccaagtcatttatgattagtatacacttaaatagcaattatttaatgaaactttgttgtgaatgctcttctaaagcaaataattattgtatattatggatatcaatttacttgcttctaaatttgaattatcctctattggactttggtaacacaaatgcatgtgtttttatttttttagtgttggctgcaccaattctagaagtaagctctccaagttcagactccattcttgtgcagtgggaagctgtatatatggcaattgcattctccgtgtccattatgcgagccaatggcttggggagtatatggaaagagaatactacaaacacctccttgacattcaccagtttagaagccggaactctctacaccataaaggcctatgcatggaatgccaacagaatccctggggatgactccacctgcaatcagagaacaagtaagaacttctcagctcagcctcgaacaattctacttttgattaatgaggggggctgtgtgttgcagccatcaagggcagtgttacatgacaagtacagagcagctggcaacagctatttaaatttattataaagttatttatagtgccttgtctattcctcctcggtagtttaaacgcttcctgcatggataaagaaatgctactcagaatgcacacagcatggctccgccctctaatatccaactcaatttcagcattcacattcgacctcacacaaaagaagatgattcttgttaagtttacccatcaccccttgtccctttctgggttcaggccaattagtataagaattgggccaaataggaattcatttgttcagcagatactgagtgagtgtgtgccaactttgagctggcattgttctagagatacagcagcaagcaaagcaaggtttctgcaggcacagtgcttgatgctgcagtggaattcatgtttcagatctgtttcccaaaggcctcagcttgggtctgaagtcagcatggggcttcccactattgctcctccagctgtggggagaagctgaagcttggtgtgcattttctcaccgtcccacctagaggtcccccgagcaaaggactctgcagcattacaactggaggtccaaattgagctgctggagtgagccaagcgaatgagagagagagagagagagagagagagagagaacgagagggggtgttttttctttccttgaggcagagtaagccatccactggcaatgtaacctacatagataggagactctcaccaaccagattagctgtttctccacttggggaggacacaggaaaggatggaaagaaaccagaaatgttctctccaactttccctaagtttggaggggaatggaagccccatagtgtatgggccaaggcagaatgtagggagaagagaggggtttgccttttatactatttccctagggaggtagtataatcatagccctgcggtgattcatgacagtcttggtgagtcaggatgtctgtgacaagtcagtctccctgggccttttcctaggctggctggcttgctttcttccctccttcccttatcttcccctcctgtccttccctttcctttccctttcacactgcttttttctttccacatttgttgagggcccactgtgtgctgggcataagttagctgatggaaatacaaaagcaaataaagcatgatccctccattcaaagaatggactatgtcaaaggagagaccaatggtgagtcagcgtttccagtttcacctgaccagtgctttggcagaaggctgccgacacagcgaggcacaggaggcagcatcttcatcaggctggggcactgagacagcatcccctagaataacttgtttcttaaagacttcccctacataggtttccccatgttttacaaagctttacagagtttagatttcacctctggattagtttcctagggctgctggaaccacaaactgggtgacttgaacaatagaaatgtttggtttcatggttctggaggctacgaagtctgaaatcaaggtgttggctaggttggttccttctgagggatgtgaggaagaatctgttccaggcctctctccttggcttgtagatggttatcttcacattcacatggaattttccctatatatgtgtatctgtgtccaaatttattcttttaataaggaaatcagccatattggatgagggcccaccctaatgatctcatcttacctgattacatctgctatgaccctatttccaaataaggctacattctgagagtactaggggcaagaacttcaacatatgaacttggagggaactcaagtcaactcataacaggctctcactactctacctatttttcctagttctcccatgcttcctgtgggaaaagcaagttgccctaaaacactgcaggctacccctaccagccctgggcccagcacttccctaaagcagaactgcctctgcagactagctgaccatgcagtgggaaggggcctgtcaagatggcccacgggaaaatcatggcagatgcctgccttacagagaatgagttaggtcctcatgtcctcaaagaggccttcccggccgggcacggtagctcacgcctgtaatcccagcactttgggaggctgaggcgggtggatcacgaggtcaggagatcaagaacatcctggctaacatggtgaaaccccgtctctactaaaaatacaaaaaattagcagagcatggtgccgggcgcctgtagtcccagctactcaggaggctgaggcaggagaatggcatgaaccccggaggcggagtttgcagtaagccaagattgcgacactgcactccagcctgggcgacagagcgaggctccgtctcaaaaaaaagaaaaaaaagaggccttccctgtttgtcccagacatgtccagaggatgctggtctctgctcacagactgtttaagcagtttcctaaggcctgctgcgtgggcgttattacagtacagattccaaagaacggaggccaatttctcccctccccaggccaggacaccttcttacgcttttttaatgcggtaactcttaagaaaggaaggtatatttacaagaatgtagggttaagtgttttggagacactaaaagactgccttaatatgtatgcatcacacttgacaccttccttccttccttttgataatgaatggaaagaaaatctgctcctctagaaacaattatgaccgaaaagctattacagtaaaagttgtagcagatgtcaaaagtaacgaagggatatgtttagtttcattgatcaataacagaaaatatttgacctatcacttaataataacgtacccacgtggcccttttagttctccccatttataatttcatttaactattttaactacttattaaataatgcattaattcattcaaaatatgtcttttggcacctataggtgttaggcatggatcttattagatctatttagatataagaaaaaaataaataacaaaaagggtaaataatatggggtcaaggtcacacagtatattatgagtttgcatagtagcagatgaattaccagttcccaggcatcatcctaaatcccaattttatgctttgaacacttgtaattatccaactattgggtaccttatcctccaggctctgcaacattgttatgccaactcttacgtagtttgtaaggctactacaaaatcttaattgtttctctaaaatgtaggtcctcgggcccctgccaacattcaagtctctttcgatagtggagctctgaaggcatctttttcctgggcacgggcagaaggagctttcaattatactgtgatggctttgagcgactcttcagagctgacctgcagtacaactttcagttcctgcaccatctcttccctccagtgtggaactgaatacttgatttcagttttagcaagtaatgatgctggatctagcaaatcatcttcagcaatgaccctgaaaactggtatgtaaacaagagtgagactgctgtcgggcttgcagccctgactgctgtaagggagacgttcactgacaatgtttctgaatactctggaaaaaatgaaaatgaaagcctggtctaaatgaaagcatagagttggacattctcatgagtttgaataatattgatagtgaagcgagatattgtgtattgcaaaaagcactttttggaaaattaggaggcctggtttctattccagatctttcattaattagttttttctttttcctttgtaaagctgtgaaaattctaagatgtgatttgagttgtacacagctctaactgtgcatacagataactgcgtcttctttgcgtcatgtctcatgtcctaggcttggtgggagccgccattttttaagaaaaagataggatatttctagttctgaacatgcgtttagatatttttccattttcattcttatcagagagataaccacatacacatgtggaagttgactcctctatttagaaatatctatgtgtcttggggatggaaactaacacttaatgaaactaacacttaatgaagacctactatgtctctggcactataagtatgttatttcatttaaatctcatgacaactcagtgaggtgggttctattttctctttttttacataagaaaattgaagctcagagaagttaaataattttcctaagggcacaccgataataagtggtagagctgagattcaagctgctcaagtttgcctaattccaatgcttaaagccaaagaaaatgttgacaattacaataatatctactttatctaacagtca

SEQ ID NO: 4148 - DNA, 6000 bp, Homo sapiens
tttacagagtgctgattggtccattttacagagcaccgattggtccattttacagagtgccgattggtacatttttacagagtgctgattggtgcgtttacaatcctttagctagacacaagagttctccaagtccccaaccgacccagaagcccagctggcttcacctctcagcgcgatcttggctcgctgcaacctccgcctcctgggttcaagcgattctcctgcctcagcctcttgagtagctgggactacaggcgcttgccaccttgcccagctgatttttgtatttttagtagagagggggtttcaccatgttggccaggatggtctcgatttcttgacctcatgatccgcccacctcggcctcccaaaggcaaagagttttttagacaggatgccaaaagcatgatctgtcaacataaaaattggtaaattagagttcaccaaatgacggtgttaggagaattaatagacactatagactgggaggaaatatttgcaaatcacatatccaacaaaggacttgcatccagaatatataaagaattctcaaaattcaatagtaagaaacaaacaatccacattaaaaataggctaaagatttgaacagacacttcaccaaagaaaatatatgagtgagaattagctaggtgtggtggcacatgcatgtaatcccagctactcaggcgtctgaggcacgagaattgctagaacctgtgaggtggaggttgcagtgagccaagattgcagtactgcactccagcctgggcgacagggcgagactctgtttccaaaaaataagataaaataaactgtgtgtgtgtgtgtgtgtgtgtgtgagagagagagagagagagagagagagatagacaaataagcacagtaaaagatgtttaacattatcagccactggggaaatgcatattaaaaccacaatgagttatcatgacataccttttagcatggctaaaaacaaagcaaaactaaactaataccaagttatggagaagatgcaaaacaatggagtacgttgttggtgaaaaacaatgcaatgcaaaatgctacagccactctggaaaaaagtttggtactttcatataaagttaaacgtacatttacacataacctagaaattccatttctgggtatttaccctagaaataaaaaacacatccacacaaaaacctatataagaatgtttacagcagttctactcattagagtcaaaaaaaaaaaaaaaaaaaaaaaaggaaacaacccaaatgtacttctgcgggtgaatggataagcaaactgtgatggatcatatttcctatgagggagtactactcagcaacaaaaaggagcaaactacaagcaacagtatggatgaatctcagaaatattatgctgagtgagagaagccagacacaaaagactacatactgtaaattccatttatctgaaattctagaaaaaacaactgatttataatgactgaaagcagatcaagtggttgcctacagattgattgcaaaagggcaggaaggggctcttgcgaatgcttgatatgttctgtatcttggtcgtggtggtgattatatgggtgtatacatttgtcaaagctcaaagttgaaaatgtatacatcttatgactgaggtggctcacttttaggtatagagcaatgtttatcaagctgctggtagagtcctgctattagtgaatcatcaaattaattccagtgtgtctacctagagaggtatttatcctggaactaatgaagctgaagcttcagcctcccacccttacaaaacatcttccaagtcctggttactaattttgtattcaaaattgtgtacgttttcttttttctttttcttttttttttttttttagacagagtctccctctgactcacaggctggagtgcagtgcacggtctcagctcactgcaacctctgcctcctgggtacaagcaattctcctgccttcagagtagctgggattacaggtgctcaccaccatacccgactgattttttagacagggttgcaccacattggccagcctggtcttgaactcctggcctcaagcaatccacctgcctcggcctcccaaaatgctgggattacaggcgtgagacactgcgcctgggcaaaattttgtactctttttaaagggggccctcaaattgtattaactttaggctccacaaaacctggatctgcctccaggtgaccagaatttttttttaatgaaatggaatagaaaatatgagggtgttttgcaaaacttttgttccagtttatatagtgggtcaggttgtaaaattttatttcttaccagggtttgtggtttagcgcacatgtgtgcacacacaaacacacacacaaagttggaaattcagtgctgtgtagaaatctatgtacatgtgcacaaggaggtctgtacaaatttagtgcagcgctgtttgtaagagagaatctttggaaacaacctaaatgcccatcaatatgagaataaatagactgcagtatgcgtatgtatgtaatagaattctatatagctaaaaggaatgaactaaagctacaggcatcaggctagatgactctcacaaacacaacattaagtaaaaaagtgagttgaagaaggttacctaaagcatgataccatttagataaagtttaaagcaatttgaaaaacaatactacatctgatgggtttctaggtattgctcctatagttatatacatagaaaaagtagtaaaccatgcatgagactgataaaaaaacaaattcagaattggataatggatatttctggggaggaaggagggagggagtgacatgaggtgatatacaggttttcaattttatgcatttttttcttttttaaagaatggatttaaagaaaataatggatttgagacaaaaaagagttaaagattaacaaggctggttggtgtgtaagtggatttttgttgtgttattctgattcttttttgattgtgttgtattctgtatgtatattgttgaagacattggtaatgtgtatgtttttgtgtttgtgtagtgtggcattcacatatatcacactatttaatttttatgacagcttcgtgaagtgagtggaacataaattattatccctattccatagaacaggaacctaagacggcagaacaatttttaaactgtggactggggactgggctaagctgttccttgcttagtctagatttgcatggaaatccactggagaagtttccttcaagtccatgtggcctgatccagcccgagctgccttcctcacgtctctctctaaatcccaaggctctgggaaggcacttactcaatagggaagcgacttgtatagataatagccaaatgtttgttcaaaaggcattcattctgatgtgctggggggagcggttgggggggcggacctgcaggaatgacttggatgagacggatacatatttacaagccagtgcacaggaatttgtccttggacaaatcacttaaccttttactacttatatttatgctctcgtaaaccaagtgtggaatattctcaactgctcacccctgccaaatgcttttcaaaagttagagaccaagttacagttaaaaaaatgcaacgacttcaacccaaccagtcccttcccttcccttcttcccttcccttcccgttctttttctttctttttttttcctctctctctctccccacttctgtctgccttttttctttttctttttttcttttttttgacacagtcttgctctgttgtccaggctggagtgcagtggtgcaatctcggctcactgcaacctccgcctcccgggttcaagtaattctcgtgccttacccttcggagtagctaggagtacaggcacgtgccaccacgccctgctaatttttgtatttttaatagagacagggtttcaccatgttggccaggctggtctcgaactcctggcttcaagtgatacacccgcctccgcctcccaaagtgctgggattacaggcttgagccaccgcgcctagccagacgtcaacttttcagtacgtttcaatatattctttgcgcctcattcctcaaagaccttttttcactctcatttaaatggtaatgaccattttaaaggagattaagtttctacttgttaaagattaataactttttttttggagacagagtcttggactgtcgccagggctggagtgcaatggcgcgatctcggctcactgcaacttccacctcccgggttcaagcaattctcctgcctcagcctcctgagtagctgggattacaggcgcacatcaccacacccggctaattttttgtatttttagtagagacggggtttcactatgttggccagactggtctcgaactcctgacctcgtgatcttctggcctcggcctcccaaagtgctgggattgcaggcgtgagccaccaagcctggccaataacttttaaatcactaacatacaaatgtcttttgttgttttaaaaaaaaatcaaaacaatacctagctagacaggataaaaaatcagcagcttatattctatcgcccttttgtcggtactggcggtatgttaatcgtgaggcttagaaccttgtttcacagccctgatcgtgccttttgagaatcttttacgttctggatattctggtatggaagaggagaaaaaccggcgctgggcagtttgcaatccaggaaaatagggaaggataaacctgaagcctgtgcgtccaggtgcgcctggctagggtttccgacggccgcggtgtctcggtggggaccggtcccggaggcttcggcgaggaggacccggagtcccccccgccccgcggcggaactaaccacggaggcctctggtccctttaaggtgcccggcgagcggagaaagggagcagagggggcgggaggagggttcgggagcgcacgccacgtgacccggcggccaagttcgctgcgagtttgacagaagtttgaatccgagtcgggggctttctgctgccggcggggcaccgcggcggccgcagcctctgagagcacgaacagcagcgcccccgcgtcccagccagccagccagccagactggactccggcccaccgacggccgctcgcgctccggccccgctcgcctgctctgccccggacctgcagctccccgctcccccgccgtgtccgccgcctcccggccagagagccaagccaccacgccgcgcccagcgctcgccgcgccagcatgtcctcgaccgagagcgccggccgcacggcggacaagtcgccgcgccagcaggtagtccctgcgcgcccaggactctcacccgcccctctccacctagatgtcgggctgcacacttatcccacccctggaccgcgtgtgagtggggcaaggggaccagcgccttcccagggttccccaccgccctgaccccccggccggctgtgtctccgcaggtggaccgcctactcgtggggctgcgctggcggcggctggaggagccgctgggcttcatcaaagttctccagtgggtgagtcgctgccccggccccgggctatttcgggagcctgggctgtgacgctgacctgaagcaatggagccagggtgggggctggggaggtgctgcggccgggccacggcggaagggtggggggcggcgacaggtgggcgggggaggggcgggctggggctgcttctccggacttagtggcaggagggtgaagagcgaggcatgcggagtcccggattcggtccttctatgtgcaaggagcctttgcccagggcgctcacatttcacccgggcgagaggacccgggtgtaacctttccagaactctgatcctgcacataccactccttggtgacgggaggggggagaaggacgacggggacgaggtccgctcttcaccaagagggaagccgcagagggcaaaggagggaaggaagcaggcgatggaaaccgtcctgcccccaaacccaccagggcctggatg

SEQ ID NO: 4149 - DNA, 6000 bp, Homo sapiens
caacccctacctcacctgggggtacttggcccctaagccatcaggggcccctggaaacaggctcagggagtgtcctggaagaggcactccctcagccctgagtgtgggggtattcctggggctcctgacagtggtgtggaagcaggagactcccctgtttccaaccaggcataccacagcaccccagcctctcggcagtgtgccagatccaacactcaggatatgaacattttcccagctgcctccaacagaccgaaacttgtcactggggagctgaaagggtcacactcctgggcaaggcagccctatgtgtattcactcactggccccttcgcgtgcagaggctatgccggaccccagggagagcctgacttgctgaaggagacacacatgcatctctgcctgtcacacaaggggcagacacgaaacacaggctcagctcacagacaggctcacaggaatatgtgatgcaagaagggggttgagcgagttgactgggctgaccagagctgggtacagttttaactgtgaagattttctggaggaggcggatctgcagcagattatcccctgaggaggaaggggctgggaggtgaaggggctggggagagaatcccttgggagcagtctctctgtctcttactctgtgagctgtgtcgttccctcctgtccttcccttccctctgtcctcttctgattgccctgcagggtgtctgccctggtgccctgctctttgagctcggcaggttcaaggatgcccctactctgaccccacaacagtcacattcccctggcatcccttttggcccttccaggtcccgggcctcctccgagagtgaattggatgatgaaggcccctgtggtggtgatggggacccaggcctgttccccttccccatgccccggggtgggacccaggcctccagcgaagagagtgaggaggaggggacatctgacgacctccacccaccccctgactgccattatgcaacccggcccccacggccacaggcggtaaggacctggaataggggcctatggagggggtggcccagcactcctggccaacaacatggggaggaggccagatcctgtgtgcagatgctgtctgtgcaccccagaccctgccaaccatgcaccttccttctgcctttagttctgcacctttgggagccggctggtgagcccaggatgctatgtgtttagccgccggctggaccggttctgctcagcactcagctccatgctggaacggcacctcagcacacacatgtggaagtaagtctctcggacccagaatggaagttctagaatggaaattcctaggttccagacatacttgggcttcagaagccctgatctttcctgtatacccataggtgtgccttggctatttgccagcaggaccccagatagggagtagcatgaaaaggaggtgggaaaacttggcagcctagagtttggctaaggcagggcatggaagggtggtctgggggtgaatctagactttcatccatcacttccagtaccttttgggtaactagggataggggatgcccaaaccaagatttaaaatgaagttcctagtgggctgcctcctagttagtaggtactagctaattcctctccacaggcacccctgtgtcttcttcctaaccctcagttccagcatctcccagcagatggcagcaactctggggctctgctgaccatttctaggtggggcagagagactggagtgtgtcttgtgttgggggaagctgtcttgtttcttggcagtcacagtggggctttctttttgctgcaggaagatcccaccggcagctgaacctccagctcaccttgtcaactccccgttatctgctcccctgagcccatcctctacaggcacctgcccccgccttccaggtccaaccctgagacctgcctgcccagcctccatgccccccaccaaggacaaccttgtccccagctaccctgcaggctcccccagcgtggcggctgcctgtagccaggcagagtgcatgggcgggagccaggctatcacctcaccactgcctgccaacacgccatccccgtccttcagcaagctgccgccttccaaggccagcaagtcatccaaaggcaaggacggggtggaggtggaggccccttctcgaaagcggaagttatcccctggccctaccactcttaaacggacctgcatcctggagcccactggaaaagggaaaccctctggctgtaggggcctctcggccaaaactaaaacagccctgagcatggggcttaatgggacaatggggccaagagtgaagcgggcagggcccctggactgtcgtggctcccctcatcagctccccacaccagtcaaggcttctcagctggagaaccggggagcagctggacacccagccaaggccctgccaaccaactgcctctctgaggaggaggtggccaagaagcggaaaaacctggccacttattgccggccagtgaaggccaagcactgtcaggctggtgcccctgctgatgtggcctgctctgtgcgccgcaagaagccaggcccggccctggcctttgaggagaagtgctctacactgaaggtaccagccaggctccctgaagattgatgagggtggggcacacagggggtacctgatacagagaagatgctacattggtgtttgtgcagggaaagggaggaaggggaagttgagagagttcctggactgttttctttaggaagaggtaggtcagttcttagcaaagtgactccagctttttgcctggtgaaccttcccctatccctaaccctttcccttgggctgaggagatgcggcacccctccacccctgcttttgctataatcaaagggctacttctttctgaattggctgtgaccctcattccaggtactggagctacctctgttccctgaaggaaagggagtttgagtccctgggtcacagcctaacatgccgagcagcaaggtgggtgggctggtctcactggtttttcctctgggcatcagggccttgaagggcaggcacacaaccccatgtccacttatgcacatgtgcccacctccaggtgtgcaggtgacaggcaagttctccagggtttccagtaaagcctgcagccagttttatttgcctcttctggtgggagccctggtgtagtgtgctatgtgctctccatatgatctctgccaggagggacttactggaggtgggacgggggtgctctcctgggttagatgtgggcctaatcataaaccctgtgtgttctccagcttcactacccaggctgcccctggtgagctggcattcatcttcccccttgctcagttttactcaccaggccagcagaaggaaatcaagctttagcctctgtagtgcacacagttcactgggtaggacagctggtaggcccccaccctgaccctttctctcgcctcttgtcttcctgcagtcaaaagcccattaacgagaaagtgcctgcccactgcaacggagccgccagcacctcctcccctccagatccgggccccaggctgctgccgctttttataactttatattatttttttttaagaaaaaaagctctttaaaatacctcaagactgtctccctgttctgttgctgctatgaaaatataaaaacagaaacatagaaaaggaaggaaaaaaaataacaaaatgagtgtccttactgtccccagccctaccctgggaggctgagatgataggcagccagactccagctcccatagcttgcctgcaaaagtctcttatgctcattattattattattgtcatcttgtcattttcaatagtgtgaaaaatgtttgtgtcactggggtagtctttccagacaggatgatgaggcgtgtggctctgaatgagtaaggcttcctgagtcttgacaccagagacgactatggtcccattgggaagagaaactcgagagggggagctgcacttctggctctttctaggatccttgccccgagggtctgggaattggcttgtgacccttttctggtccttcagcaaccctaggcatccatccctccctgaattattgcctgcttttcttcagctgttcctgcagcctcattttctcagccacttagggagcttgagctgggttggtcattgctgttgggatattcctgttttctattggacagccttccttccctgcctgtgggtttgcctttaaggaaggggtagaacctttcccagggaggcctccttgggttgaaccaccccttttttggaggcaggaagggaaaaggcatcatcacttgcagaactggtggtgtgggaggccacaggagtgtgggaggccttggtccttcaggatcacctggctcctcagggctgagcagctgctgaggaggcggcagggctgggagtgccctagtttttccatttatctcgctggggaccactcccgtgcagatgcgagaggagacttgcatttccctcctttggtccaccaggttcaaggcactatattttggcgatgtcctttcctattctccttgctcttaggcatggaggaagcttgttccctgaacaagacaaaatgaggtgacaggagacagtgcacagccagggaaatccagtactactagaaatcggctccaaacacttgtttcacagtcttggttcagcgtaccaagtgtgtgatttggggtttcactgaaatcgtttgccacaaaagtaatttccacaggctgcttgggatttaggcccttgtagacagacacacagatacaaatgaaggtgggctgggaactgttcggtccccttctgcctccgggctctcgcgggagcgggcctctccggggcactcgcgtttcccccccagcccccagagggcgctgtgggccactccgccgcactgccggcggcgtccccggggaggagcctctcctgcagccgccaccgcctccgcgatcgcaaacccggaagacgtgttcgggcagctggagtgtacgggcccgcgggccacggccatgcagcccctggaggtaggtctggttcccgctccagctggggagccgagactgacccgctggctgcggagaggcagtgggatcttggcgcacctggtagctttgggcttcaccatctttctgacagcgctgtcccggccaggaaccagtgagtgtgcggggcggggttgcggaagggggcggagtggagatgctggaggggcagcgcttgggagccccgggagacttggaggagggaccccagcagtaaaggggagacagaaacagtggagggattttgagggcctggtggggcggggccccagggatcctggaataatggggttttgggtgctgtgggggaagggcagacgattgaacagaccgaactacttcctcagaaacaggtcccctgatggaggatagaagtgaaggaggccgggcgcggtgggtcatgcctgaaatcccagcactttgggaggccgacgcgggtggatcacttgaggtcaggagttcgagaccagcctggccaacatggtgaaaccccgtctctactaagaatacaaaaattagccaggcgtgatggcgcgcgcctgtagttccagctacttgggaggctgagggaggagaatcgcttgaacccgggaggtggaggctgcagtgagccgagattgcaccactgcactccaccctgtgcgacagagcgagactccgtatcaaaaaaaaaacaaaaaacaacaaccaaaaaaaacaaaaaacaaaaaaggggcagaggactgggctgccagctgagaggtgctgaacggggaacccgggccaaactgttgtatgtgtgtggataaggaggccctcttggttgctcaccctggggctccttggctgctccactttgtccttagttcctgtgcccgattaggattggggatggtacttttctcctgtggctagattctttgggttccacctagctacaggggcaggaacaatggtaccaag

SEQ ID NO: 4150 - DNA, 6000 bp, Homo sapiens
aaatgggaatttgaataatactgaccttataatattacactgtataagtttatgtatttccatatgccatagaaaaggaagaatttgttttctagatgctcagaggagagttggccactgacagctggagtgttcaggaagatttcatggtggaggcctttcttcccatttccatctcagccccttcctgtggcttcaggcccacctccccatgagtgctgtcatcgaggacacctctcaggcttcatctttttaactttgctgcagatttcaacactgtgaactacctttccttcttacaattctctttcttttgtgatacatgtcatcttctcagctcttgactcttctctgtcttctttcctgcccctcctgctcctcagaaataagcatgtcctgccaagcctctatcctcatgaccatcttctgtgtgcttcctcaagagagtctcgccttcccccaaaccctttatggttatgacttccaagtgtgtgtctcctgccctctttcctggactttctactcatatttctaaccacaccttaggtattctttcatcaactattttttttcacattgtttttctttttatttaaacaaggttgaacttacaaatcaaagcaatatgggagtgattttagactagcaatattatttttagttattcagatttcatcaactatttatggacagtctactgtgtgttaaagttgggcatggcctctgtcctgtggagcttccacatcaaccaaggagactgtccctaagcaaccagtcatgccctcagtacttaattacaattgtgacaagggctaaaaaggagaagaaaagtccagctgggaggttgacccagttcttctccatggtcaggagagggtccagttcatggtgaactctgttggacgagtgggcaggcagtgagggaagagaacaagggggactgagcagatccctgtcagggcttatgggctaaagtctgagtcaggaaggagtggggggggtaggaagagctgaaagaagggtggtgtattacagggaagtccatggggggaagggtgtgagatgaggctggagacagggaaggtccctgaaagacatgctaaagatgtgggtgcaactctgcaagcttaaaaaggttgtgattatatttgtacttctaaaagatcactcttgctgctatgtggagagaagggagtaagactggagttagtgtcaagaggggactgtgagtccaggtgagtgattattatagtttggaataggcagttgggggcgggaggtggtggcagcagaattaaagagaaacgaccagatcccagaggtatgtagcaactaagatctccaggatttactgatagattttatgaaaggggaagtctcaagggtgattattggggttttggctggctcaactattcacagagccagggagcacaggaggagaagcaagaagccaactgctgaatgttctgcagggtagatctttgaatgttgagttcatttcttcaacatgtgtagctctgtggagccaagtggaaaggtggagttggagggtgaatatgtggagctcagaagactgtctggaatggagacagacatgcagaagtcatcagtgtaggagatggtctaggaagggtacagagtgagaagagggtttggctgcgagacgtccaacacttaaagatcagcaacggaaactgaggggtgagcagaaggctaggaggaaaacctgggagcgcagaattccagaaggggagggaagagagtgtcagaaggaaggagagggcacccacaataagcattacagaaaggtcagtaagatgaggactggaagatgtcctgtggatttagtgacacagaagtcactggtgaccttagtgagacccttcttggcagcatgatggggcagaagtgtgttaaggagtgtgtaggggtgaggaaatggaggcagaaaatgaagaaatgagggatgagagcctagtgacatttttttttgagatggactctagtgacattttaaaggaagatatttgcatatgctctcgagctgctaaaaagcatccagagaaagggaaagttaatgagacagacaggagagactggattaactaatgggtagctgaggttctcaagaaggtgtggggccatgggacccaggggacaggtggaggctggtctacagaggagagactctccctaccatatccagggaagagggagaagagggtatgtgcagatggaaacggtttaattctcgttggaaaaccgaggggtcttccaaatgaagtaaggcagttcctgagacagcagggaagtatgacgtggggggaaagtaggatgagtgtttggggagagttctggttggaatggccttgatcagagtggggaagtaagttgaccagagaattacagggaagtccttaggaagtgtgaggagcccacttgaagttggtggccatgaaggcagacagagactggtctgtggtgtgtttctgtctagagaacttggcacaaagaaaccaggtattaagttcattcaagggtggggtttcactgggtagatgtgataaaaggcagtgaggcaagggcatcttctagttgtcaccttgatatcccacagacatgtcattttcaatatgtcccaaatccattatctctttaccttcttccccaaatctgctcctctttctaaattccccatcttggttaataacaatacaatcacctagtaatacccctaataacagttatttattaagaacatgttatcagatatgataacagatattttactatttttttttttttagagaagagcacttgctatgttgcccacgctgggcttaagcaattctcccaacttggcctcccaaagtgctgggattgcagctgtgagccaccgtgcctggccaataacagatattttagaacaatcatctcatgatcatcataacaaccttatgaggtatgtaccattcattttacagacacggaaacagaagttcagagaggttgtgtcactagctcaaggtctctagtaaatggcagtcaggatgaaaacttagatctatgaggctccaaagtccttcccctttccatgaccacaccacctgtaagttctcttgccttaatactgcctatctctgataggttccttcctcccacctcccataccacgtcaattgtcacattctatttgttcatctctgtcctgtctcttgctacttcctgccatgccactccaccccatctgcttccctggttgcttccaccagaatgtaaaccctataagggcagagattattatctgtctcattttttgctgtctccttagggcctggaacagtgtaaagtaaccattaggctcactaaataattgttgaaagaatttttctatcaggagataattctctatgggtttattgtgttcccacaagtcttgtgggcagaggcactgatggcttttttgttcccattatcttttagaggatggttgcatagcaaacagcctccaacgatagcgtctccctctagtggagagcagttctgtttgctgtccagtataataaagatatgtctaaggcaaatgtcgggcaagtttgcttgcagcgcattataaaagattgaggtttcctaagcttggagtttctcagtgtgtgtggtccagtctcatgtcccacccataggacttcagagttaagggaaggtgatctgaatgtgaagctcttgcagcctgctgtgccatgagtaattaaagtcctttgtgtctggcccagagtttcctgtcttctgatggcatccatgaaactggcagggtaacttagattgtaagtgtaaaatctcagactcttcagagttcttgacaatggcccttaccacctttcactaagacaacctccatctcccattcctcccaaacacctcccttggatgccaaaggcccccttagtgttccctagaagagagataattcatccagactctcataacagccccccaaggccctggcaggatggctcctgcctccctgtctaacttcacctctcatcatccccacccctgctccagctcaggcaaccaccaccccaccccacgcatacgtttctactctcttgcatctatgcccttgccatgctgtccactccacaggggtcatccttctccccttctgactgtccatcctttaggccaggatcttccaagaggcctactcagagaccagtcagaatttccctgtcactgtctccccactttactcatcttgtacggttctccaatcctttcgctttgtactgtaaagacctgggtcaacccacactgcctctccaggaggttccctcacgtctgtgatcctttcagcctctgcagcccctggcatacagtaggtgctcaacagatgagtgatgtcctaagagttgacctgcacagggaacggccttgcagaatggtaggatggaaggacggaggagtggaaggacatctagaggaaagggaacagaagcacggaggtggaaatgtctagggcaggggaaataaccacatgaattgagattgagttcattaaagaaggccaaaagaggtgagtctgaaaagaagaaagtgaggcccagggtccaggagggctttaaccattggggccccattcctctccgagggcagaagccctggcgagggctccagggtctgcatcccctgaccaggggcctcaagaagctaagcccccttgcaactccctctcccgccccacgcccaccctctccgcctacgtcggccatcagagcctcgctcgctgcccgagagcctcgcattgacgccggcccgcgcgtgagtcaagcctgcgtcacggcgccccgccgccagggtggcctttcggaaagcgagggaacagtgcgcgcagcgctccgcccagctccgttctgctccgcagagccggcgctgccagggcgcagggagggcggcactcggccccagtcttcgcaatcccgcgcgctctctccgccgtgggacctgggtccccgcgccgctcccctgagccccgagcgcgcggcgggcgggagccaggttgggactggtggtgaggcagggagtgaggagcgagcggagtcgcgtgcgccggcgcgcagctccgggtcgccccagccccagccgggggcctgtggcccgggggaggagctgtgcgtccgcgacccgtcggggatcgcagctgctcggccggagtgcacgggccgagtctgcgcgactacccacgcgtgacaggtgagtcgctggccgcgccccgcctggctttaccgggccggccactgcaactttccctgttctggccccgccccagccagggagggctgaggaccaaggtgtgaggcggcgctgcccccgcatccgcccgaccctgcgctcgtcccgggctcctctcgccgctccagccgccgttgcctggcgacggagccccggggcccgctctccttcgcgcatcggggtccccagcggcgtacgcacgggttggacaccgggcttcagcttctggtgctcagaagggcccaagaactccggaggaaattgggcttagctgcggaggcaagcgcccgcggagaaccggagggggcctgtccggcccatccgcggcttgaaactgcgcgcccagggcgcagttccactgggagcctcttacgcagctggagaccccagccccagccgctcggcctcaggcctgtgaccttgacagtaacattggcaagcgaagcagaactgtcacgcccgagatgaatatttaattctcagtcctggggctggtcctcgctggattcggagctagcagagagcccttcctccctcgtgggaagcgcatctggggaacggaatggctgagacaggggacgtgcgtgtggtgcccatctggagggggcgccgtcctggcgggtcgagaggcctctgctgcatttatgcctgtgtgcgccgtgctctgaagcgatgctggatgctcgcagtactatgggtgggccg

SEQ ID NO: 4151 - DNA, 6000 bp, Homo sapiens
gcctgggattgtgctgagcactgggaatatacaaaggaccaggcaagagtccctggctcgcagaggcagtcacaatctgacttgggcatctcccttcctggcacactcactggtgccaggcacgctgctgcattctttaattacatcatcttaggtgggaagaaaccttgagatgggagaagactatgcctgtcattcaaccacaaacccttacaaagattgatccatgccaggcacagtcctggctgcagagcataaagactcagtggggatctgctctctgtccctgggtctgagctgcctgggttctgggtccctccattctgcccagggctgacccaagcagggaagaatccctggacttcaggagcacccaagaggaacctgagtttggcctgtctctccagacacctgcttcccctttccccaggatattgctggaggggactgggcccatcaggactaattaactcctctaatggaatgaaccagtttttcctggaacttagcccaggtgggagcaatctctacttttctagatggagaaatgctaagtgtcaagaggtcttgccagccggaccctgggctagcgtgcatgtggcaggcgcggtggcgggagtgtgctgtctggatgcaggctgagttcccagcccaggagccttaaacaaggaggcctctagggtccactcagctggtggcccccgtatcgttctctgtccttggcccaacaccagccctagctccgtctctcagagttcgctgctgctgcttaggcctgacatccctaagcggggggaaggtgtccatgagctaacactcaggtcccctccaaccctatgactccaggtccatagtgtatgaggccctgagccctgcccaggcccgagcttctgatctcttctctttaagagctgggccttcaaaggccacctttgagccccagatacaacttcactgggattaccacagcaacccaaccctgctttcagtcctgaggcagagccattctactgatcttcacaagacctgaattactagggctaggttctccccagagcccctcccccaccaacccccctccccccaaagaaggctctcacatttgatttggagcctgcaagtctctgcaggctgcttggggttgggggaggcaggatgaagtgagctgagacgcagacaggaggctgccagcctgctcttgccttcccttctcttgttcccccatgagcggggaggccctatcaccctctaatgagtctgataaagcaattcaattttccaggctgggagagagtgaggcatgctgggaaaggatgctggctccttggcctggacctgaaggagggtcagtccctggcaggagctagaataccaaaaagggaaagtgtgagcaccaatggatagaaccttgccttggcctggagcccctcaccacaaacaggtttcaaagaaggaagatggagaggagattggatggctccagtcatcctaaagaggctgagcccatacaaagctcccagtggggaaaggggaagggtaaacggctttgatttcaggctttcagcttcctacggacagggtcagcgtcggcactcagagggtgaggaccttattatgcgggtggagggggggcctggaaagggtgcaggtgcttgacagcctccatcggtgcccctttagaatctcccatggccctctcttcctattctttcaccacaccctcacccctgatgagggaaacccgctgtggctgacaccttctgtgaactggctttcagacaggtgctcttccctgacagcctgaagaagccagggcactaaggagaggacaaaagagaaaaggtgaaaatgagggaaagaagcttggggaactaggaatttccaatagtggctgctttgtggtcttgcttaagcctgtcaggtatcaaggtcttggaggaatgaagaagggagggagtaggcagagtcccaatggcagagttaggctagaagatgtacctgaggtcctggaatcaacaggaagcccagaatcagctgccaccccatctgcccacatcacagcccccagagctcagggcgaggtctggagccaggatgttctagcaccaccagagggcagcaccctcacatccatggtaggctgtgtcacagtagcctgggcagggggctctcctatccttccccggctctgtgttttgagggaacaccaagacctcacacaaagaaatgatggggacaagtcccatagtgctaactgcagcatatcgactccctcagagaggtacacgtaacaggtgagcccagagttctagaataaaccttcagcaagggtgaggcattctctggaggcctcaggactgaggctgagctcccctctcccgagctggtcagtgcacagagctgggagtcctggccccatgcacctttacccagctgcctctctcaggctgggccctctgtttttgtcagctcttcctaggttcctatgcctgtgtcccaactttctgatcttcctcccttccctcttggcctcctttttccctggcagctttctccctttacccatctccccaggtgctcatcactatccacaagcaccgcagagtggaagcaccagttgggcagatttactaggatgagtggctgttttattcactgatgtatttccagtacccggaactgcttctggcatatcgtaggtattcaataagtgttcattgagttaataagtcaatcaggggtgggatactatgggttttgtccccttgcctactacactccctttgttacaattactgagctcagtcatcctgatgaacggaaagcaggggagagaccccaagggactttgccaggacacggaccagataggacttgaaagttattcattacattaatattctgtggttctttcttcctcactccagtttctggcctgtcccgggtcttctcttcccagtcacacttgggatatttcttttcactgcagcaaactcaaagacagctaaactctgaaatacaaacatcagtttcgaggagcagggactgggcacaaagggggtgccagtaaatgtgtgtttctgattaactcacctcccctgcgtgtcagtacagatcatcaaagatcattgtcattttggttttctggcctcattaataatgagacttttgcttgtaaaaatcccttgcattggcactgagcttttaacctttcctgagacacacataggcccttgtcttgtttttctcagttgagctaggtactgcctgatctggaactgggaaggtgcacaggtgtccagggcaggtgtgtcattcacctttcatttctgcctcaagatctctttacatcatccagacaggcatggaggctgcctgaagctgtaaaaaagaaaaaaaaacccaatggggattaatatgaagatgtaaaataggttctggacttaacaaaaacaaatgaatctggaaattgctcttgggatagggccagtaaagtcctgttggtgcctacgttttgggtatggcagcttctcaatcacttagcaaacaggttctcagaggcaggcactgtgggagctatcaagatgaaaaagcacaatgccgcctgcaggagctcagggttagggaggggagaggagacatatacacaggcaaagtcaaattgtaatgggtagaataagagtagaaacaggaaggggtcatgaggcaggacacgggcatttcctatgtggaccccagagcaatgacgagcaaaggctttaactaatgacttttcagggccacccacccactccacatccataaaacatttcgcgatgaacacagccagagctacggtttccttccatccggcacaagaagcgcttctctgcccaaggccaccccgtcctccattccatcgcggggactttggtggctgggacagaggcggagagcatcaagaccatgggtgtcttgggctacgttgggcctccgaggcgcaggatgcggggcggggtggtcagaaggccccaacacggtccctgggaaaggagagggcagcctgatcctcgcgacagcgtctctaccctctttcttccttggccttccgtcagccgcagtgaaacggcaacagtgcgaccagcttggcggggagggggcgagggacgaagcaagaagagccgggcggaggttagaggtcaggggtcgagagcgcttcggtgtcagcgggctgcggtgggaggagctgcgggcccgggggaggcgcggagcagggctgaggggggcgggaggggttgccggcggaagcgcgcaggggcggcgcgctgggctgggcactggcggcgaggaggtgacgcgcttggttggggctcggctccggggaggaagactgcgctcggtcgccagggcctgcagtgagtcggatcggccccgcgctgcgccgcgccccgcccaccccgccccgcgaagggcgcgtctgggcgaggcggggccccggaggaaaaggcgccactggggcgtggcggccgctgccagcgccggagggagaccatgagcccctagggccccagcccaccggcgccgaggcgccccctcccctatgccacctcgcgcccgccccctgccgcgcgcgagccaaggccggcgccccgcccggagatgggcagacgcgtagatggcgtggctcccagcgccgccagatcgcaggaaccaggcgccggggcgttgcgctgaggctccctctccgcgcggcccgggaagcctgcaggtgtccttggccgctcggccgccgcccccggtacaccttcgccagtgcccagagcccggctccccagagcggccccgccccccaggctcggcgccgcgcaggacgccccgtctgaggcacccccgccccagcgcggcccccgcagcgctgcgcccggtccggcgcagctcccagccgcggacgcaggacccgaggctcgctcctgcgggcgcgcttgttttccagctgccgcctcgccctgcgcagcccccgcccgcccggccgccgctctctgctctgccccgcctgccttcctcgcccggcgctggatttatgaatggggggaagaggccacatgccgccgccgccgcctcgtgttgaccgcaagcagcccgggcccacggagctccggctgccgtgagagtgtcggcctggccccggcagccgctcggaggacttgttgctgctgcgctgccgccgctgcggggaagccggctattccggggcttggtgcggtcttggagccggagggtggcccgtgtgagcgcgagcgccccggaccttcgcggtgcgcgtggactgtgcgcttcctcgtctttggtcggggtgaaggcgggggcgtgtccccggcccagagcgtttgtgtgtcccgtcgtagcgggggaccgcgtgtgtgcttgcttctacttccccgggtcctccctctctgcgcctccctctctccggagcttcctgccctaaccccaaccacctgtgtaccggagaaatccaactcctcccgctccgcgtcctagggggataggcaggggcaagcccaagccgcagagggggccgccaccgcctcctgcctcctcttcgtctcctccccctcccccgtctgacgctgcctcctcgggaagggtgtttggagggcagcggccgccccaagccggagccccgcagcgcttcttatgatcagctcggtgtgtgtctcctcctaccgcgggcgcaagtcggggaacaagcctccgtccaaaacatgtctgaaggaggagatggccaagggcgaggcgtcggagaagatcatcatcaacgtgggcggcacgcgacatgagacctaccgcagcaccctgcgcaccctaccgggaacccgcctcgcctggctggccgaccccgacggcgggggccggcccgagaccgatggcggcggtgtgggtagcagcggcagcagcggcggcgggggctgcgagttcttcttcgacaggcacccgggcgtcttcgcctacgtgctcaac

SEQ ID NO: 4152 - DNA, 6000 bp, Homo sapiens
actattcttcacaggactagaaaaaaactattttaaaattcatatggagctaaaaacaaatagccaagataatcctaagcaaaaagaacaaagctggaagcatcatgttacctgactttgaactatactacaaggctatcataaccaaaacagcatggtactgatacagaaacagatgcatagaccaatggaacagaatagagagcccagaaataatgctgcacacctacaaccatctgatcttcaacaaagctgacaaaaacaagcaatatggaaaggactccatactcaataaatggtactgggctaactggctatccatatgcagaagattgaaactggaccccttccttataccatataccaaaatcaactcaagatggattaaattttaaatctgaaacctaaaactttaaaaaccctgggaaataacctaggaaataccattctggacaaaggccctggtaaagacttgatgatgaagatgccaaaagcaattgtgacaaaaacaagaattgataaataaggcctaattaaaccaaagagcttctgaacagaaagggaaactatcaacagagtaaatagacagcctggagcatgggaggaaatatctgcaaactatgtatctgacaaaggtctaatatccaaatctataagaaggttaaactaattaacaagcaaaaaccaaacaactccattaaaaagtgagcaaaggacatgaatagacatttgtcaaaggaagtcacacatgtagccaacaggcatatgaaaaaatactcagcatcgctaattattagaaaaatgcaaatcaaaaccacaatgagataccatctcacaccagtcaaaatgcctattattaaaaagccaaaaaataacaggtgttggcgaggtttcagagtaaagagaatgcttatacgctgttggtgggaatgtaaattagattagccagtgtggaaaacagtttggaaatttctcaaagaacataaaacagaactgccttttgacccagcaatcccattactgggtacatatctaaaggaatacaaattgttctatcataaagacacacgcatgtgtatgttcatcatagcactctttacaataacaaagacacggaatcaatctaaatgcccatcaatgatagactggataaagaaaatgtggtacatatacaccatggaatactatgcagtcataagaaagaatgagatgatgttctttgcagcaacatggatgcaggtggagggccttatcctaagcaatttaatgcaggaagagaaaaccaaatattgcatattctcacttataagtgggaactcaacactgagtacacatggacgcaaagaagggaaaaacagacactagggcctacttgagggtggagcggggaaggagggagaggattaaaaaactacctgttggtcactatacttaccccctgggtgatgaaataatctgtacaccaaaaccctgtcacatgcaatttacctatataataagcctgcatatgtacgtttgaacctaaaatgaaagttaagaatgatgttctacagcattttcttcaaaactttactcttagagcccataagcaaaatccaatgtactactagttaactttaatctcccatttgaagtttccaatcttataattctcacaaaatctatgcctcttaaactctaatatccttatatacttaaataactctgaaataaacttggaagttctatctgtattctcatatttcaacagtgattatcttccaataataaaacagaactactcacttagaaggcttttgaaaaaggcctaaatgggggctaaatacaaaatgtctatgtgagtatttgtctattcagaatgtattttggcaaatacgactgcacagtagtagagtactcataatttgtattcccgctattcgtctggccaagttcaagtttcctaaactctcagattctattatcatctatgatggtgatcaatataccccgtattgagaagaccaagccatgagtctgagcttctgctaaatgccttttctaatttagttttttcaaagtttttgagcgttcttttgggttattcaataacatggggtttcctgatattgtcttattctctatttgtttttgttcttgtccctccaaatgaattctaaatatctgatggtcagaaacagaattaattctcaataaaattttataggtatgggtataagtgggcacgttgttctctaccaaacccctaaacccaggaaacagccacctctagttgtccggcacttggaacaacccttcccagtgaaatgatggaaagaggcacattcaaggaaaaatgttctgcattaaaatggtcacctattttgctgtgaacaatttgtcttgagatagtcttcccgatattcctaagattcccccttatttatcacttctctctctgcagatgttcagtctacctatctctttcttctccttactctctctgcctgtcccaaatttctggttcccctaacttgcaggcctcacattacctgaaactattcaaatatttatagaacacctcttatgtgccagacccaataccaggcactaaaaatacagtcatgagcaagatcacccaacatacacagagtaacacagaacctacagagctttcagtctagtggggaaaacaatgaaaaacaaggaatgacagagggtggaggaatgcctgtgggcaatgggagcagagagcaggagtaactgttcctgcctggagggctttctggtgctatgatgggggatgagtaaggaattaagtgaacaggtgagaggatattctagagagagctcgtgagacagaactagattgatttgtttaagcaactaaaaggaattccatatccagtgttacccagtgtgaggagatcttgggggtggggccggggaagaaatagccggctgagagttttaagctggggagtcatgtgattaaatttgcattttagaaggctctcctcccttcttcctgaggacagactgaagaaacatccaaggtggtcttgaaggacactgggatcctgtaacacaggtaaaagataaagactaatgtaatttctatggggttggagagaggtggtctggtttgagaaatatttaggcaaaagcataactgacaggacttggtggctgataataggtggtggtgtgggagagagagtagcttaagaggacacctggtttctcatgaacgtggctgaaaggccagtcaggcctttcctggatggtggacatggtgggaggagcaggcttgagtgtggggatgccaagttaatcaaactgaagttggatattggatttgaggtgcctgggagagagtggagctcaaaggagagatcatggcatctatatagatttgtgaatctttggaacagacagatagtaattagagccatcagaatgggtgagataattaggaaaatatgagttcagccagaagcctctcctcagccccaccacttcagggacctgtaagcatggcagcagctctgagtgagggtcagtgattccagccgaggtgcagagactttttaatagcattccctaaagtgtagttacactgaaaaattgttccccaagagaaactacacacacacacacacacacacacacacacacaccacacagttccatgctcagataagtttggagaaatctatatattatttcccctgcttagagaatattaaggactgacaagttctgcagtaaagacctttttaccttcatttaattcagttttccccacaagacagccctggctggagattactctggatctgaatgtctcagggtgaaggaagcgggagacagctagctttcccagaggcatgcccgcaagtcagcaccgcagagtgcatctatctgttcatttataagatgaaaacattggggcccagtgattgcttccaagtttcatagttagctagtgatacatttgggttgtcacatactcctttgacccaatctaagaaaattccagtgatgcagcatagtgaaaccagaaacacatttttcaaaatatattgatcacagtgtttctcaaaaggccttctctgtgaccttgaattttaatcctacctctgacatgtcttagttgtatgagcttgggcaaattttctaacctctttgagcgcctgttttcttgtatataaataaggatgtaacagtaaccagtaggattattattaggtgttaccattaataaactgaggctgacagattgagacttgctcaagatctcacagctaaaagagataaagctggaactgaaactcagatctttggctccaaatgtggtgtttcctgtactaaccaaatcatttctaccagtgcccctgggattatgccttggggactcaccttaagacagtcttgctctcgagacagagaagtctgcaaatggtgtccaattcaagtctagagactggctgaagccagacagagggagtatgaggagggggcagagaatcttcagaaagacattccaaagtctcgggcctagaaaatgtttagaaatattggttcctgtgttcccctccagtctgtctacctgaatgggaaactggtggtggggccaggcatacttctttttgaacaaatacacagttaattctgagatgccaccttgattgagaagcactgtccttttctaagcaaaaatcattgccaaattaccctagaatccaccactgctcacagatctgtgcctgaaccaacttggttttgaagttttcttttgtttcacaaaactagtttagggtgggctgtgagaggaagcttctaaaaagccactgggaaagtactaaatctctgagactaaagagggcggactcagcctcacttcctccttcttctcatctgggcttcctgtcgtcacagcatgatcatattttttcacccttcacttctccttttacacaaatagccccggatatctgtgttaccagccttgtctcggccacctcaaggataatcactaaattctgccgaaaggactgaggaacggtgcctggaaaaggtaaggttgatgacgttttaacttggcttgctgtctaatgtggggtagggcgtattcttaggggtctccatatacctctctagtaaccataaaatctccggcaacttctctttcacaaatatttagtgcacaaagtaaaacagattagcaagatcctagtaacatccccaaaggcaatcaggccagaaatacttttacttaatcaggttcccattatctaaatctctgagtcgaggcattcacatgccttaattgcttcagagcttgaattactctgtgtagtaattcctgatgcctggagctttctatgcgagatgacattggggagatttcctatgtgctctggtcttcagaaaattggtcttgtgattttaaagtgaggaaagaacccacagccagagctgtctttagaaagacagctagaagacacagttctttttcatttgagaaaatttcaaaagtaaatttagtgactcccactgtggttcttcaaagccactaaatagaaaggtggctaaaaatcaaaacaccaggatgtgctcagtaactgtattttaaaaggtgaaagctagacatctctaaaggatgcatagattgttggcttttaaggagcaggaagcacattgggatcctcagcatttccccaaattatccttggtgtacaaaacatgaccactgataaatgtcacatgaaatgcacgtataaaatgcaatccccaaaacttgatactgcagtaatttccaatcatgtgctgtaactaatgactgaggttgcatggactcagcaaagtgttagcagagcttcggtcctgactctctgtgaccaccatcggaaactctatgtaagagctttcttcttccaagacctgtgagaatttcacttgattatgccctggagcagaaaggagaaagttctctttgattacacccacccatctaag

SEQ ID NO: 4153 - DNA, 6000 bp, Homo sapiens
aaatagtagtcatatgagatgaaggtctgaactaagtagcagtggggatggagagctggggaaagatgtgagacattcctgagggggaatcaagagagtctagtgattagatgtgacaggaaagaatggggggaaagcacaggcaatcctgagacttctagtttgaaagaatagaattgatcaggttagttagctatgactttgcaaagagtaaagtcccgaggtaaggagatatagggcagctaaattgtaagggattggggtttatgttaaggtgtggaacaagggatatcaagtgagtagtttttttttttttaagtaatctggagctggggtattctgtgcttatggattccactgaactctaaaatctcagcccaggtactttagcacccacgaattaattagacaatttagggcaatgaatataaaagctctatattccattgttaatcagaaatgaatcattaaattctgttaaaaacacatatttgcgctagaaaaagtaaattatgggagtcggcgccggcgagcgccgcccgggaggcagcggctggaggagcggacgggccccgcggggcccgagggcaaggagcagccgcctgccttggcctcccaaagtgccgagattgcagcctctgcccggctgccaccccgtctgggaagtgaggagtgtctctgcctggccgcccatcgtctgggatgtgaggagcccctctgcctggctgcccagtctggaaagtgaggagcgtctccgcccggccgccatcccatctaggaagtgaggagcgcctcttcccagccgccatcacatctaggaagtgaggagcgtctctgcccggccgcccatcgtctgagatgtggggagcgcctctgccccgccgccccatctgggatgtgaggagcgcctctgcccggccgagaccccgtctgggaggtgaggagcgtctctgcccggccgccccgtctgagaagtgaggagaccctctgcctggcaaccaccccgtctgagaagtgaggagcccctccacccggcagctgccccgtctgagaagtgaggagcctctccgcccggcagccaccccatctgggaagtgaggagcgtctccgcccggcagccaccccgtccgggaaggaggtgggggggggtcagccccccgcccggccagccgccccatccgggagggaggtggggggtcagcccccacgcccggccagccgtgccatccgggagggaggtgggggggtcagccccccgcctggccagccgtgccatccgggagggaggtgggggggtcagccccccgcccggccagctgccccgtccgggaggtgaggggcgcctctgcccggccgcccctactgggaagtgaggagctcctcagcccagccagccaacccgtccgggagggagatgggggggtcagcccccccacccggccagccgccccgtccggtagggaggtaggggggtcagccccccgcctggccagccgccccgtccgggagggaggtgggggggtcagccctccgcccagccagccgccccgtctgggaggtgaggggcgcctctgcccagccgcccctactgggaagtgaggagcccctctgcccggccagccgccccgtccgggagggaggtggggggggtcagccccccgcccggccagccgccatgtccgggagggaggtgggggggtcagccctccgcccggccagccgccccgtctgggaggtgaggggcgcctctgcccggccgcccctactgggaagtgaggagcccctctgcccggccagccgccccgtccgggagggaggtgggggggtcggccccccgcccggccagccgccccgtccgggagggaggtgggggggtcggccccccgcccggccagccgccccgtccgggagggaggtggggggggtcagcccccccgcccagccagccgccctgtccgggaggtgaggggcgcctctgcccggccgcccctactgggaagtgaggagcccctctgcccggccagccgccccgtccgggagggaggtgggggggtcggccccccgcccggccagccgccccgtccgggagggaggtggggggggtcggcccccctgcccggccagccgccccgtccgggaggtgaggggcgcctctgcccggccagccgccccgtccgggagggaggtgggggggtcagccccccgcccggccagccgccccgtccgggagggaggttggggggtcagccccccgcccggccagccgccccgtccgggagggaggtggggggggtcagcccccctgcccggccagccgccccgtccgggaggtgaggggcgcctctgcccggccgcccctactgggaagtgaggagcccctctgcccggccaccaccccgtctgggaggtgtgcccaacagctcattgagaacgggccaggatgacaatggcggctttgtggaatagaaaggcgggaaaggtggggaaaagattgagaaatcggatggttgccgtgtctgtgtagaaagaagtagacatgggagacttttcattttgttctgcactaagaaaaattcctctgccttgggatcctgttgatctgtgaccttacccccaaccctgtgctctctgaaacatgtgctgtgtccactcagggttaaatggattaagggcggtgcaagatgtgctttgttaaacagatgcttgaaggcagcatgctcgttaagagtcatcaccactccctaatctcaagtacccagggacacaaacactgcggaaggccgcagggtcctctgcctaggaaaaccagagacctttgttcacttgtttatctgctgaccttccctccactattgtcccatgaccctgccaaatccccctctgtgagaaacacccaagaattatcaataaaaaaataaattaaaaaaaaaaaaaaaaaacacatatttgcggctgggtgtggtggctcatgcttgaaatcccagcactctgggaggccgaggcgggcggatcacctaaggttgggagttcgagaccagcctgaccaacatggagaaaccccatctctactaaaactacaaaattagctgggcgtggtggcgcatgactgtaatcccagctactcaggaggctgaggcaggagaatcgcttgaatccaggaggcggaggttgcggtgagccgagattgtgccattgcactccagcctgggcaacaataatgaaattttgtctcaaaaaaaaaacaaaaaaaacaaaaaaaacaaaaaaaacgtgtatttgtggccagtcacagtggctcatgcctgtaatcccagcactttgagagcccgaggtgggtggatcacctgaggtcaggagttcgagaccagcctggccaaaaaggcaaaaccccgtctctactaaaaatacaaaaattagccgggcatggtggtgcacacctgtagtcccagctactaggcaggctgaggcaggagaatcgcttgaatacggcaggcagagattgcagtgagccacttactgcggaggatacaggttagagagcattaatttctaatggccccatttggtatagtttcataggaaagctctgaaactataatgtagaaaggaactaaactgcctcctttttttttttgtaaggttcctgcctatgccggatttcttaccagagtttgttaagtctgctcaacagctaagggaagaaggctaagagtaagtttcattccgctgtcttggctttaaaagtttggtttggactgtagcattggatatggccttgtttccaatatatacttcaatattaaaaaaaaaaaacagaaaaaggtttttaaaaacataattatgactccataatctgccatgggaaagattgctttcagttactttctatgagaaccctaacctaggcattatcattctttttaacctgctcagattttcaatttatgtcagaaaacccatgttaatgtcgaacctgcccctgcctcaagagtaacttggtttaacctcttggggcttgttgcatcatcagcaataattgtcttgccaatgtcacagtcactgaaggagcaaacaagataacagatgcaaacgccctttgaaaagttcactacgtataagtgaaccatcactattattctcaaagtcttatttacaaccttggatggctgaatgagcataagatggccagacttcactgttcctagtaagttttccatagcctctgctttaggagaaataaatttcctcacatccagtctttgctttgttgactgctcaacaccctcttgtctcgcttgcttttctgagagtgaccttgacagcatccctccaaagagaagggtatttcctttatatagacatgcaggtgcagtcccaccaaaatttattgaactccaagctagaacaaaaggtggaggtgcaccgatgaagaaacagggcctctgccttcaggagcttacaaggccattaacagagagtgatattgatcttatgcaaatggcagttgccgcctacttgcagaagagcaggggctacagccaagcagcagggggcagaagaggctcgagctcggctctggaggccgatctggccaaagccaggatagaagctcccgtgacccattcgtgtgtgcgacttggaaggcagcccttctgccactcccctttcttaaagcccagagcaaataaaagatccttttctactacagtagatatacctgtagtcaggactttgaactcacagctattcgccgcaccattccctcttaaggaactactgcgccctccagcggaagaacagcggcggaactccacagcggcagctaaaatccctgaacgctttaaagtccttctcctcaagatactcggctgcgtctggccccgcccctcactgagttccgccccgggcgcaacctcatcttatggcaccgattggctggcccctgtgcgtgaggacgttgcgccgtggggaggggcggacgagaggtgtccgtcaggccgtgtgtcccaggccgtcgaccccgctgtcgcgctgcgtctgctccttgcatgcctttagatggtacagccttcagccggggcttcgggagacagtgcagccaccgagcatctctgctgagcttctccgccgatcctccttttctagcaggcagctcttctaggccacgtccaggtcgagggggaaaatggcgccggcgcccctaggcgtcccggaggagcagttgctggggtgtcgatctagagtgctttctcggttactcttcattgcccagaccgctctcctcctgttgcccgccgccggagcaggtctctgccccgcgccctgctcctgccgcattcctctcctggactgcagtcgcaggaaattgcccgcaccgagctggagggcgctgtcgggcttgctgccccccgacaccgctatcctgtgagtagagcggccaggcagagtgaccaaaaggagggggagccttccctctacagggggcaggcaggagggagacaggcctggtcggagggtgtggtcgagagcctaagctctgaaggaaactgccgtcaggattttatgaactttgttttaggtggtgggagcctaaaaaagccggtgttaaggtttctggagaattgtatgaagacgagggttaagattcttggggccaaggagtctgtgatttcctcaactggggaggaaatggggcgggcatatttaatggtaaggactcacgggtcctgggcaccagcattgactttggatggttggtggggcggggggtgggttgagcacggaacagtgctttctgcttatcttgagctgcatgatttggtgtgtacctcagacttagtggtcctcaggcacgtgattttataatcacaatcgccaaagacctatgaactgtctttagtccttagttcgcatgttggctgattttgtgctgcagttttgatacttaacagggttgaaaagttcattatgatgaatcaggagatcctgtaattcagaata

SEQ ID NO: 4154 - DNA, 6000 bp, Homo sapiens; identical to SEQ ID NO: 487

SEQ ID NO: 4155 - DNA, 6000 bp, Homo sapiens
ctgagttcaagtcctgaatatccttgttaattttctgtctcattgatttatctaatattgacagtggggtgttaaagtctcccactatttttgtgtgggagtctaactctctttgtaggtctctaagaacttgctttatgaatctgggtgcccctgtattgggtgcatatatatttaagatcgttagcccttcttgttgcattgatccctttatcatcatgtaatacccttctttgtcttttttgatctttgttggtttaaagtctgttttatcagagactaggattgcaattctgcttttttttgttttccatttgcttggtaaatattcctccatccctttattttgagcctatgtgtgtctttgcacatgagattggtctcctgaatacagcacaccgatgggtcttgactctttatccaatttgccagtctgtgtcttttaattggggcatttagcccatttacatttaaggttaatattgttctgtgtgaatttgatcatgttattatgatgctagctggctattttgcccattagttgatgcagtttcttcatagtgtcaatggtctttacaatttggtatgtttttgcagtggctgggtactggtttttcctttccatatttagtggttccttcaggagctcttgtaaggtaggcctgttggtgacaaaatagctcagcatttgcttgtctgtaaaggattttatttctccttagcttacgaagcttagtttggctggatatgaaattctggtttgaaaattcttttctttaagtgtgttgaatattggcatccactctcttctggcttgtagcagttctgcagagagatccactgtcagtctgatgggctttcctttgtgggtaacccaacctttctctctggctgcccttaacatttttttccttcattccaaccttggtgaatctgatgattatgtgtcttggggttgctcttcttgaggagtatctttgtggtgttccctgcatttcctgaatttgaatgttggcctgtcttgctaagttggggaagttctcctggataatatcctgaaaagtgttttccaacttggttccattctccccgtcactttcaggtacaacaatcaaacgtaggtttggtcttttcacatagtcccatatttcttggaggctttgttcattccctttcattctttttctctaatcttgttttcacactttatttcattaagttgatcttcaatctctgatatcctttcttccgcttgattgattcagctattgatacttgtgtatgcttcacgaatttctcatgctgtgtttttcagctccatcaggtcatttatgttcttctctaaactggttattctagttagcaattcctataaccttttttcaaggttcttaacttcctcttattgggttagaacatgctcctttagcttggaggagtttgttattacccaccttctgaagcctacttctgtcagtttgtcagactcattctccattccagttttgttcccttgatggtgaggaattgtgatcctttgaaggagaagaggtgctctggtttttggaattttcagcctttttgtgctggtttttcctcatctttgtggatttatctacctttggtctttgatgttggtgaccttgggataaggtttttgtgtggacgtcttttttgttgatattgatgctattcgtttctgttcgttagttttccttttaatagtcaggcccctctgcttcaggtcttttggactttgctggcggtccactccaaaccgtgtttgctcgcgtatcaccagcagaggctgcagaacagcaaagaacagcctgttccttcctctggaagctttgtcccagaggggcacctgccggatgccagtcagagctctcctgtatgaagtgtctgtcgaccactgctgggaggtgtctcccagtcaggaggcacaggggtcagggacccacttgaggaaccattctgtcccttagcagagctcgaatgctgtgctgggagatctgctgttctcttcggagctggcaggcaagaacatttaagtctgctgaagctgcacccacagctgcccctttccccaggtgctctatcccagggagatgggagttttatctacaagcccctgactggatctgctgcctttctctgagatatgccctgcccagagtggaggaatctagagagaaagtctggctacagtggctttgtggagctgcagtgggctctgctcggttcaaacttcccagtggctttctttacactgtcaggggaaaatcatctactcaagcctcagtaatggcggatgcccctcccctcaacaagctccagcatcccaggtcgacttcagactgctgtgctggcagcaagaatttcaagccagtggatcttagcttgttgggctccatgggggtggaatcccctgagctagaccacttggcttcctggcttcagcccccattccaggggagtgagcagttacgtctcactggcattccaggagccactgaggtatgaaagaaaccttctgcaggtatctcagtgtctgcccaaatggccgcccagttttgtgcttgaaacccagggctctggtggcataggcacccaagggactttcctggtctgttgtttgtgaagaccatgggaaaagcatagtatctgggctggaatgtactgttcctcacagcacagtccctcatggtttcccttggctaggggagggagttccccaatcccttgcgctccctgggtgaggtgacgccccaccctgcttcagctcgccctctgtaggctgcacccactgtctaaccagtcccaatgagataagctgggtacctcagtcggaaatgcagaaatcacctgccttctgcattgatcttgctgggagctgcatactggagctgttcctattcagccatcttgcccaggtcccccggcatgtttttttttttttttttttaattgagatggagtctcgttttgcccaggctggagtgcagtggcatgatatcagctcactgcaacatctgcctcctaggttcaagcaattctcctgcctcagcctcctgagtagctgggattacaggtgcctgccaccacgcctggctaatttttttatttttagtagagatggggtttcgccatgttggccaggctggtcttgaacgcatgaccccaagtgatctgcccatctcagcctcccaaagtgttgggattacaagcttcagccaccaagcccggcctctacatggcatttaaaggtgaatttattattttaaaataggttatttgcaactacccctctttcccacaaaacatcatctggtaaggtggctagacataagaacctaagtgaattagaattactttctgaaaactcattgaagatctctgtgttaattggagctattcaggtacatgactagaattggaaatccctggcctgtttgaactttgaaagttctacattttagagatgagagagacatgtttttataatgttctacatttctgaccctgagtgctgatttgggtgaatagaccattggctttacccataggaacctggctgcctgagtcagcaacatctgctctctggagcctactgggaggctgggggtgggggaggaagatggtctaggccactgagtggggcagcagagcctggggactaggagtggtgaaaatcagccacattgaacatatgggtgtcttctcaaggaaatgtgacatatgcgagagaaaatggagtctagaagggatgaggaagaggtgatcaagggagtgaggggttcttggagccaaggttccctgattaaggctagtcagggtgggcctgcatttccccaccccaaatgcccgcaatactcctgtagacaactcttaggaaattcagcacttcattatacactgcttccactggaaaatcctgccacgtaagcagctttgggtcccagctagattggagatgatcagtaaggaaccctaatgctaccaacacaagacaactaagaaaagtgcaaatattcatgaaaatcgttgccaactgttttgtaatcctcaccacaatcctgcaaggtggacagcagcatcctcaccacttttcagacaggtaaacaaaggctcagaaaggaaacagtacctggttggaatcagcactgaagcttcagctacctgcctgcagagatgtgctcatctagcagtttctaggagactaggctggcggcagtgcctgctctgataagggaggaggaggggagaggcttgctgtggtggcttgtagggggtgtgtgtgtgtgtgtgtgtgtgtgtgtgtgtgtgtctatttgtggggtcatttccagggctacatgtgagtttaagtgtgtgtatatgggttgagatatggtgtatatggatatttgtcggtcagttcttggaaagtgtgtatatgagtgtgtgttgagtggggttggggggttagtccctgagccgtgtgaatatgtggatgggggcactcgtgagggcaaatgggctcggattttgtgcatgattgtgtgtgtgtgtgtgtgtgtgtgagcttgagattccaagtatgtgggggagggagggggcggtgtcggagatcaatccctgggccatgtgtttatagtgtgtgtgtctgcccagaagagagtgggttactgggctgtgcacgtctgtgtagggtgagtgtgtgtatgagggtgaatgagtgtgggaggtgtcattccctggtccgtgtgtaagagtgtgaccgcgcacgccttcgtgtgtgtcccgggtgtgtggggtcggggcggtgacgaggtgagggggacgccggccgagccccgccctccgctgcaggtgggccggccccgcggcggggccggcagcgctagctgttcttggctcgcggccgcgccgggctcgcagggctgggctcgggctgcggggcggcgccgggacaggaagcggaaagcagcagtgcagcggcggcggcggcggggctctgcctctccaggagcccagcgcaggccgcagagccggggccgctgtgagccgagaccgcgggccgcggagctcgggcggccggcgcggaggtgagtcccgcgagaggccgagcgctgcgcggcggcggtccccggggcagaccgttggctgggagacgcccccacctcggaccccgcgtgcccctgcgccctcctcccgcattcgccccgccggacttcgaccccgggtggccggctcccgcctcgggccgggggctccctcccctcctccggagcgctccgggtagtgcttcctctgactccactcttctccccatgcgttgcgcccctcctggccctgccgtgcgatctccgccgcaccccactccttggggtcccggggttccctgctcacacctcggacgtccctttctccccgggctggcctttggagtgcgccccttcggtgcgcgtgccggggcggcgggcaggccggcagggagtggccgagcgttggaggcaccgggcggctgcagcagccgtgcagggcgggagccgggcgcgcaccggggttcccacccctggcggggctcgacccgggcgccgcctggcccttcgccaggaaccgggacagagctggtctgtgtgcacacctcgctcacaaaaaattgagccggccctggaggcctggggggcgagtccggttgcgcctcggagagcgcaacaggcaggtaggagtttactttcaaaaacgccggggtggagcagaggcgcctggcgggtctctgcccaaggtgtccctgctggaggaaatctcaccgcgccggggcagccttcgccaccggcaggacctcatttccttctgcagtctttgaactgccccaagcatcgcgcctagagaagtgtgaagctttataaaaatttaaacgcgtccgtggtggcggcagcagtggggcggagccgcggcctggctgctgtgtgatgagcagatgagacttggagctgaggaatctgttgctca

SEQ ID NO: 4156 - DNA, 6000 bp, Homo sapiens
ctggccaacatggtgaaaccccgtctctattaaaaatacaaacgttagctgagcgtggtggcgtgtgccagtaattccagctactcaggaggctgaggcaggagaatcacttgaaccagggagttggaggttgcagtaagccgagatcgtgccactgcactccagcctggtgacagagtgagactcggtctcaaaaaataaataaataaataaataaataaataaataaattaaataaataaataaataaaataaaaataaataaataaaataaataaaagatagacactatcaacctggatggaaaaaagaagtcctcctttcataaacatgctgctatggtctgaatgttagtgtctgtcttagtctatctgtgctactctgaccgaatatcactgacttggtcatttataaagaaaataaatttgtttattacagttctagaggctgggaagcctaagattaaggtgctagcaggtttgttgtctggtgagggctgcactgtccaaagaggaggaacattatatcctcacatggcagaaggtggaagggcaaacgggacaaattcccttgtcatgccattttataagggcacctaatcccatttatgagggcagaaccctcatgagtaatttacttcccaaaggccacacttcccaatactgttgcattggaaatgtctgaattctggagggaaacatattcaaaccatagcattctgcccctgccccctcacccaaattcatgtccttctcacacaaaaatacatttatttcatgtcaatagcccctaaaatcttagctcattccagcatcaactttataaagtctaaagtccagagatatgggaaccaatgcatggttcatcctgaggcaaattcctccccagctgtaaacttgtgaaatcaaacaagttatgtgctatcaaaacaatagtgtacaggcataggatagacactgctattccaaaagggagaaataggaaagaagaaaggggtaacaggtcctaagtaagtctaaaacccaacagggaaaccctgtctggttgctttgctagcagcagtccccacttcacttctcactggctagggtcactgcacacctcccaatactcttgcattgagaacatctgaattttggaggggaaacattcaaatgacagcagtgtccccctaaattagtgttggaacctaataccaaatgtgatagtattaaaaagtagggcccttgagaagtgattaaatcatgagggctccatcctcatgaatgggattaatgctcccataaaagactctggagagctctcttgtcctcctactgtaaagatgcgacaagaaggtgacatctttgaagcagaaagcagtccttcatcagacaccaaatctaccggtgccttgattttagactgcccagcctccagaactgtgagcaataaatttctgttgtttatgaattacccagtctaaggtattttgttataggagccaaaatagactaagacatatgccttaagcagaaagaaacttacaggatgaacataaaaagactatataagaataaaaagattacaaggaaaatacaaacaacagaaaaggtgatgcaacaatattgatatgagacaaagtaaaaaagaccaaaagcactaaaaagagctatttcatcacgataaaaaagattcaactagtacctttatgagcacacagagacaaaaagagaacttgataaactcaaaaatgatattaattttggaaaattttgatatattaaaaactgatacattcagcacagaaaaattaagtaataatatagactacttaaataaaattagatcaacaagtttgattaatagttagagaatcttgcacacaacaagtggagaatatatgttatttcaatacacgtggaacattgaaaaaaaaaaaaggctacgggctgggcatggtgacttacacctgtaatcccagcactctgagaggctgaggcgggtggatcacttgaggtcaggagtttgagatcaacttgtgcaacatggcaaaaccccatttctacaaaaaataaaaatgagccatggtggtgtctgcctatagttctacctacctgggaggctgaggtggaaggatcacctgagctggggagattaaggctgcagtgagatgtgatcaagccactgcactgcagcctgggtgacagagaaagatactgtcaaaaaaaaaaaaaaaagaataaaaagagaaaaatcacatattaggtcacaaaaaattaaaacaatttccaagatttaatataatctctgtctacaaagcatataaattataaacaacactaaaaagatggtaaaaaaaatagcaacctttaattggaaacaaaaaatgcactaaaaatagctcattggttaaagaagaaatgacaatgtcatgaaatatttaaaagtaaagacaacaaaagtaccacatgacaaaacttgtcggatggagcaaagtcctatagaaaggtaagtacaaccttaaatataattattttatttatttatttatttctgagacagagtcttgctctgttgcccaggttggagtgtaatggcacaatctcagctcactgcaacctccttctcccaggttcaagtgattctcctgcctcagcctcctgagtagctgggactataggcctgtgccaccacgtccggctaatttttgtatttttagtagagacggagtttcaccatgtttgccaggctggacttgaactcctaacctcaggtgatccaccagctttggcctcccaaagtgctgggattacaggcgtgagccactgagcccagccacacataattattcttcaaaaagaaatattaaaagcaaagaagctaaacttcaagtcatgtggctagtaaaagaattacaaagtaacaaaagtaaaaaaaaaaaaaggaaagaattcatataatcaatgaaataaaaaaattcacaaaactttttaaaaaataataaagtagacaaacctctggcaagactgataagattggaacaataaagatgaacactattcagaatgaaaaatgggacataaacagttagacccttatttttaaaaatcccaagaaaacaatatgaactagtttattccaaaaacaatttctaaactagataaaatagaaacatttctagaaaaaaagtggttcaagaagaaatgcaaagacatacgaatatatctagttatacacacctatttatctttacccattatctataaatctgtaataaagaggctccccctgcaaaacaagctaagtctagatggttgcaggagagttttaccaaacactcacactcatgttatgaaagcactataaaatcttactgccaaatctagacataagcatcaggaagaaaagaaaattataggcctagttcgctagtcacagatgtaaagtccctagacaaaacactagcaaattaaatttggcaataaatagcaatatcgtgagcaagtattaataggatttattccagtaaagttcaatatcaaaaaaactattaccataatgtacccgattatcagattcaagaagaaaaacaataggatcatgtcaataaatgcaaaaagcacttattaaacttcagcatttattaataatgaggattcgtaggaaacagccaaagaaggaaactttttaaactattaatagtacttatacagaaaacgtttccttaagtaagagagagaaaaaaatcttaagagtttatagagtttacagtttccaacccactgataaattcaattacagtgagcattcatttaattgctaaaaaaagaaagcagctgaccagtaaagcctagctaccaatacgctgcaacagacatcacaattaacggaaaattttggaagcataagaaggatactggcaggtcaaggacactagctggtcgccatttctattcaatgttaaactagaagtcatggtctagacaatggaatactatgcagctgttaaaaagacaacacataataaacaaaaaggcaaatgaggttaggaggtggaggcatgaggggactaacgcaggtgtccagcgtcccttggccctgccacgctttttttttttaatttccacctgacaaactgccgtttatcctttaaataccttggcagccatcacatcctgccccttcgtcttttgcacttcctttgtacctcgtgcatacttctataagcaaatgtatccgacggttttacaagaatttgcttgcctaccagtgtacttaacccatggctagcacagaataggactggaaagaaatgctgcacagacagcacttttctctgaaggctctagggctccccaagcccccgcattaaactggtttgggcaaaacgacaggcattgctgagagccgccaggccgcccgccagctgcgggtcccctgtaggcagagccctgggtcacacgcggacgcggtcccgatgtttcttctcaggccctcagcccggcccacttcctctttcctcactttaaggcgcagacagcggtccctctcaaaacaaaacgtacaccaaaacaccattttttttttaaacaggaagtccagaggcccgggtccagggcatccagccccggatctcgaacgccctcctcgcccctcgccccgcgtagcccggctgcgctccccgctccccgcccggcgtccacctctcgagcctgacagccccgccgcccgcgcaggcgccccgccccggcccggcccgccccggccccgccgccagcgcttccatccccgccccggcgggtccaagccggtgccgggcgcccaggggttgccgcgctgggcgggagggcagcgcctgagagggcggtggggtggcggggttcctgcgcgcggcccgccatggaggtggaggaggcgttccaggcggtgggggagatgggcatctaccagatgtacttgtgcttcctgctggccgtgctgctgcaggtaagtccccgcggccccgcagccgcatttccctcttcagggccgcccggcgcagggctaggcgtccgctcccagaccgccggggccggggccgaggccgaggctctgcaaacaccgaggtgtggcgagcgtcggggtggggcaggggcgaggcgccgcgcggtggcctgggcccggccggcagcgtcaaggtcgccggccggcctcagagcctcttgggttctgctgggccctccaccccgccaccttgagtggtggaaggagcgtgttgggggaggtttctcagccgctatgctggttaaggagggatgcaaaattgtgttacctgccctacgctgttgcctataacacgctgcaaatatgaagggaattgttaccctacctgtggcactgtcaccttggaatctaggacacagtcttgataatctgcagacaaaaggttgtgtctaggatcgcctccctctgcgccgggtgtcctctgcctcttttcctgggcttgagggggcttactcttctaggggctttcaaagcataggatttatttccctctggtttaagttctgctggctcattcggccctgcgccagccttgggctgagactcccgtgagccgaatagtgccatctaccatgtgtggttatcaaatggaatcacttcttcattataaagaattctcagaacctacttgtacaccccagcctcaaaatatcgattccatatgcgaaaggtcactacagattaactgcgccaggcaaggattagtccttcaccaacttaaatggctcatttgacattagtcgcttctctcaatatgccagaggcatttcattcacaaatcctttcttagtatttgctgtgagccagccattttactctttccttcagtcatcaggtttaatacgggctaggatgtgctgaacatagggatgccatggtggacaaatcattgactgccctcaggagcttgcattccagtggctgcgggtggggcaggcagacagttaagtaatttagttagcatgtgatgatagt

SEQ ID NO: 4157 - DNA, 6000 bp, Homo sapiens
attgtttttccatggaagagtttaaggccaagaatagcaaatctatccaccacgatgatggcacttatttccttagtgcttgtggttgtgccccctggagagcaggaagggttagatgccagttacctcccgccacctcttcccagctttgggcttgccctttctgagctgtaaggctgcctgaagctgtgtctctgctggttggatgaagatgggactctggcagtggaatatttttcagtccagatcccttctttgttaccatttgattttcttttttttttttttttttttttgttgcaatgcctcggtagttgttgatttgcagaaaacaattggtgagtttttaaatgtaggatattgtaacatcacatagtgttgtgaactagggtaaggggagtagaactgtattggcagagagtgctaaaggagaaggcagaatcctggctcaggatctggtataaaacacacaggaaacaactaaagaatcctttattactgctttatttacgaagaccgctattaataacagcaaattatttaaagggcagctgggttaaaaggatgctgagtaaaacaccaaggacttgattctgttgtggttggtgataacctacaatagttaccaagtaaatgcagactctttcaaatttcccagtttcccagaggcacaacctgaagtcttcaaccaccactaacaggagaaaatatgtttaaaagaatactaaggagctttcaaaaggattaagaaatggctcgggggccgggcgcggtggctcacacctgcaatcccagcactttgggaggcagaggcgggcaggtcacgaggtcagcagatcgagaccatcctggctaacacggtgaaacccagtctctactaaaaatacaaaaaattagccaggtgtggtggcaggcgcctgtagtcccagctactaaggaagctgaggcaggagaatcgcttgaaccaggaggcggagtttgcagtgagccgagatcgcgccactgcactccattctggggcgatagagcgagactccgtctcaaaacaaagaaaaaaaaaaagaaagaaagaaatggctcggctgcgctccattctggggcgatagagcgagactccgtctcaaaacaaagaaaaaaaaaaagaaagaaagaaatggctcggcgtggtggctcacacctgtaatcccagcactttgggaggctgaggcaggcagatcacttgatgtcaggaattcgagaacagcctggccaacatagtgaaaccctgtctctactaaaaatacaaaaattagcctggcacggtggtgcgtgcctgtaatccaagctactcaggaggctgaggtacaagaattccttgaacccgagaggcagaggttgtagcgagccgagattacaccaccgcacttcagcctggacaaaagagtaagactccatctcaaaaaaaacaaaccaaaaaaaaggtaagaatggagagtctgggaggaaaagttataggagtcagaattatttgctgacagattttgatagtcagcaatgcacccagaactgtgcttttaaagacaggtgatatgtctgctgctgaacagaagaaaaggaaatagatttgcaatggaggcacagagatttgcaatggaggcacagataatggctagggggaactttgaatgatgaagacagttgactttaaagcagcaagagtggctttctgggtaacgtggaaaattctggataatgtgggaaataggtaaaggataaagatgcatgcttatgactgtttccatgctaactcgggagcacacaaagccaaagaaaattctgtccttccagatctctagctcatagatccccaaaatttttgtgtcctatggaaaatgctaagttggtgtgggctccaactcatattttaaagcctttaattgcaatgatgtgtttattcaattcagcaaatactcaaagtgctagcgttcttggctcaaaaaactgacttgcatcatatttttcatacatctgctgactctattcacaatgactggagcaaccatccacagttgtgatcaaattctcctcgaagctatccatacttggcagccttaaggtctataaatgctgagtctccaggccaatcagtttaactgtgccccaagttagaagcttgaaaagagttgataggataagcagcagacagaatagagagcctttgctttcttcaccctctcttctagaatccaaatttgtcccctgcactggagttagaaaagctacctgaaagtcttgccactattcttggaatattcaataccaattactccctgggcctcagtttcttcatcataaaatgagggagcttgatgtttcatctataaggtttcatttcattcagaagccactcttccaagggaagaaaagaaggctttttcttaaaaaaaaaaaaaaaaaaggacttttcctcctttgcttacccattttccaaggtgtctctctcatatctgagatttccttctgcgcctcagacttggtcatgccttacctttttctttacctcaaagacttgtgagaattcaagggcactgtgcatctgaaattactgtgtggcatcaaaagcaaaatacagatttaagataatgtttcttatattttttgccctttcttcacaccggaacacagctagaactctgggatcctcctgaaaggaccttcagcaattttcagttgccaaataaatagctctagatacaaagggaagtgccttgatctatcagggttattttgttgagtgaatgaatgagaattttacttatgaggggagaaaaaggagatcagctggcaggagaaatctacgttgttccgacccgtgctttatatatttagttgttgccgcggcacttttcccattcagaccagggcccaaggagtaattaatctttgtttttatttttatttatttatttttttgagatggatcctcactctgtcaccaggctggagtgcagtggcgccatctcagctcactgcaacctccgattctgtggttcaagcgaatctcccgcctcagtctcccgagtagctgggattacaggcatgtgccactacgcccagctagtttttttttgtatttttagtggagacggggtttcaccaggttggccaggatggtcttgatctcctgacctcatgatccgcccgcttcggcctcccaaagtgctgggattacaggcgtgagccacagtgcctggcccaggagtaattaatcttaaacaagctatctttagcaagcaaaagcatcttacaaagtacagtaactgaggctatcaagcatgtaaagaaagcattttctagaagcttagagatggatccccgaacactctgtaaccctctgttaacagtctaaggaattctgttctgaatttgggggctcttctccaggcagtcagggttttgaattctatttacaattcctctgctctctatggcctagaatgattgaaccaagtctctagatcactgtaggagacatcaacctttaacaatacattcttgaggagaagagactcgtgtaagaaactatcttgtaagaagggatgagaattaccctaatgatgtaactgacaacacagtttctagtttttcctttctttccttccttctccattttttccagtttcatatccttgtttgttcatgctacatgaatacttgaagttgatagagttggctttaacttaggaacctttgcttagaaagtcaatatcctggcctttcccagagtacttgacttcctgcaaaccttgttaataatactttgttttttaaaatgttggagaacttcagccattgcagcctcttgctaagaagcaaaagctataatgacagagaagccccaaagtgcagtggaaccagggatctccggggagagtggtggtttcctgggcccccccagagaacccaaggctgtgctggagatgctgccgtgacaggtggaggcgtggagaggcacctggcaagtcctcaaacgcctcccccttgatttagctcctctagctaaggatacgcattcctttgggtttcaggtttttcttccctaaaaagagaatccccaaactggacaagcaggttacattcacacaatagcgtgaatgaattcgctggtcgcccttcagattctcattttggaatctcgaagaaagagaggtggtgggaggagggcgcttgaaacttctggcgatgccagttcagatcgattccagctatgacggagcgggaagtggataaagaggaccccaagtcacaggaggcactctgagagcaccaagcgcccggggaggccatccgcaggtgggcgcggggcctggattccacagaggggcggagtccctcagtcaggcgctggctgcaatcacacccgagcgccagccccctccagcatccctgagtcccagaggagatcgccgaagcgctggaaaagccgttccgcccacgacttctggtgccgggtcggcggcgactgggggagcccagttccgagaccgtaccgcacccactgcggacctcctgggccctacatagtaggcgggtcatgcagggcagcgggaggaggggcgtgggagggccaaggccgccgagtccccgctgttcagccagcaggagcgccccgcagccctcccgggacacggtggacacgcttgtcccagacctgggcgccctcctgccgggagccaggactggccgcagcaggcgctgtccgggcccgtgggcggggtttcgggagggggcggagccaggcccacggccggtgtcaggttgctccggtaacggtgacgtttcgcggcgtgggcggggccagcacgcaggttgcatattttaggaagtgaggaggaggcgcgggctggagctgcggcggggtctggggcgcagagcagcggcgggaggaggcggacacgtggcaacagcggtagcagcccgggcggcggcagcaacagcggcggcggcatcggcccgagccgccggccgccctcccaccctcccgccccgcggcagccctagctccctccacttggctcccctggtcccgctcgctcggccgggagctgctctgtgcttttctctctgattctccagcgacaggacccggcgccgggcactgagcaccgccaccatggggaagggggtgagtgtccggcgcgcccggggagggggctcggggagccctcgaggggaagaggaggaagtcgggagggcgaccgcggccagcgggaggcggcggaggaggaagcggcgccgcgtggagtgggctggcagagccgcgcggcttaaaagacgacgcagtttggaaatggagggagcgcagtaacggggggcgggggaagggagcgccgaggggctggagcgcggcattgcttaggggggtgggcggaccctgggcgggggctgcgcgccccggaggccgagcgggccgggggctccgagaggcggtgcttgggaagcctcggggccgggaggagggggcttgcagcagcgggggcggccccgggactgagccggcatccctgagcctggctcccctccctgcgaccgccgtcacctccttctccttccttttccctccgccctccgtgccctgaggaaaggcgcgctcctccccttcccctggggcgctccgccggggcctcctcccgggcctccgttcccgccgcggccccggttccggcgggggcagcctccgggttcggggctccttctcctggggacgctggggcttagcttgctccgcgcagaggcggccgccctcccccaaagaaaaaactggctgcttctaagtgcgaagccggctgggcgggctggtgccagaaagggtgtgtcttcactgccctaagatggcctttaaggtatacttttgagggctttcttgggccactttccgtaaacacaggatgcaccgatggcaactggagttgtcatccgatggtggggagaggcgtgcagattttttttgaagggacgagc

SEQ ID NO: 4158 - DNA, 6000 bp, Homo sapiens; identical to SEQ ID NO: 489

SEQ ID NO: 4159 - DNA, 6000 bp, Homo sapiens
gtgtaatatttgggacatacttatactaaaaatatattgcttatttatctgaaattccaattttactgggcattctgtattttggctagcaaccctccctactctggatgcattttagtttgtaaatgttgtttttaaaatataatgcttagaacttaagataatattctagttgaacacagaagtgcagctcacgtggggtgagaaaggcaagtggggaaatggtgaaaggaagaggacatcttcatcctcgtctccctccctccccctcccaatttatgtgtgaagactgggataaactcccttcctgtgaggggataaaggcctctcctgggcatagcaggtcagagacagggcacaatgttggctcgatggggcacccttgggcaccatcctacttggcagccatgaccttaggtaaagaacttactccaacatccatagtgcctgcaactatttctaatgtgttagcccctcttttgcacaagggactgctgtctccattcatttaagagatactttcagcccagatgatggcatatttgcagaatacaacacataatggcttgtgtctctcttatccatttacctttctttcaattcctttgctcttgtggtttccatctcctccccgtccttcactgtattccaggtttttcatgcattaaattagatgataagcccctccagggcaagggccctgtctgctcgtaacataggaaatagcctcagtcttggggagagcttttattgccaaaggctcacctccatccaattccttattttctcctcacacttctccaccccagtgttcctgcaggcgtgatgctatgtggggtagcttcccagggaggcacttttggcctggtggaggtggaatctggaacagttctaagtcatttaagaacactttctccaccatgtcccacttcagtcttttagggctgaagaaaagatggggagaattgatagttgggtggtgacgagcaggaccagccctcaggcaggaccctgcttagcccataccaaacagatgaggtcccttgctgttttcaaacttgtcacatgagcattctacagcttccccactaatctcaccagtattgcaggactctcactcgtggggaaataaaggcctcctcttcccacccctccctttctaacttttaatttcattttctaattctataatataatcctaaatttctttttgtttagtaatctctgtttaactttaactgggaaaatatacatctggacacagaacaaggaagactgtgagtgaaaatgattagtggaatgaaacggtgccatggaatatactccttcccctgagcccctgctgaagtaggtaggggtcagggtcatttggagactgtgtgcgtgtacaggctgccagaggtggcagggccaacaactccaagtctaggtgagtcttagaacaatcagcaatttcattcactgggaaccttttaacattttcattcacaaagttaaataacatgatgatgtttttgcctgatctcagcagggaaaacttgtttggcgtaacagtatgaggactcttgtgaggttttaggggtatcacctgcagaaagacatgtgtgaccaaaagaccataatgtcggactgctgtgaccagtgccccttgggggcactatgattggagaaaagaaacccatgtcggtactctccttgggggtgggcgtgaatcaattagaattgctggagagtgagtcttcctgccccaggcaagcctatagactaagataggagaacaactggttggggcaaaagccttacctgtatagaaggttactcactctggtaaataaatatctttcatagtaaaagcatcatcagattccagagtcatgaattaacaaattgtgccagtctgctgtgtttcttcctttatccattggtagtcaggaaggtgcaaagggtgtggtggttataaccaacagtctagacttattaatttatgcttattttttgctacaaaagtggctctttggttaactcccatgacatttaactgccagccaccagcaggctacccacttcagtcctcattctacctgccttacctagacaattttatttattctcatcatttcaatggttaaccactgttatttccatgattgtaagatacaccattaatttaataatacctgggggtgggtgaggtgagaagaatctctatcatattaaatacacaacatctattgtaagcttatccttacactccacagctaaagacctaccaatttttcaagactcgttgcatagtcatcccctctgtgaagctttctctgacagcctcctcctggactggccgctcccttgtggtgtcacaactctaccttgcatatgcaatcacaatgcacaaaatgtcgactcctcaagggcaagaactgtctgcttcatccctgtacccccaggatctagcccagtgtctgccattaattcactctataaatatacattgggacctaccatgtgctaggcacagtccctgacacacattgtttattaaacaaaagaatttttaaaacatctactctgccataaggtgggatacaaggtgaaaatgtgacagcctcttaggcccatgcattattagacagagatgggggtagtgtatacattttgctaaactgaatgtgaccaagtgccacaatgtgtggttcaaacattaagcgttctgggtggttaagaaaaggaaagatggaggatgagctgaaatctgagcttctgaaggtgccaggcctcacatttctctgaagctccactaccttccaaggcctaacattaggcttgaattcaaggttgattgaatgaaattgggaaacttccctgcgagattctagggaagaattgggatggggaagagaaaggaattacagtgtgtatgaacagaaccaggaaaggcttggcggcagaaataaattttaaaaaaattattgtgtaaaatgtacatagcacaaaatttaccattttaaccttaaaaatttttttttagagacggtgtctcacaatgttgcccgagtggtctcaaacttctagcctcaaataaaaaaaaaaaagaaagaaaaaagaaaaagaagaaaaagtgccagcccagtggctcagacctgtaatcccagtctttggggaggccgaggcgggagaatcgcttgagcccaggagctcgagacccgcctggccaacatagggagactccagtgtctacaaaaaataaaaacaattagcgagagtgtggtggcacacatctgtggttccagctacttgagaggtggaggtgggaggattgcttgagcctgggaggtcaaggcagcagtgatccctgatcgcaccactgcactccggcctgggtgacagatcctcattttgagaccctgtctcaaaaatgaaagaaagaaagaagacaaaacaaataaaaactcctggcctcaagcaacaccatccctgccccccgcctccccctgcccccccaacctcagccttctgagtagctagcattacaagtaccagttaccaggcctggcaattttaaacatttctaagtgtaccattcagtggcattaagtacaataacgttgcaccaccaggaatgaatttttaagtctctttccaaagatacctggctaatcacacatttgatagtggggaaataagaaacatttgttggttgaaagacggatgcatgagagtaaaagcagtgttcttccccagtgtgggcagtttccgcataagcatctgcgatccgttttgcatgtgaatgaaagcccagtgacgggcagtgggcaccagtgctgctccttgcgtgtttgaatcatgcttgctaagtttcaagcaaggaatgctccatttctcccaaccaagtcgggccttttgtattcaaatcaaaagcacaaaactctattgtagggggaaaaatgagtctttattggcaatcagtggtgtccacttagagcaataaatattaagtcttaagagtacattctatatgaagtactatagctattaatacacttgggttttgtttgttttttaaatgggtgtctttgtggggtgctgttctaatcagtgccacaggcgccgaggagagggagggagctgggtaaggaaggagacaggcccaccctagccaccggggagtgggcagagtcaggagagcggggttctgattttgccccttccctgtgaatccttgggcacctcaccgaaacacttaaggcctctgtatggtagaggttggaatccgtggcctttaaaagtcctttcagctccttcgctcctatctgcataatttttggcataggccaagcggctggttggtggggtgtttagctcaggacgagaggccgaacgagcggggagttggctgaggatagactagacacgcgtgggtgactccagcgtgatggaacgcggggtgtcccgggatagggctaaagcgatgggatttccagacgagtctttcccaggccaacttttaaaggtcggaggaaagtttctcgtggggtgggggcccagaggggatggcagggtgggctccgacgcctcctcgcctttaagcgggtggccccggctcttcctccgttacctggagcggggaggggcttgggaaagtttgtgtttgttgctggcaaagcgccggatgggaggcgcgggcgggcgctgcggttcttcccttctgctttcgggaagcggtcggggctgcacactcggatcggcggggccggctcccgggcccggccggctggaggagggagggaaggaggcgggagggagcgagcggagccaggggcgcacgtacgccccagcgctgggatttatcggctcgcgaggagagcggagcaggcgcgcggcccaggcggaggagcgccgactctggagcagccggagctggaagaggaggaggaggagaggcggcggggaaggaggaggagggggagagtcgctcccgccgggcgagcatggggcgcctggcctcgaggccgctgctgctggcgctcctgtcgttgggtgagtgtgcgcggggctcagcggggcacacggggactggcgaggccctggagggctcggcggggcgcggctgcagcgcgcggcctggggcgccgagggtgcccgggctgctcccgggaaacccggccggggtgcgcgggttgttcggcccggcggggagcggccgcggggccgcccggagcctggcgcgaatccgctcgggccccgcgcgcggggtgcaagtggccgctccgccaggccgagcctcgcccccaacatgtgccggggggagtggcccggggccgtctttcccccaggtctccctacctgttggccgccgggagcccggctcaccttgaactcccggcccggaaggtgctgcggtcccggcccgggtcctcggctcgagagcggaaatgtgagcctttgatatgccccgccatagccgccgccggccgggtcgctcttcacccaacccgcgcggagttgcctttccagggaagcgagagaatcctccaacttccttccacgaaggtcacagggtggcccggagcgttacaatggaaatcggcgggcgagtcctgccgtcattttcgtcgtggctagatcttctgcctcagtcttttcttttagcttttcttgaagctgcctagctgcgtatttatacacaaagacctaaaagcctggcttctccaactttttctacctgttactttccctcccttactatcccctcgtcttccaccctccggaaaccctgggtgccccgtgaggttttggcccagcgccctccccccacccaaggaatcttttgtgggttttttccctctccattttccattcactccatacacagacaccatcttcacgtagatccacatggtgatcctagccagccacggaaatatgtttattaagtgcccaccatggtaccccagggccgactcttaaatgttttgatattcttggatccttgttgtcagt

SEQ ID NO: 4160 - DNA, 6000 bp, Homo sapiens
gaaccaaaagtgagaaggcagccttagaatcccgccattttctagccatgatattgatatactctgagtctgttttctcatttgtagaatgggattagtaatacctaccacatagtgatatgaggtattctataagactgtatatgtaaagtgccttgcacagagcctgatatgtaaaaggtccctatttaaatatttcttgggcctgagtgcttatgatcagaggacataatacctgcaatttctatggttctgtggaactaatattggcgcatatcaacctgaaaaaaagaactttttattaatcttccaggaactagaacagaatttttcctttagtaccttcctggtttctttgtccagtactctctccccccatctgaatcaggaactacatttttacattcctttcaaatgatacaattgcaatgcaacaattcccaaggtaaaagaataactgtctgtcttgctggctctattttttcttttcttcttcctttttttttttttttcttgacaacagagagcttctttttccccccagaaaagaggcaacatcaccctgtcaatgttaaattctggcagaaatgaagccactgaaatggaaagagaaaaaatattttggcaacagccaggaatgagaaattgcatagcatttactgggttatatatattctgtggatacaggatactctctattattggcaatgattgtctctgtggtcaatgcttatttctaaaataattctcttttcagtgcacatggcagattgattgcattgatggcctcagtttgtttgtgttaatctctccctttgctctatcactttgtagttcccctccataaagaggcagagtatatattaacccatctcttgcctttggactttcatgtggcttgctttggcccatgggatggtagtggtcatgatgtaagtagaagctttaaaaaatgctgttgtgtttccactagttcttttggacccctgacattaccatgaaaatgtgccagtccagcctgccagagagatgtgagagacatgtggaagagaactgagtcatcccagccaaggccatcctagaccatccagctcctgtcagcaggacacagccccattaacagagccacccagctgacccataggcttgtcaacagaaataaatgtttgctgttgcaagccaccaaagttttctgattgttacacagcagtaactactccattcaccacatttgcttaaagtgttggtgcctgggggtgacccccaacttctgcaactaaaatggtgaataaattcctgtaacttgagcctcactgattttatagttagtagcctggagagtttgttcgaaatctccatcctaggcagactgccctttaattgttcccaaaatacaatctgcacatccctgactctgcctctgcctctgtacattgtatttgtccacactgaaatgtccttctccttcctgcccatttgcatcatactagatgtccaaggaccaattttaaaaccaggctcttctgaatgacttactgcgactgttccctgccttttcagcctattaattcaggttatttcttgcctgagctatagatcggataccagacccatgtttgccgtatatggctgctgtttttttttttttttttatctcagctgtttattaaactagaccccaagttcctggagggcagggccctcttacacctcttttatcccccaagccttgcatagtatcttgaaaagggaagtacagggcctttcacttaagacttcaatatttgtagtttgaccatcactggagggctaataggtatcattgctaatgaataaaaccagaagaatggatgagtgaatggagggatggatggatgtatggatggatagatagatagataaagttagatgcctccagacctgaatttgtagaatgtaccccattctactataattctcactaggaaaataaattttactttaaaatgccacctttcccctgaagattttactgacctcccattcattctctccagattagacatgccctcttccttctctgatatccctatgtgacagtcaagttcttacctgctcacctccaccatgccacatggcacaagcagcagctccttcagatcaaaggctgcagcttaattatgtccttaatggatgtccagcacatggtagggtgcttactgcacagggagtattccgtaactatttgattattttatctatcccacctctgtctttatttatttatttattttgagatggagtctcgccctgtcgcccaggctggagtgcagtggcgtgatcttggctcactgcaagctccgcctcctggcttcatgccattctcttgcctcagcctccccagtagctgggactacaggcgcccaccaccacacccagctatttttttgtatttttagtagagacggggcttcaccatgttagccaggatggtctcgatctcctgacctcgtgatccgcccgcttctgccacctaaagtgctgggattacaggcatgagccactgcgcccggcctctgtctttattttaaatgccctacttcaggcccttattattgctcatagagacaactacaaaaaccttgtaactgaccttcttgcttctagccttgtctcccttcttcacctttcaacctgttagcaatgcacacatacagaattcaacttaaaaggaaaaacggaaaatccaaccaggctatactaccactaaaaatcttcatagcttccctcttctttgaggtattaataaaagccaagctcttaggcttggcacacgaagcccactaagatctgcccatcctacctgtatagatccttctttcacaacaacctcaaacttcattccaacaagatagtacagcctgtgtgttactattcatgccacacggtttttccccaactgtaccttggccccctgcctctctagatgactcattgactcacctggcccagcccaatccatcttgaccttccctcctgcctaccaattttccccaccccctataggtgccccactgattgttgacacattgcattgtgattatctgatttaagtggaagcttcctgagaactctagcactagcgtagtattagtctaggttcagggccaactgttgcatttagatactcctctgccatccttgatacctgggttcacatcggtgtaactgcccattagcgtaactgcccaacaggtttctccttgcctgctgcccagatagaacagacttatcaagacaggagaattgcaatagagaaagagtttaattcacacagaaccagctaaatgggaaaccagagttttattactcaaatcagtctccccggaaattcagagactggagttagtaaggataatttggcaggccagggagtggggagtgctgattggtcaggtaggagatgaaatcacaggggatcaaagggggttcttgcagtcttccgttcctaagtgggatcaaagaactggtggaaccagatcaccagcctggatggtgtcagctggtgcatcaggatgcagggtctgaaaaataccttgagcaccaatttaggttttacaatagtgatgttatccctaggaacagttggggaggttggaattgtgtggcctctggctgcatgactcctaaaccataatttctaatgttgtggctaatttgttagtcttactagggaagtctgctccccaggcaagaagggggtttgtttccagaaagggctgttatcctctttgtttcaaaattaaactaagctaaattcctcccaaagttagtttggcctacaaccaggaattaacaagggcagcttggaagttagaagcaagatggagatggtgaggtcagatccctttcactgtcataactttctcactgttacaatttttgcaaaggcagtttcacagggcagatgaagatttacttaaatgtctcatgatggtgatgatggtagctaatattcattgagcagttactatgtaccagatattgttctaagtgctttaaataaattagcttgaaactatcattctcagcaaactatctcaagaacaaaaaaccaaacactgcatgttctcactcataggtgggaattgaacagtgagaacacttggacacaggaaggggaacatcacacaccggggcctgtcatagggtcgggggaagggggagggaaagcattaggagatatacctaatgtaaatgacgagttaatgggtgcagcacaccaacatggcacatgtatacatatgtaacaaatttgcacgttgtgcacatgtaccctagaacttaaagtataataataataaaaaaaagtaaaatacaaaaaaaaagaaataaaaaaataattaaaaaattagctcatttggcattcacagtaatcttacagggtacctactattagtatcctcattttagcaatgagggttaggaaaagttaattaagttttctaagattgcacagttactaaaactagaatctgcatgcaaacccaggcagcctgactctagagcctgtaaccttcagcaccacctcatgtcgccccaagttcatgtttttcaggggccttctcccatttctcagtcatttcctctctcaagagaggaggagaaggaagggccaagaagacaacattgctggtgccttttttatttattcagtttacctaaattctctcatcattaccaaatgacacatactgtgagccaggttgagacccatcttttcttagttttatcgatatctgtttacttaaccacaaagataacttttttactcccaaatttgagtgattagtaaagagctacataatgtaaccagttttgcttttcacaagacatctctatttctcagtgggctgaaaaccacacttttgcttcctctttactttgcagtgagagcacagcatttgtcactcaacctctgaatgttagtgacactattgggacgaaaaaggactgtgctggcccaaatggcaggcatctcatatgtggcatctttctttctccttctgagtaagtttcataatcctttatgtttctcttgtcacaggagttcatcaactcagggtgctgagtgatggaacaggacaatttggtctctacaggaacaactatgccatatatttctgatgttagcaataatttttgacttactaatgacagttcttggcttacctagacatccttgagttccagggagtcacaatgcttggttgagtcccatgcacaagattccattggttttaacatttgtgtgtgttgccagatctgtcagttttgcttggccctggctttactcatcttcctgggccgatcatcccaagagacagtaaaaaagctttgtgtcccaaactgagaggagaccttaaggtttgcctgatattaaggcttgatgggataactatgccttgcagatatgactggatggaaagaaaggttatgaaagtacttagtagttttagactatgctaaaagaaggttctagatttcacctgcgagtggaagtggaaattgactactgagagactgagaaatgaacaggaagattcacttggctctactgagggccatgcagaggggcttgcctgatctaggggcatttatctatgtttgaataggatggaagaagagaaaatttggaggtagaagggagagtcagatgagttgagcaggtaatggaatagtttcaaaccagatagcaggtactttttatgctacagttttcattaacatctggtaaagagaatagactccatctcagaataatgtttaaaatgcataaaataaaatgcatagaattacagaggaaatcagtcacattgaaatacaggtatcaaaatattttaaataaattataatgcagtaatttatttgcttcttatttatgcattacataacaaaatctacaggtaggtcttttaaccaccaaacttcaaagtaatgatgagtataaataacatttca

SEQ ID NO: 4161 - DNA, 6000 bp, Homo sapiens
ggattacaggcgctcgccaccacacccagctaatttttgtatttttagtagagacgggttttcaccaggctggccatgatggtcttaatctcctgacctcatgatccacctgcctcggcctcccaaagtgttgggattacaggtgtgagccaccacacccgccctaaaatccactttaataattcattttgtattatttttcttaaagaggactcctcaaattaggtatgcttccagccccacaagacccagatccacccttaccaagggctcaagtgataccatgtagatactttctctctcactgtttcagctcttttcttctctgtttgcttcattagtagcaaacttcctcacatggtggcaagaaggccactggcagctctaaggttatagcacgctcagggctgggaattctaaggtaaagagataccacttttgctgatgacatcaggaaatgacctaaggagggtttggattagcttggtttgtgtcacttgcccttttccaaaccaatcattatggccagggaaatgtggaacacaggttagtcaaatctgggtaacattcctggatctagttaatggtgggagcaagtgctatagtgggtggttgagaggtcatcccaatctagaccaatagactaagaccggggaaaagatagttttctaaaggaatgctagacaaactggaatttcatgtttccaagtcacacaaacacaaccatcagcaacctattattctgaatagaacaaacaagtctttagagcattttagaaacaatagctcatttgatccttaaacagtcctataaaataggtaaggactattatgttttataaataaggaaactcagtaaggagtagagctaggtttgaaatccatgtcttttgactcctagttcagtacctcatatacatttaaagggcttcactttattaatggatttaaagaggtgaaacattgcctgaaacaagagggtactgcctgtgaaagcacgaataccatctatgtcttttcattacagaaacatgttggcaatacccattagtcattctgaacccattttatttgcaatgcaatagcactgccccaccattttcactttcccagctcaagagtgttgtgagattagggccaggcaagctatttactggacgagtagagcaggaagtgttctgcgtaaatggcaggaaaaaccagctatgggtgcctgcgcatgctctgctccctaggctggagcacgacccttctcttatggttcaaggctcagctcaggtgacactggattggggaactttccctaactttcccaatccacctcctctcactctgtggcaccttcagtgttcccataaagcccgtgacactttgctccaacagcattcttcccactgtcttgtaatcgtcagtgttcatctactcctccacactagactgcaagctcactgagcataaggattctgacttatttctccaaatctccagcacctagtacaggatttgtcaaatagtagtcctccaacaaatgagtcttttataagcaaatgagcctcacgtactttggctcagagaagcagccaagattttttggctttgccgactttcacggatcttacttgagggcttcacagcactgaacttcagtttatccctgacctctgaggaaaatgcctcatagaggaaagcaagattggaaggagcaaggctgaagcctgttatttccctacacattcagtggtcacgtcgagtaatttctcctccaatatcttccttgtacattttgggcaccagttggaacaggttacataagtaaatcaaaagcctctttttgcataccagcttttatttttttcctgtagcacttcagtttcacttaaaacagagctaggggtgtatgtgtgtgtgtgtgtgtgtgtgtgtgcatgcgtgtgtgtataacaggtgtgaaatggtttcaataatagaaaagtcaacacatggttgaacaaatacaagtaacttccacattgcaatacgagtggatcttaggagtggtcctgtaaatctgcaggagtaaattttgttagtaatttattaattctaatttctaaaatattaatttatatggatttgtaaaagggaaatcatcactttggaatctctgatcaaagggtaactactctttgaaaatgaaatattctttttagactctctggaatgaaatccttccctgttgtacgtgtacacacacatacacacatacatagaacaggctgcatactgtttctgccgattgccttcagatgggccggtctgtgtgttcatcttgatactaccgagtctacctatttgaaatttgaccttaactttttcaggcaccagttcctttataatttttatttaattgtaaatataatgcaacagaatacaatggagaaaatcatacgtaaaaccagtatcttaacagaatagttgcaatctttttcaaatattctttttctatgtttttaagtgcatataattataattaatggatacatttgcaacttttttttttttaaacaacatgattctttaaaaactcagacttgcctttagaagagtggatatatgtaatactatgtatacagtattttcattgctggtgtaggagtgtgataactgacggtatcatcaatgactttaaaattgctggctgcatttggacatctgcaataacccctaaattgtttttactctcatgaaggaaaaatgaattttgcaaaacagacaagcaaaggaaaaggggtcttctccatcagcaatgaggtcttacttgcttaagctatacttgtcaactaggttatgtcaggtttcatgattgaaatctcttgtggttaagtctagtgttaacctaggtaatatttatttttcaagatttatataacttgctatttcattcagagttcagtatttatttcccctgaacttttcatggaaactaatgatctcaacagtaggaaaacagtgtgttcttccccgcctccccaccgccccccccactttggcttacggagtctcaacattagagacttattcttaaatttggcacattttataaagacatattgggaaggctaaaagtttcttatatctactcttcacaaatgttcaacataaatctcactagggaccgggcactccttgcttaccagtctccctgggtgaactggtgagaggtggccctcaatatttttactttttatttggtgaagcaggatcaatgacaatgacttttgtcatgtggtaggcagttagatatgcagagcttctagaaataatgcagactgggagactggaatgtagttacaagtgtgccaatgaacatgagacttttctgcttgatttttaagctaaggctgacttactctcctgacatttaagggcctcctctccaattcccagtcatcagtaaaggatgtgtacagggaatgacaatattagaacaaaaacaacctgcaagtaaatcggatgcaagagtctatgtatcttgcaaggaaatcttttgcacttaatcacaacatggctctcctcaatactacggagaacagaattgattcagattgtttttaagcctgaacgtaaacaatattgtcgcctttttgggtttcagcacctccttattcatccattttctcttttatgggaagggggttgatgaggtgtgtgaagatgatagaacgtgccccagaaactgaacaatgaagagacgcctgtcatatcgggggtacctagattcctctgaaaggaagcccagctgaaggagcagggtcaccactttattttaaaaacgtaacatggcacatgttggtgctctattaatcgagcctcgggggcccaataacgtgagcatgggctgctgcgtggaagtttgagaccctgttgctgaatcctcgggcctgacggtctatcgctgaagacaagacttccaaagaatcacagtaaacgttaacctaagccatcagaagccattaactccggtgacactacatttcagcgaaaccttcgcgacccaacccctcgctccctctcgcccaaacgctgggtcaaccccacgaactggcggtggcaaggccctgggcaccggtgaagttctcgtggcagcgcagatcggcgaccttctcttctttcgcgctcagacggcggcggcagcagtacgctttcgggctgctggagccggcagcggcgcgaggccggagcccgggcagccaggctgggtgggggaggggcggcggcagcggagccgggagcgtgcgcgcgcacctcacactccgccgcccggggacgcccactcgcgagccggggccggtaggccggcccgggtcccatcgcccccgccctccggttcctctccggcgtgagcccaacgggtgtcggcccagcagctgctgcgctcaccaggcctggggaggcagggtacggggaccgggccgcagccccgagcggcgtgggcgcgctgcctctctggcagccgccgccagagccagcagctgcgagccaccggaggcggcgcggaggaggcccccgcggccgggcaggaaggagacgcggccgacctctgcccgcccgaggcgcggctgctcccgcgcgcccaggccctcccgccgctccagggctgagtgaggaatgagccggcgcctaccccgggctctcggagcgtgggccccggctcggcttcttaggcgcgagggctcggccactgcggccggcggcctagctcggggagcaggcgccggggttcactgaaccggccgcggagaggaggaggaggaggaggaagaggaggaggaggaggaggaggagctcggcgggggcggccgccgcgcctcccctcccccaggacacgccggggcttctcagtggccgccggaggaggaagttccgctccctgacagacccgtgcggtagcaacagcggcggcggccgcggcggctggccggactcaggtgtttcggacgctattgcccttcgcgccagccgtcgagtgggcagcagcgggactcagccgggcgccaggttcctgccaggcagcgccgggaagcgcgggcggccgagaactccttcctgctacttcgcccagcgccgctgcttcggcttcccagcgaagtgggagaccttcctccctgtttgcagacgtccgtgggagacccttattttttccaccgctaaggttaagagattctggaatagaagcgtcgaaggagatcaagtgaaccttctacaactcctcggatgtcgccagtctccctttcggggcggaagactacgtttgagcatctcactgaggtgcaggaatggaagaacccaccttgcagcttttctgcagtgtggcttgcctgatctacccctaggaatgaagaggaggcttgtaataatccgatgaagtacagatgttgaagaggatatcgcaggacctaaacttgtgatcgtttgggggaggtcacacacgtttctgagtgggaatggatgggcgtgaatgacgtgccctcttaaaaagcacaacagtcctttaagaggagcaaaattgagttttcccattttggccaagattttgaagacagttcaatgtattctacatttgacataagatgagaactttctaaagtattctctccaagagcgtaaacgatgactaccccagccctgctgcccctctctggacgtaggataccacctctgaacctggggccgccttccttcccacatcacagggctaccttgagactttctgagaagtttattcttctccttattcttagtgccttcatcactctgtgttttggggcattctttttccttccagactcttcaaaacacaaacgctttgatttgggtttagaagatgtgttaattccacatgtagatgccggtaaaggggctaaaaaccccggagtcttcctgatccatggacccgatgaacatagacacaggtttgtttatttcagaagttctggtactaacatttggcagagcaaggta

SEQ ID NO: 4162 - DNA, 6000 bp, Homo sapiens
atagacattttatttagtcaaacactcaacaatgtttcaacatctactctgtacacggtgctaaggatcaataaaggagtagtccagttttaagacaacacaacaaaaacaaactctcaactccactggctgtaacacctttctactgagatcttcatggcacaaattattgatgaacaggtatttttttttagtggtcactctcttcactttttccttctactcctcaacgcacagatgaattgtgggttgtactttccagttgaactttcaacccaaatattcgaggaaattgctcttaccaaattacttaggatgttgccaaaaccaatggtcaattctcttcctattgtatttgatgcaccagcagcatccatcatagtggaccacgctcctcttgaaacactttctccagttgacttttacaatgccatcccctcctaattttcctcctgccaccaacttctactcagtatctttagctggcccctcctcctcttttcaacctctaaatgttgatatatctattccaggattcagtctggaaacttttccttttatccatgaatattattaccctagcttatttcatctagtcctgtgcctttaaaaattattatatgcttctcacatacaaattgacctctctaggactagcacagggggtgtaattatcctaaagtaacccagaattttaataagctggccaagaagagggattttcctttttccagcatgagggactgtgcctaatatagctccctgtagaatgggtgtcttctcccctaagaaaagggaaactctttgcatgagtcccaaggactctaggtgctgggtagttgattttcgcagacaatcttgtgaatagctggcacctaaatccagactgtttcacgccaacagcctgtattcctcccttgaggatcctgtgtccttgtgcttacatcataaaaagttataataagggatgtaagcctgtgtccttgtgcttacatcataaaaagttataataagggagattagtgttcctacactggaatgaatactcacattgttagcccagcaatttcctaacaatttatgcatcagcataagataggaggatggggaaatcatgctgcctattcttttgctgatcagtaatctttgtgagttttcctaatacagcatattatttaacccgtgatcatcatattgagaaattctttacaaactctgatgccaataggtggtaactcagatgagtatcactttacacagcatgctgaccttctctgagcatgtggaggacaatttcattgtctcaggattgcatgtatgaaagactatcattttttccattgaatttgcttttgtcaaaatcaattggtcgtacgaatttaggccattaactcacacataagcaaaaattctctcaacatggattataggcctaaatgtaagggctaaactatacacttcttgaagaaatcagagattaatacatacatgacactggattaggcaaaagcccaaattttcctggtagaaggaaaaaagtcgaaaaatgagacatgatcaaaactaaaaatgtttacatgttaaaagacatcaataagaaaatgaaaagataagccacagactggaggaaaaaaatttaaatcatatatttgataaaggactcatatccagaatgtaaaatgcactcacaactaaacaacaaaaagaaaaataacccaattttaaaatgagcaagatatttgaataatcatttcaccaaaaaggtgtaggaatggccaataaagtacagaaaagatggtgagcatcatcagtcagcagggaaatacaaatcaaaactacaatgtgacaccacttcttacccactagaatgctatactaaaaataaaacaataacaattggaggaagtgaaagcacaatgatgtgggaaaattgaaatactcatgcattgttgatgggacaggcagccatgttcaaaaacattttggctgttccttaaaacattaaagatgcacttaccatatgacctagcagttttactcctgtcaaccctaaagaaataaaaatgtatgtctacacaatacatgaatgtgaatattcatagcagctttatccataatgcactttgggaggccaaggtgggcagatcatgaggtcaagagatcgagaccatcctggccaacatggtgagaccttgtctctcctaaaaatacaaaaattagctgggcatggtggcgtgcacctgtagtcccagctactcgggaggctgaggcaggagaatcgcttgaacccaggaggcggaggttgcagtgagccgggattatgctactgcactccagcctggtgacagagtgacactccatctcaaaaaaaaaaaaaaaaaagggggggaaacacataaatatctatcaactgataaatgaataaactaatggcagccatccatacaatttaatagaatttgccacctaaaaggaatgaaatattgatacatgctacaacatagatgaaacacataagtatattaagctatgtgaaagaaggcagatgcaaaagaccacatattacatgattctagttatatggtgtccagaaaatcaaatctgtggagtcaggaagtcatgagggctgcctagagctgggggctgggaataagaggtggcaaatgataagcatgagggatttcttaggaaagatagaaatgttccaaaacaggattgtgatgatggttacacaagtctaaaattttactaaaaataattgaactgtacacttaaaatgggaatgttataatatgtcaattatacttcagtaaagctgtttaaaaacagaaagttggtagtgtggcccccagcagccttgctctttgtcctactgctcactttcctaaagaaagcaaaatatttattggtttaaagaaagcttacagttattgcttccactcagactccaagagacactgcctgaactctaagagcctccagaactctcaacagctgaaggaacatttggtcccaccctgaaggtcatgggggtctgtaaggtgcactccagcatctgatatggcaggcaaaggtgtgtgatgcacctgggtggtttcagatagtgctccacaagtcccagggcccgtgtctagttctgagagcttcagaagacaagctgctacaccttgcatcacaggaccaacctttcctaggcaagtgggtttgaagcattggcagccaggttccaagtagaaggtgaatgtctacacacaggagaaaggcaagacccagaatggggagtcaagctaaatcatttgtagagtatgacttccaacaacttcagaaagcattcttttgaagtgcttatggcatttccaccaacatagaccataggctggaccataaaacaaatctcaatatatatcaaagaatcaaaatcatacagagtatatgctctggccacaataatatttaattagaaatacataacaataagaaaatccccagttttagaaaacatgcaacatgcttctcaataacacttgggtcaaagaagacatcacaagaaaaaattcaaaacgtcagtaactgaataatgataacccaatgcatcaaaatgttggatacagctaacatagtgtttagagagaaatttacaactttaaatgcctatggtggaaatgagcaaagaagtaaagtcaattatctatgcttttatcataagaaccctgaaaaagaagagtaaaataaacccaaagttaataaacatttaagccaataataaaaataatgaaaatcatgaaatagaaaaatgaacaaacaatagagacaatcagtggtcaatttttctgtactccatgaacaaaacttcagttcagaatgattttatatttaaatatatatccagaatcacaaagatcttagaagaaaaaattaggaaaatataggaataaagtgggaactctgtgggaataaaaatcagaaagtaattgcctaccaggtaaactcgggggagggcaggcaattgactaagaacaggcagataaaactttctggagtgaaggaaatggtggtcttcttttcgttggtacttacatggacatatataactgtcaaggttcattgacaatgaacacttaagtgtacactgaacgcttaagatctgggccttgtaatgcccagattacatctacttaaaaaaactacatctctatttttttaagtagagaaaagtgtcttggggagtttatggcagtgatgtttgggcagactggggcataggtttcagaagcattcatagcatcttcagttcaacaatttgctaagaatggttttgcagccaaaaatgtaagatgagtgcaaatatctatgattagagtcattgggcatacaactacaaatccccacacttgtattacaggccatatgattaattcgttatcactagatacctttccttcaatgaggttcttccattaggaacccagagctctccagggaaaaattgcaattgaggttttggatatattgggtggaaaagaaagtcacctcacataaaacttagtgattggagctgtcaccattgaaaatttctaaactttgcaagacagcagtgacgtttcaaatgacactctcagagagttgataatgggctaaaatagatctccctccaggtggatttactgtacaaggacaacatttacattgcacttggagacttctcccagtttggtttaagttcacagattgcagatcccagacagctggtatcaactgaccagtgttctgttaaggctaaagccaagactctttatcacactgtggccttaagattggatttctcttcctgttcctgggaagaattagagatataacctaaaggtcactattattctgagaaaagggattctggaggaggagggagcaatgagtatgtggcaggagttcaaggtaataagggctgagacacaagccacagagcataaagctccagtccttcctccagggatgaggcagtaaggacttggactcctctgtccagcttttaacaatctaagttacggttagagctttctccttttctttcaactactcctggcagttgtggggtcatggaatttttgtaaaaaatggggtggaggaaaataaggcatctgctgagtgtataaccattttacctcttgtttttagccctcttctgggtcacgctagaatcagatctgctctccagcatcttctgtttcctggcaagtgtttcctgctactttggattggccacgatgggctggagctgccttgtgacaggagcaggagggcttctgggtcagaggatcgtccgcctgttggtggaagagaaggaactgaaggagatcagggccttggacaaggccttcagaccagaattgagagaggaattttctagtaagtaaacttgagtcatgggtctgtggctccatcttaaactctgcatgggtgtggggaggttgaccttgtctagcaagttaaggaaagttgtagccaaatgaaagccagtcacacatctaaagtcatcagaaaggaaatagaataaaatggtatagtgtgaaagatactggatggggtgtccagagactggattctggccctgacgcagaacttgagaggcagccatgtcagcctcaaggccccttttcttctcttctagagagtcacacatgagttctccttcttgtctacaactcttatgttctgaagctttttgtcttggcgattgctgtgcgacattcacaaaggacatcatttacctggagacctcaccagtgggtcctgcctgtctagactgccccaggcttcatttcattttatagcttccttagtatctttagtgagggcaaaataaaaggaagtgaaggtacggatgtgtgtgtaattgtgtgtgtgtgtcagacagagaaagaaaatgagggggaaagaaggtcagagacagagaatgagaaagacagagaatgaatgagaaagatagtgtgagggagagcatca

SEQ ID NO: 4163 - DNA, 6000 bp, Homo sapiens
gacttagaaaagtaataatattcctgaataaggaaggggcataggctgtgagctgagacatgcccgtcagcacctccagcacaaatattttggttaaagtacaaggacatagaatgtacttattcctttatgtctaatagctacataggatagggcttaacagagagttaatagcacaaagcaaggaggattgaaggaagttagtctttaaaagaaactattatttctaacacttatgatttattctttaacaagaagggaaactctgaagaggaaactttttactttctacacccaattatcctactcaccgcacacatcccaagctccaaggcgtgaaccagctgggcctgctctctgctaggctttcctgacaaagtagggaaaccagacagacatgttggaagaagtattacggtttcatgaaatagcttcttctagaaggcaagagatagctttgctgtggcttgatatttgaaataggctatttaaagtcataatttttttttttttttttgagacggagtcttgctctgtcacccaggttagggtgcagtggcgcgcaatctcgtctcacagcaacctccgccccctgggttctagcaattctactgcctcagcctccctagtgtctaggattacaggcgcccaccaccacacctggttaatttttgtatttttagtagagacggggttttgtcattttggccaggctggtctcgaactcctgacctcaagtgatccacccgcctcggccttccggagtgcagggattacaggcgtgagccactgcgcccggccaaagtcgtaattattttaaacagaggctttcacgggacttccaaagcgcaccttgttctttccggctcattcccccttcccctctaacccttcactttcacttctctgactggatgcactgtgcggaggacacagctaagggctgtgaaaattcaagaataaagaaaagtcctgccttcacgcagctcgcactgtgaggaggtttaatcagggatggtaattcaaaataactcgtgtttaatcaccagtgcagatggtgtcagtaaacctgcctggggcgctgcttcccaacccccgccagggcctgcgccctgcagcccaccggaggcgtggccggagggcaggcaccagggcggaaggcgggggtcgttctaattccctgggggtagctaatggccatgcctggaggcgaagcttttcaaatgactaacttggaaaaccgccaaagacaatggaatctggcagaactgtggggagcaggaatcttaagcgtttgcatgttgttggggtagcaggggctcaagaaggggatgctcagggcaatagcttttttactaatctgtaagaaaatgttccagtattttaatagctggtacagccatactgatgcatacagtccagatcgatagatattggtccagatacagtggctatctgttcttttgccttccaggagcacagtttctcagaagaaatgttttttccatgtatataatcatgtaattcaaacaggagctgcagtttacttgcagacctcctaagtgacagtgtttggtctgggggtagatacgggccacaagttgctgggactattctttattcgtcctcattacttagcttagtgtctggtatagaattaggcactcgatagaattgtttaagaatgaatggacacaaacctttaactattgcttcgtttgatctcacttgtaaaatttctgcaactgtgtgactgctgtaatggaaagtcttatcctgtttaggcagcttaatataagttggtttagatatgtgcatttcacgatttctttgataagtttcaagaatttgctggcagctgtaactatgacgttcaaggcttatgtttactttttttttttttcctagtacaacatttacaaactccaagaattttatccatttcagaggtggttgtcagatttagggcaaaggacatatgtgggctttataaattttaaagttcggtacaaatgtttgttgatactcttgtttaattaaatgtaaaatagttgagaaccttccatgtacttactgatcacagtgttaaccattattacacagtactgtattgctccaagaatcaaagggcagcagctcaaagacaacacttggatgtgaatgagatgaagctgatcaagtcagaaggaaaaggaattcagatgccagagctcccaaggtctgaatagtgggcagtttcaagacaactctagttttctcctgatggctgaaattattagcagcctaagatcactatccttttcctggaatcaatgtgttcgaagggtgccagagtcatctagtgtgtttacaaaggataaaagtaagaggtgtgagtatgaatgttgttgttccaagaaataattgctccagggtgactccatgcttttattagtttgcgtgtgtgtgtgtgtgtgtgtgtgtgtgtgtgtgttttggtttttaagtaacaaactaactcaaagtagcctaagcaggataaagagggaatttgttataaagaagcaatagtgtttgatagaacccaatggcaggaatgtgtatgggccttgggaggagcctagagtcaggaactgaaaaaagatgtggattcttgctccgaatttgcttctcggcacacacctgcattcttctctctctgcttctctaatcaacatggcagtctgtatccttagttaaaatatttgtagcattaattccccattactcaaatgaccatcatttgaggctgtggagaaggcatgtccttgttgagtggaaggaagggaaattagaacaacttatatctatgggctattttaaatgtaaggtactatgattctaccaacttagactcccatatacacaaggattcacttccattccactttctgtctctgttaatagcacaattttttttgtcttatttattgtagtccttcatctttcatgtggagtcaatcactaggtcttattgggttttggtctcaaaagtctatcattaaataatattacttttcttagcagcataattcacaattgcaaagatgtggaaccaacctaagtgcctgtcaactaatgagtggataaagaaaatgtgatacacacacacacacacacacacacacacaccatggaatactacccagccataaaaaggagtgaaataatgtcttttgcagtaacttggatggagctggaggccattattctaagtgaagtaactcaggagtggaaaaccaaaaaccgtatgttctcacttaagtgtgagctaagctatgagtacacaaaggtatacagagtgatataatggactttagagacttagaaggcggagggtgggaagggacctagggttaaaaaactacttattaagtaaaatgtacgcaactcaggtgatgggtgcactaaaatctcagctttcaccactatataattcatctatgtaacaaaaacccacttgtaacccaaaagctattgaaataagaatctttttaataaagaaaatgccacacaaaaataatattggttttcttctaatcctgaaggccaatataaaaggtaacaaaagcctgagctctttaattaatgggtacaagttaagacagaatcacatcaggatttgaagttgaacctgagctcaaatcctgttcccatcactgctagctctctgaggctttcctctcaactacaaagtggagatataatactaaacaagcttactgggttgcttaactaatatctagaacatacttaacagtgtttctattaatgcgagaactaactgtaagcacttagtaaagagtagtcattattaagcaatgataaataaaagcatttgtataattctttttttagcttttgaaagccttgcacctagattttctcatctaatattcattaaaaccctgaaaggccgatcatatccccactttagagatggggacaccaaaaaacaaagagatgggaacacctagatatatcagagatcctagtttttattttatttatttatttatttattttttttttttgagacagagtgtcgctctgttgcccaagctggagtacagtgacgcaacctcggttcactgcaagctccgcctcccgggttcacgccattctgcctcagcctcccgagtgagtagctgggaccacaggcgtccgccaccgcgcccggctaatttttttgtgtttttttagtagagacggggtttcaccatgttagccaggatggtctcgatctcctgacctcgtgatccgcccgcctcggcctcccatagtgcttggattacaggcgtgagccaccgcgcccggcctgatcctagctttttgtaggtgactgacctaggtggtacaagatgtcctgtacttgttcatttattcacacatacaacacatatttattgacttcttaccataaactgtttaaggagcctggtggggataccgcataaacaaacaagcaaaaatagacaaaaatctttgtctagaaatatataaatatagaacattttatagaatatatgacatagaaaacagaaaaaaataaatatgaaaatagcctaattttcagggttttcctttttttacatacccttcatggttaacggttagtggttaatggggattacccattaactcccaccctccttcccagctctctcccaagacttagtttcaggaactagaaaattctgattcagcttgggtgcaatggccgctcaaagggcgaggcttattcgaagcctcaaattcagaaaacccagccagaccttggaagttaagaaggtggaaggcagatcgcggaaccagtgttctgatagttgtggttctctgagggaagccaattctggggaccggtagtggaaagctcttgcgctgtttccggccacctcagcgggaagcggagacgcaagcagctggatctccggtaactgagacatagggtataactgttgtcgcggcggaggaagtgaggacggcgccaagggccttccgggccagtgttggatccctgtagtttgtgaagatggtgttgctaacaatgatcgcccgagtggcggacgggctcccgctggccgcctcgatgcaggaggacgaacaggtgagctgcttactcacgacccgcgaccccaagtctctgtcagcgcgctttgccctcagcatcggattccttcctaggaccgggagacctttgtgacttcccgggcactcccgacctctctgaagtgcgcttttatcttttggtgtaggagagactaccggcgaagaggaaatctttcctgaaggaggagttaagttttttgtgttagctgtttctctttagaaaaacgctctggagaagtggtagctttggttgattgtgatcacccagtgttctttgactctttagggactttgttaaaattcaggatttctaattttctgctgctaataggactgctgatggataaatcctgggaaaaaatcagccaagttcttcaagtctataacgtggcacctgatccttgacctagcttgctgacatcttttgaaagtgggtgaggtaatattgccacataaaagcacctgttaaatttcagtacatcacattctttcaggattatccccagttcccaccttctccaatacgccgtaccacattcctgcaatacattgtaacttatttttttctttgtctttcaataacttgagtttcctagcgggcaaacgacgggtcttaatcatctctttgttatccataccttttacaatagctgctttatgctagtaggtgctcaaaagtatactgaattgattaaaaacagcactaactccagatgtcttaaaagaaagatgttttgtgttttagaaacacagtggaaatttctgaagtaagacaagtttctggagcaagcttgggaggttctgaagacaaagctgagaatggaatttatataatttgtttaaagtgatcaattttattttacttttccatac

SEQ ID NO: 4164 - DNA, 6000 bp, Homo sapiens
ccacacaaatatacccaactgatttttttttcttttttttccaatgagaaaatgctaaaacaagcaaaacttcatgaagggacatctcatcaaagacgatatacagatggcaaataagctcataaaaatattttctacatcattagccataagggaaatacaaattaaaacccaaattagatatcattacacacctatcagaatggctaaaaaattgttgacgacatcagccaagtgcagtggctcacacctataatcccaacactttggaagtctgagggggcagatcacttgaggtcaggagtttgagaccagcctggccaacatggtaaaaccccaccactactaaaaatacaaacaatagcctggcatggtggtgcacacctgtggtcccaactacttgggaggctgaggtgggaggatcccttgagcccaggaggtggaggttgcagtgagctgagatcacaccactgcactccagcctgggtgacagagtaagattctgtctcaaaaaaaaaagaatctttgttggtaaattccttcaggttttggtgtgtttgaaaatgttttacttatttttaattctggaataatattttagctgagtatggaagtctaggttggcagttactatctcttggcttatcagagccacaccacaactgtattctcaacaaaagagagatgacacaccactctgctaccacaaaaatgaccagataatcccctcttcagactaacatgagtaactaatgcttttttctctttaccaatttgggttataatcctcttgcttcctaggtaagaattatttagacacccaatcactgaaacgcccccacttcttaacagtattcaatcccaaattagtcctcattcagagttttagagactaggaaaaaacaaacaaacaacaaaatcagccctcactattctaaactgtagttcagaaatatccaacagaagctgaaactctataagaggttccttttaacctctccttagggaaatggtcccataattcctttggggcattctctcccttgctacagcaagccagtagatttaacttttttgactacagatttgtttccagtggtgtttagttaatgagctttgacaaagataatggtcaaatttctccaatatcaattgactatgtgaagaatatatatatatatacacacacacacacacacacacacatatttgtgtgtgtgtatgtaatatatacatatttatataagaacatattggcagggcgcagtggcttatgcctgtaatcccagcactttggaaggccaaggtgggcggatcacttgagcccaggagttcgagaccagcctggccaacatggcaaaaccccatctctactaaaaatacaaaattagctgagtgtgatgacacatgcctgtaatcctagctactcaggtggctgaggcatgagaatcacttgaacccaggtggcagaggctgcagtgagccgagatctctgggtgacagagggagaccctgtctcaaaagaaaaagaaaagaaagaacgaacccaggtcatttgtcctgtagagtattcacaaagtctgaatttgcacctttgagttaccacttaatgtctcctgtatttcctgtaaattagtagttagctctaatcagattcagactggtttgtttgtttgtttgtttgtttgtttgtttttggtatggctacttcatgcaaggtggagttatgtactctatgatcaggaaaacatgtttatctctgttttcatgatgaataacagccactgtttttttgtttacgtagagatgggctcttactatgttgtccaggctggttttgaactcctgggcttaagcaatcctcccacctcagcctcccaaaatgctgggattacaggtgtgagccactgtgccctgccacagtcattgttgaccattgcctagatatattaattcatttggatttacaaaatgttgatattctaattatattatcccttcttcaattatttactggaatgcttctataaagagaaatttccccctcatcttgagatacagttcccaaaagaaaaccaggataaatacttgattctttccaattaccagcagtttttaaaataatgagttgatctgccagcattctccaacaatgaccaatgggtttgtatttttaagtatcattgtgaattcatggatttaaacatattttatgaatttcaatccattgcagatagtatccattttgatacttaaattgccccatctttggccaatgggaactattctagttggctcctaagttcttttattacaatcctaacactctttgaaagcttccttgcctatcttggacaatacctgccccaaacctgaaatcagccacttatccaaggagttgtttgttggtcccttttaacagaaaatggtatttacatagcacaatttgagtactagaggtgtttatttttactggatcattgtttccaggcctttttagggtaaagctaggaaaattttaaggataaaataaaccatgagttcagagttatatttgcaatttaaattcagaattacggagttttctcttaacttcatcaatcgtaaatatgtatctctttattccaccccaaaaattctggttctcagagacactaacattattaatcatttgttttatctcataactaaaataatctcagaataacaataccaacactaacaccataatatggctatttaaaaatatttttgcatttattttctggcattatagtatatcccacttaggctgtcatagtcaaattattatgttttaaagtcacttgaatagtttggttagaagcattttacatttctataatgaaactgcttgtgatatggcctctaatggttgagaaatatttgtcatatatatatacctgagaagtatatatttgacaaaaatatttgtcatatatatacctgagaagagtgctatgagggcctctagactctgtattaaaatagagccaactggtaaagatggcttagtgattgtgttggttattactgagtgtcaatttgattggattgaaggatacaaagtattgatcctgggtgtgtctgtgagggtgttgccaaaagaaattaacatttgagtcagtgggctgggaaaggcagatccacccttaatctgggtgagcacaatctaattcactgccagcacagctagaataaaaagcaggcagaaaaatatgaaaggagagactggcctagcctcccagcctacatatttctcccatgctggatgcttcctgcccttgaacatcagactccaagttcttcaattttgagactgagactggctctccttgcccctcaagcttgcagacagcctactgtgggaccctgtgatcgtgtaagttaatacttaataaattcccctttatttatatatctacctatatagatatccatatctatatagatattaataaatctagagagacagaaagcagactggtgatggccagtctagatggctagatagatagacatggatatagatatagatctctatatagatagaggtagatacagatatagatatatgccctattagttctgttcctctagagaaccctaatacagtgaccgtatttggaatcggtccttctgttaatttcacttggcaagtactaaaagatgatgatctcagatatacctatggctgcaaaaacatgacatggctaaatcccttggttgcagtatctcttttcttttttaaggggggtgggggggcgggtctcactgttgcccaggctggagtgcaatggcgttatcatagctcactgcagcctcaaactcctgcgctcaagtgaccctcctgcctcagctcccaaagtgctgagattttgcaatatttatggtcacaagattatgttattccataaaagtatctttctgaggctaggcatgttggttcacacttgtaatcccagcactctgagaggctgagatggaaggattcattgaggcaaggagttcaagaccagcctggtcaacatagtgagacctcatctcggaaggaaggaaggaaggagggagggaggaagggagggagtgaaggaaggaaggaaggaaggaaggaaggaaggaaggaaggaaggaaggaaggaaaagtatatttttgaatctttttctatttctccaactctttctttagaagaattctatttccattctttcttcacctctttgcctttgttagccttctctccaagcaaatcgggagcctttattttttgtgtattcatgagggagaggaagatgaattgctgtacaaactaaagtaatgaaaatggagtaggtaggaggatagacagctgcaaggatctgagctggatagactgaacaaaccctcatcctaagcaactcacagctcagatttcttctctggacagctggcttttttcgtccttctgaaatactctgcaaagataggagaggggctatgaactacctctgctatggatcttattcaaagtcagctacctcctagatactatctgtagaacctaaatgtaatattcagcatagcagggatgaacatggtaaatgaaaggtatccaattgcccactgtaatttttaaaggccaggagctcaacattattgaaaatgctggagggctgcctggagtaggcagtgaccacagagtcacacaagctggaattggatatccaacttgtctgtcatatttctctcctccctccctgacttggcactcaatactccatattctttctaatcctctaaccctccccactcccccaactcccacaccctacccccaccaacgttcctggaattttggacttagctatttttaaaaccgtcaactcagtagccacctccctccctgctcagctgtccagtactctggccagccatatactcccccttccccccataccaaaccttctctggttccctgacctcagtgagacagcagccggcctggggacctgggggagacacggaggaccccctggctggagctgacccacagagtagggaatcatggctggagaattggatagcagagtaatgtttgacctctggaaacagtaagtcaaaatgaaattgcaattcctttaataagcttttatattgaagttagacttttataaaattacaaacacctacttggatgtctctcgtccaaatgctgggatctctccctaccaaggtgccccaatctccatttctctttctgtcttatttctttctggcctctggcctctagctttttgaagtttaattctctgtctctcctctggcagtcttagccctctctttaccttattacctcaagactcctgatgaagttttagaaggagttccctacgtcctctattctgtagttttcttaccaaggccaaatatgacctcagatgatgagtcactgatacccttctatcctgcccccacttagcaatgcccttcacattgagattccaagcatgggggctgctccctgtaaatgatttctccccacaactctagtccctccattctattctccctcttgcaggactcttcccccaatcatatccttacccataagataggggagttaggcaggagggatttagcccctctccaactcctgtcatcataaaagactgagaacttcagaatttgaaaagaagagattaatggaaggagtgatatttgggaaaatacaagaactgttgacttagaaaaaacaaatattgatttgcatgtttggtttgcatcccattattccatgagagagggagattaaaattgcagctctctagagctgatgaaaagagattggtttccttttcatttgaatactgatattctagacgggatgggtatgccacccttaatccttcttgtgttctgacacaaaggaggaaaagaaatgtatgactcctagagggcatctcctcctaatggagagggacaaataagaagtatgtttctga

SEQ ID NO: 4165 - DNA, 6000 bp, Homo sapiens
ctgtttagagctacaaggttaaagtgcctgctttccagtaatggagattgagtcactattaatttgataaaaggtaagctcagtaggcatcagattcctagatacaaggcatttgggaaagtgattttagcagacatgagggacatttaggaaagatgaatagtttcagcctaagagaattttgtgaactgtttggagttacgatcaggctactctgagctagttgggaaatggtctttcctcttcccatctcttgcattcatatatttctaagttttttttttttttttgtttttgtgctctgcctaagaagtgcttgagaattgtgaggagtataaaaatagtcaaagctggctgggcgcggtggctcacgcctgtaatcccagcactttgggaggctgaggcgggcggatcacgaggttaggagatggagaccatcctggctaacacagtgaaaccctgtctgtactaaagatacaaaaaactagccgggcgtggtggtaggtgcctgtagtcccagctacttgggaactcgggaggctgaggcaggagaatgacctgaacccaggaggcggagcttgcagtgagcagagattgcgccattgcactccagcctgggcgacagagtaagactgtctccaaaaaaaaaaaaaataataatcaaagctcttggatttatagtttggtccacagccttgttttgatctttcctttatcctgttttattgccatttaccacgtactgtagaaacatccctttcaactgctgataacttggaaacaagcctacaaaaataagtaatttctaactactcctaatactacctataactacccctaagcccttaccactctaacgtgacattattaaattttttattttattaacactaatattttaactacaattacagcatatgggcaatacagaatttacctaaaaggatactaatttggaacaaaaaaaatcacctttcgcacatgtatcatgtcacaaccagtttgccattgaaacaaatagaggttgcaaatattgtcagattgtcaggctgtaagaaaggatgaaattcatttcccattgcatcatcttgtggcccatggatttcaagtgccttagccaaaatcatatagctagttagcagtagagccgagactcagaaaaaaacaaagtaaaacaggcagactgaaacaaaaagtcttctaattcccagtccacatgtaaaatttgcttcatataaacaaacctaattgtaaatggcactgtagcaacaggcttctttttaacacttggattggtaaaggtcttgtttgcaacatattagaagtattatttttctctttcccccccaccccacccccaacagagtctggctctgccgcccacgccggagtgcagtggtgcagtcttggctcactgcagcctccacttcccaggttcaagcaattctcgtgcctcagcctcctgagtagttgggattacaggtgctcaccactatacccggctaatttttgtatttttagtagagatggggtttcgtcatgttggccaggttggtcttaaactcctgacctcaagtgatccacccaccttggccttccaaaatgctgggattacaggcttgagccaccaggcctttctttgttcttaggagtatagtcagactaacttctagtagttatatttctaataattgaggatgtaagtaaggatcaaatcttaaatcagtataatgcattgtcattccagagataaatcctagacccttcttggcctccttctgacataattctaatcctacagtctcagagatgctgttgtatcctgccccccaaccccatgatagtgatagtggtttttgccttgaaggaattgctttgtatttagcttttccccctctagatttctagttccttttcagtattggattggatttgagatttgattaacctagtactcaggttcagatgctcgcctctttgcaattttaacactcattcgacaataaagtcagtaaaaaacacaaatttggttatgtcactctctttttactttagtgtctctccactgcactcagaataaagtacaattttattatttgtgatctggcttgctcttcccctctcagttcattactcaccattttctagtcctcagctttagtagcattgagatcctctatcctccatcctccctagcatttctcctattttaattggtctaacacctatctctgaagaatcaaattttaacatctggaaagcttttcctgactgcacggctgtgtcagacacccctatccactccccacccccattgtcttctttagctcctttagcataacacttttgaatacactatattgtaattgcctaatttctttgtttcttgcagtagtctatacatttcttgaaggcaggattttgctgccctgtccttagcaaaatttgagtggcgctggagatgcatattactttttgaatggataaatgaaatgtaccacaaagttttacccaaaccactgacttcactctcttaatagatccccatgtatgtttttcttccctgccccaatctgaaggaggtgaaattgggaggatgcaaagaggtagaaaccacgtgtaataaaacagatgtaatggaagaggcacagatagaggatactgtttttacaaggcaggctcttttattattattattattatactttaagttttagggtacatgtgcacaatgtgcaggttagttacatatgtatacctgtgccgtgctggtgtgctgcacccattaactcgtcatttagcattaggtatatctcctaatgctatccctcccccctccccccaccccccaacagtccccagagtgtgatgttccccttcctgtgtccatgtgttctcattgttcaattcccatctatgagtgagaacatgcggtgtttggttttttgtccttgcaatagtttactgagaatgatgatttccaatttcatccatgtccctacaaaggacatgaactcatcattttttacggctgcatagtattccatggtgtatatgtgccacattttcttaatccagtctatcattattagacatttgggttggttccaagtctttgctgttgtgaatagtgccgcaataaacatgtgtgcatgtgtctttatagcagcatgatttatagtcctttgggtatatacccagtaatgggatggctgggtcaaatggtatttctagttctagatccctgaggaatcgaaaaggcaggctcttaacagatgtaaattaacatacaaataatcttacagaagagagagcagaggtagcagggtgcggtggctcacgcctgtaatctcagcactttgggaggctgagacaggtggatcatgaggtcaagagatggagaccacctggccaacatggtgaaacctcgcctctactaaaaatacaaaaattagccgggcatggtagcgggcgcctgtagcttctcgggaggctgagggaggagaattgcttgaacccgggaggcggaggttgcagtgagccggcaaaaaaaaaaaaaagcaagcagaggcttactccctgagaattaatggctaatggcccccaagcgcaccctttaactcatgctatggacccaaatccctgtcctgcccggtcctgagtcctaggtcactcacctgggggaaggcaagcaggaaactaagtccccaggctgcccccagaagtttccttacacctgaacgggatccaagcgggttgagtactgctgcctggcggtccaatccaatgaccacaggcaggaaagctgcagaatacgtggccattagtttcaggaacatcagtgtccgacatgcgatgtccacagccagccattgaacagtgatattccaggtggcatctaggggcataaccacaaaagtgactagtaagtcggcggctgctaaatggatgaagagtctcctgaccggagaggggcggagctggctgggttcccgccgtgtcactgaccacaggactgccaggttccctccagccgaagaaacaaacagcacaatggtcactcccactcggaccttggctgctgccgagaaggtgggcagctctgagccctccacctccactcctgatccagcccagacctcctcccccgctgctgaccccaaggggtgccgttgcctgcagacatggtggcctggagagaaactgaggaggatgaagtgtgggtatgaagcggttagctttggccactgattcttcgccctccttttcaggatctggagctgattattgcgaatttcgttcactaaagcctctgcttctggagactctccatctgttctggaggaggtcacttgttcaactgtcaaggttctgcagggaacgaagatctggtaccaatcacgctcctttttccttggacagaccagcctgggcttcaggcctctactgacctagacctctttagcccctacagccctggattcagtcggggcctgcgtgcatgtgtatttgtgaggttctgccaggcgcacacctatgccggcggcctccaagacgtggagatcactgcggcgctttctcgccccgccccggcccctgcaggccccgcccttggtcatgaatatttaaagaagaaggtgccgctggaggcgtgctagggagtaggggtcgtctgataaggggaagctgtgacgcagacacgcacagtaatacacagatggaggctcaaaagacacgagtttcgcgtcctgaaattccgcttccagggccaagctttcttttctgatactgtttgtccctcgcgaggcaccgttgggtcgcgcagtaggcgtgactaggggcgggaagtggggcgggagcagggccgcggagcctgggctgcggctgtcatggacgcctgggtccgcttcagtgctcagagccaagcccgggagcggctgtgtaggtgcggcccgaataggaatgggggtggggcgggggagggatggacagaggaagactctagtgaggcgaagtcagtttaggctacaggggggtcaagaagggtcaactccggctacgggggcccgaacggaccgtgaggcgcagatttgagccgctgttgagatgattcctttccgttcgcggaagagatggggaaactgaggcatgagtgggccagcggggaggccgctcagggttgctgtgtccacataagaccgacagtgtcctcactgggcggtgatggaatgaggagcattcgccccacggtggatagccccagactctgcccccagagctgaggaggcactcccagtttccgtgtccccacaccgtgctgccattcgggaactcccctgcctccgccctggcgtttggtctccattcagctagagggccttgaaatctctcagttcacctattctgaggaataaaatgccctccaactgtctgcctccccctcatcgatcacgtacatgctcacgctgatgtgcttgtgatggacccctgcggcctgcactggccccttcaggcctcatcattgtcaaatctctaatttgctcaacattcagtagtgctccccacccctttctagactcttttttctccttatgcctttcccttcctctggcctggagaaatggtgagatatgggcatggaggaggaaggggagtgttctcaaactgggaaagggggaagtctgtctgtgccttttggaagatagttttgagcggaaggttagggaggtctccaccttaccttgcctgccctctcctctagggccgcccagtatgcttgctctcttcttggccatgcgctgcagaggcatggagccagtcctgagttacagaaacagattcgacaactggagagccacctgagccttggaagaaagcgtaagtaactctgtctttccttttatcccccaacctttcctccatccccagctcaccttcctttgtccctccttcctgtaccctctctgttcttctttctcatttggctctgcacttaccctc

SEQ ID NO: 4166 - DNA, 6000 bp, Homo sapiens
cccagctactcgggaggttgaggcaggagaatcgcttgaacccgggaggcagagtttgtggtgagccgagatcgtgccattgtactctagcctgggcaacaacagtgaaataccgtctcaaaaaaaaagaaaagacaaacaaggcctctgctcctctggaacttaccttgtaatgggatgagataaacataaataaacaataaattaaaatatcagatactggtaaatgttatgcaggaaattaaaacagtgttatggagtagagagtaactgactcagtgctttagatttagggataagggaaggcgtctccgaagaggtgatacttaagctcatacctgaagagcaagaaagagctagctatgtgagggttttggagggagaatattccaggtggagggagaatattccaggtagagggaataggtagtgcaaaggtcctaaggcaagaacaagcttgatgggattaaaatgtagaaggaaaccaacatggttggagcataatgattgcaggaaagaatgatacaaggtaaagttagaggggtagggaccagatgttgagtctgtaagcctctctaaggtatttatattttattatgaatgtgacaggaagaaaaccatggagagctgtggtttgtttatttgtttttggttttttttttttttgagatggagtcttgctctgtcgcccaggctggagcgcaatggtgcaatctcagctcactgcaacgtccatctcttgggttcaagtgattctgctgcctcagcctcctgagtagctgggattacaggcacgcgccaccacacccagctaatttttgtatttttagtagagacagggtttcaccacgttggtcaggctagtctccaactcctgacctcatgatccacttgcctccacctcccgaagtgctgggattataggcgtgagccaccacgcctggccaaccatggagagttttaagaagggaagtaatgatgtgatttatgtttatgctagctattatatgaaaatagattgttgggggtgggggcaacaatggccacagtgagaccagttaaaacattaaagcagaagtccagacaagagatgttagtggcttagagtatggcagtgcggtgtgatagagagatgtggttggttgggttcaggatatactttgaaggtagtacaagttattgagtacagaccaccattgtcagattggattacaaataaaaaacatggattttttactgaagaaatttataatttaacacatttggcaattacttaaacctctgggcctctaaaggaatagggattggatttagatcacctttaatatgtttgagtctctgagacatctgaaatttgttctttcaaaacaagtttgccttgttataggtcaagttgagagagagatggagagtgtgtgtgtgtgtgtgtgtgtgtgtgtgtgtgttgccaagtggaaaatgaaatttgagattgaccttggaagatttcatgatgctcatggagtttaaaccaggatcttaaggtgcacataaacatgtattagttacagaatgttgggaggactttgtttcttcatttttattgggacataattgacaaatagaaattacatatatttaaggagttatagctcgatgtttgtacatgtacgttgtgacatgatcaccacagtcaagctaattaacatatccatcacctcacataattaccttttttcttttatggtaagaacacttaagatctaccttcctggcagatttcaaatatacaatacagtattgttaactatagtcacaatgtagtacattagatctccagaacttactcatcttgcataactgaaacttatacgctttgaccagtatcttcccatttccctcactccccaacccctggcaacccccattctattctgtgcccctatgagttagccttttttttttttttttgagacagagtcttgctttgttgcccaggccggagtgcagtggtgagatctctgcaacctctgcttcctgggttcaagcaattctcatgcctcagcctcccaagtagctgggattacaggtgctggccaccacaactggccaatttttgtatttttagtagggacggggtttcaccatgttggccaggctggtcttaaactcctgacctcaggtgatccacctgccttggcctcccaaagtgctgggattacaggcatgagccaccacgcccggccttattttagcttccacctataagtgagattatgcagtatttgtctttctgtgtctggcttattttgcttagcatagtgtcctcgatggaggacatttctaataggggtaatagcattcactttacttctgatctaatgtgtaatctctttgctacaggaaaagaaaatgttaaaatgtgatgttggatatgttaagtaggtatacatgcccttactgacccttttgctctgtgtatcaggtactatttgttttccctcatcatgaatttgagccgtgatgcttatgagattcgcctactgatggagcaagagtcttctgcttgtagccggcgactgaaaggttctggaggaggagtcccaggaggaagtgaaactgggggacttgggggaccagggactccaggaggaggtctgccccaactggctctgaaacttcggctgcaagtcctgctcctggctcgagtccttagaggtcatcccccacttctgctagacgtggtcagaaatgcctgtgatctcttcattcctctggacaaactaggcctctggcgctgtggccctgggattgtggggctttgtggcctcgtgtcctccatcctgtctattctcaccctaatctatccctggctacgactcaagccctgaccttccggtacaggataaggaggggacctgaattggtgagatggaatcttagatcgtcccccatgtgccagcctcattcgaattctactctttggttaaagttagaaattcagagatttaggggtggaggaagagctttggggaagatgaggtaaggaaagatgactcgtgaagttaataggatgtctctaatttctagatgtgcctgagcttctgttcttttcctctttctttgtgtctctcttgaatatatttactttgtgtctcttaactctgtttaaggttctgtgtctatgcatctctctctttcttttttcaaccttctcattctcctatccagggatttaatcagcagaattactttttgataggggaggtataaggtttggcctgtaaggttctaactgccttcttttttctcacagaggtggcttatggcagatttttcctccttcaaactccaaacataatttttaagactatgtgccagtggactcttcccttatatctctgcaccacaagttgttggatgtttcctcttcctcccttatgtctacctcaccaacctcgctcatcatttggcccttatccttccttgtacacctaccttcagatttctgcttacactttgatttcagagctttattccccagtctgttcttactcctttgtcgcttatccagaatgatgctatgtgtagcatcttgctgtaaatcctgtacaatgattctgtgtaaatagctgtggcctatgccaataatgaagagcaagcctttcaggtaagcaaattaaagttcagtttgctcatcgacatttggtctggtccctcattttttggtaatttgaggcccctattcctgtcactgtggtttgggtttttctcgggattagccactaacatcacccacattatttttcttgagcacctacagtatgtaaagcaacatacttagtgggcatccaaaaatctaagaagctccacactcccaactttaagaagtttataacctagctgaggagttggggtggcagaggagtggtctaatactaaagttattgtcctggctccacaaagcacatctcataccagttcagatataatccctctaagaagcagaatgccatatgacagcataggctaagagccaaggacagaaccaagtggagtggggctggtaaggatttggagctgtgtcttcacaagttgagactcccctgggtgggtagggaaatgataccactgctatcagctctttcattttccatattccaggttgagataaataaggttaggaagtgaatctatcggccaggcgtggtggctcacgccggtaatcccagcactttgggaggccgaggcaggtggatctcttaaggtcaggagttcaagaccagcctggccaacatggtgaaaccctgcctctactaaaaataaaaaattagccaggcatggtggcatgtgcctgtagtcccagctacctgggaggctgaggcatgagaaatgcttgaacgtgggagacagaggttgcagtgagccaagattgtgccactgcactccagcctgggtgacagagtgagactctgccttaaaaaagaaaaaaaaaaatctgaatctatctcctatctcccagctgggtgcagtggctcactttgggaggctgaggtgggaggattccttgagttcaggagttcaagaccagcctgggtaacatagtgaaaccctgtctgtattctcaatataaataatttgtctaaaacttttaaacaaaagtttaagattcttttcttataaaaaagaatccatctcccactcctgttccaaatttgaggaaagcattattgacctggcaacaataaacagtagaaaaaaagaaatagcagaaatgggcaaaaaaatatgttctctggatatagagatgaggcctccagggggcagcaccaaggcagagaaatagactaagatcgctcagtgttttccttggtctggggctccccacagttccccaccatcactcctcccattccttccaactttatttttagctgccattgggagggggcaggatgggagggaaagtgaagaaaacagaaaaggagagggacagaggccagaggacttctcatactggacagaaaccgatcaggcatggaactccccttcgtcactcacctgttcttgcccctggtgttcctgacaggtgagggaagttaacttcttggtttctggtggggatggaagatacatagattgtttggaattgggaccattatagttaaaattctttgggatttaggttaggaagcgaacactggttgtacatttcttgtatgtgtgtctgtgtccttgtgcatttttatgccctcacatatgactgtttgaatattgagactggcaggggctaaagctgcctaggaccttgtgtaagatttgtatctaataattatataatatataattgtataattatatattatatataatatacatataatatataacaattatatattatatataatatacatataatatataacataattatatattatatataatatacatataatatgtaacataattatatattatatataatatacatataatatataacataattatatattatatataatatacatataatatataacataattattatatataatatacatataatatataacataattatatattatatagttatatattgtatataataattattattattttttaaagatagggtctcactttgttgtctaggctggagtgcagtggtgcaaccacagctcagtagttgggactactaggtacgcgccaccacgcacagctaatttttttttttgaaacagggtctcactctgtcattcaagctggagtgcagtggcatgatcatggctcactctagcctcaacctcccaggctgaggtgatccttccaccttagcctcccgagtagctgggactataggcgtgtgctaccacgcctggctaatttttttttttttagagacagagttttgctatgttggccaggctggtctttaactcctggactcaagcaatccgcccccgacagccacccaaagtgccgggattataggcatgagccaccatg

SEQ ID NO: 4167 - DNA, 6000 bp, Homo sapiens
cctaataatggtgatagcaattactatctgtcaagcgcttactatgcaaagtattggactcagtttcacacacactgttttattaaatcactgcaactctttgaggcagacactgttcaccatttttcacaagagaaaactgaggctgaaaccaggaaagtcacttaggcaaggtcaggcagctggctagttagtggtgaagctgagacaatctaaccccagagtctggcgttaacctcttcactgttcagtttcccacaagatggaggctcccaggccaaggttaggcccaggattcagcatgatggggtagaccagattctcccccgacccctctctttgagcaacgtacatgaggcctctttgcacactccatgtgctaagcatcacataggggaccatgcttcgtttacctttgtgctcccagcacagtgccaagcacacagtagctgcttagcaaagcctgtggtagaaaggaaggataaagctgtacgatgggcactgggtagtaactggcttcttgctggtgttggggttttgaagacatgcaggtgaacaaacaatacatagatgaacaaccaacagattaaaattacatttcccaattatgtttgtccttgcccactctaccacagcccctctggcttccttgctgcctcaagcttcgcccccatgccctcacgattctctcaccttcttgaaaaattgctcaaatctcacctcagtgaggtctctttgggcaccacctcccctccaccagcaatcccaatccccctcaccctgccatatgttctcatttctggtacttactaccttcaaatgttctgtataattcactcattcattgtgtttaatgcctattctccacctccccactaggaatctttgtcttaccaaagtgtcccacacaccttaaagggtgggagctcaacaactacttattgaatgaatctctaaacattgcccactaagtcagagctgggcttgaaatactcagagaagtgaccggattctcccacagccccccgtcctatgtttctcagagactcgttccccctggcacttcccagtaactggaagagagattctacatctcccaattccagtcaccagagggattgactgaggatggtcctcttgggccccataaatctttctgcccttctcctcaggccagggctcacttggttctccctaaagagactctctgcatattgagtctgtgtcccataactggaggcacccggagccatggaaaacacatgggcttgagagctatgccacaaccttagggtgtcatttcaactctagccttggtttcctcatctataaaataagggctgggaccaatgatctcctccagtctttcccagttctgacattttccctgtggaagtgggggagtgcgtaaccttggtcaaaacgtacttagaaacaaaccaacccatggccctggggcacaggacatagccacactcagatcatagcaaatataaccaacaagtgaacaggcattcacagcatcacataggttagattagcagccaccatctgttttcacaaagcaaaaaaggcagtgattattatctctatttcacagatgagaaaactgaggctcagaaaggctaaacaagccacccacacacaggaagcagaagagccacactcaaagccaggtcttccaatggcaaattccacagactttccacaaagaactgcctcattgcttttgaaatgcaccctgggccaggtgcagtggctcatgcccgtagtcccagcactttgggaggctgaggcaggcagattgcttgagctcaggagctcgagaccagcctgggcaatacggcaaaaccccatctctacaaaaaatacaaaaattagctgggtgtggtggcctgcgcctgtagtaccagctacttggggggctgaggtgggaggattgcttgagcccagaggtggaggttgcagtgtgccaatatcaggccactgcactccagcctgggtgacaaagcaagaccttgtctcaaaatagaaaagaaagaaaaagagagagagagaaagaaaggaaagaaagaaaggaagagagagagaaagaaagagaaagaaagaaagaaagaaagagaaagaaagaaagaaagaaagaaagaaagaaagaaagaaagaaagaaagaaagaaaggaaaaacgaaccctggtaggagaatgccaccattagattatccaaaatgtcaataatctaataatctataagattacagaatataaaattggaacttacatttgaatgtggttatgtctcctattctagacatttacttatttatctcaaataatgcaatacagacaccctgggaagacatccctctgaaagacctgagaaagtgattcttggtaggaatagacaagtcatctctcaatggtagctaaggtgagcctctttcccgatctctttcaaaactttccccaagatatacacgactgagtgtttatattttcaaggacttcccagctacaaacagaagaaccaataacaaagataacttaatcaattgggtactacgagtagaggagtatcttctttgttaacagcgtaagaaaacaaagaaagtgctaaattgaaaagctagatttgtctaaatccgagagactataactggttcagagccttgttgacagccccgtttttctggattcaaatgcatcctctactaccatctctcacaaaatgatgatgagcgatgacaccacccactacattagccaagttggactgggaagccttggatagggagaacttcattttaaagagaagctttgtagattcttttctcttcataggactatatcagggagagcgcaagcttcaggaatcagcatgtactgaatattcccaaagaaagaatgattggattttttcccctcatcctctgacttcttaccttattgatattgcagggatcagccttgaccatctatttttaactgaaggatttgctatagggcattgtcccagtcagtgtgggccctcaaacttgggagttcaaaagaaatcagacatctaaagtaaacaaggttttgggctagtgaccattttatttaaaatggaattggggactcacacaacattggtaccatcctccttcaaactgcccccatcaaaatgcaatatgtccatgacaccagaaaggacaggaagggggggtggggtggtgaagccagtgcttagattttttttgtctagtttgccctccaagttgtcttcaatttagtaatcatacattgcagatttcataaaacaatctaagtttcaactatttttgctccattgttttcacgaataaacttgtaggataaaatgcccctatttttggtttggaaatgtagtcaaaataaccattttttatactaccaatagtcagtcccagatgatgggacgggagtgggcctcagagagcatatgtccatgccctccaagcatcattcctcattaagccacattagaatttaatccaagagcctcctggtgagcaaaaccatcatatccccatttaacagatgaaggcactaaagtctaaaaatgttagctgacattgattgaacttccgctactcaaaagtatatgtaattataagtgaaacgtggtgagaaaggctattactttgacaaatggcaccagaattctttggagtgttaaggctcctttcaaagagggagaccaccctgctgaaggtttgtttgtgtttcttttttattgttttgatctttttagaaagctctttccttttatgtttagttgacacataataattgtacgtatttgtgatacacagtgatatttcaatacatgtatacaatgtgtaatgatcaaatcaggataattagcatattcagcatctcaaacatttatcatttctttctgttgggaacaatcaaaatcctctcctctagctttttgagactatacaataaaatagttaacggccaggcatggtcgctcatgcttgtaatcccagcatttggggaggccaaggcgggcagatcgcctgaggtcaggagtctgaggccagcctggccaacatggtgaaaccccgtctctactaaaaatagaaaaaaaaaaattagctgggcgtggttgtgggtgtctgttatcccagctactcaggaggctgaggcaggagaataacttgaacctgagaggcagaggttgcagtgagctaagatcgtgacattgcactccagcctgggtggcagagcgagactctgtctcacacacacacaaaaatataaaaattaaaataattaattaattaatgttaaccatattcaccctacagcactgcagaccaccagaacccattccccctatctagctgtgcttttgtatctattagcaacatgctccccatccttccttccgccactacacttcccagcctctaatatccacaattctgctgaaggctttgagagacaagagcaaaccaccaataaaaaatgaaatatggtcctttggaaaggaccaaccactcttggtgtgactcagggcagagggattcacacaactgaccacttactgtccctacatcattaagattctcccagctgatgataaggccttgggaaaatgcccctaggctcatgcgctctggagagacgccaaaggtttactgatgtacaggcccagtctgctgctaaaagaaactttgggaggcacagaagccccagctaagctttcacacatcagctttccccatcctcctcccctcagtgcccaacacagctctcccattctctcactcccattgtttcccaaacatccctcccttcataaaagctgtctggctgggagcttaaaatattgctggacagtaaaacctacccatcagggccaatccagtcatatctgctcagtcgtgcagcacagtaggggcggggtagagaagtgggaggtgggcttttaggcagcaaaggaaagagacgaaagttgccattttgctgctgagcgccaagagagaaagagcacatatttctccgtgggacactccttgtattggcaagttttccttgggtgatattagtttgtaaccttccccccaattgttctttctcagcctaatctaagggccatatataggcttctccaaaaggaaaaaggttgccaataagattcagtcttgggctgggatggctagacttacactccaactctgaaaaccctcttcaagttgacctaagaactggcagaggtttggaagggagaggaatgctggaataatcagcaggatggggaaacagagatgtccaaactcaaactacaatttgacttcttaagctcttttcatgtctacaggaatccacagggacctaaaccaagtatttgatatttatgaaaaagttttgtgcccttttcactcaaattctacaatagaaataatagtcataattactgaatgctgtgggggtagcggaggcttcgtgctcagcattttccatgttggagcatttaatggagcacaggaagggatctggctaaggaccataaaattcctcctaggagcaggttctgttgtctatctatgagaactgctggctagtggctgttctagaaactagaaaagaggcactttccacctggttaccaaccagagtggtaagtggccattgaacactttggataacttattaatggatgtatatgtgttattctgcctcttcaaaaccagaggagggctatgctgtaatgggcttagatctagaagaccagggctcacatcctagctctgccctcactagctaagcccccatcttggagactcatttcacctcccagcctgtctttttgtctggtaatggggattgataatgccaagttcactggttctcagacatccatctggggatctgtcagttctagctcaagatgaaggtttccacaacctgtgaccaaaatgtgacaatgataaagttaacaatgtagtaaatgtttcaccaagttaagtgt

SEQ ID NO: 4168 - DNA, 6000 bp, Homo sapiens
gatccatgagctctagccaccttggtctctccagactcagctctgtctcctcaattctgggactccactgggacctgcctgagttcccctgtaccacagcctggagaccctctcaatgcagtaggtgaggcaattgcagggctcatcttttttcttccctatctctcaggggtgactgtcttttgttgcctgatgtccacagtttcaaaaaacattgtttcatgtattttgttcttttgtttaattttgtttaattttgtttcaggtgagaggataaatccagtctctgctactccatcttggctggaaatctggtatatcattaataatattcttgttgttaatttgggttgtgggtttataaatgttcattttcttattttgcatcattaaccatatacacatatatattacacattttttcatttgcgtaaaatattagtcaacttttttaagttctaaaagaaagtgaagagccctggggcggaacaagggcaaagaagtaggaagagtctgtggccaacctcttaactcacgtacctttctgacccctctacctcttctacctagagccctccatctcagccagctccccctgtccttgtcaccatgactctgaaggtgcctttctgacacaccaagatggtcaaggaaaaatggtgctgggttaggtgacagggaagatcatgagctttcatactttatgatctgacaagccactgtagcctctcacatttatacactaagtgagggtctttcagaatagcgcttcagtgtctgcacctgactcacactattaggcagttaaaagctggggaatgagctcatgtgaagagtttttccatttcagatgatagctatttttaggaacacaagctacataaatgttttaacccttttcccatccttttcctcttgctgctgtgatacaggaagaaaatcaaaatggagtgaccttgctatctggggaaagatgaaaactgcatatgcaaaagcaaacagactgagatttataacgagttgatcccttaaaagcttaggaaagaatctcaagggcacataggaaaataagcaaagggcttgatagacatattcatgacaacacaagaaggtgaagtcgggaagaggaaatggacaaggtcatcccaaattgaaataacttataaaagataaattataatatctccagaaattaactgtaaacattcctataaaatcatagatgataattttttaaaataaaagattgagtagtaagaataactaagaataaaaaattaatgagttcctagtggaaacttaaaattgaaccactgggggactttctataatgaatggcagttgaagaaaaaaatcgggtaaactttatatgaatatttgagaaacacctcaagcattagcaactacataaaagttatacatttcacctgtccaagagctgttacaacagtatacaaaacatattaagcaaaattgtactatagacaattacttatatgcaattctttacttaaaatttagcagatacatttgaatagtttctaaaacacatgatcatcaaagaaggaattgagtaggaaataaagcattactgttttttactcataaagagatgaaaataaaataaattattggtcaattctttatgagatttaaattatcttagcatttatttgtttgtttttgagacagggtcttgctctgtcactcaggctacagtgcagtgacacaatcacagcgcactgcagccttaacctcccagactcaagcaatcctcctgcctcagcctcccaagtagctgggaccacaggcatgaactaccatgcccagctaattctttttatttttagtagagacaggatctcactatattacccaggtcagtttcaaactcctgggctcaagcaatccacacaccttggcctcccaaagtgttgggattacaggcatgagccactgcacccagcctatctcatcttttaaaaaaaacatatcaaataattgttcataaatcattttctgtagtagagagcaatttttcttaaaattggcaaataagattttgcatctacctttgagaaaattgtatttgtaaagtgattttaaaagaatgaagcctatgagtatgatggcattataaaagtatcagtggccaggcgcagtggctcatgcctgtaatcccagcactttgggaggctgaggcaggcggatcacaaggtcaagagattgagaccatcttggccaacatggtaaaaccccgtctctactagagatacaaaaattaactgggcatggtggtgtgcacctgtgatcccagctactgggcaggctgaggcaggagaattgcttgaacctgggaggtggaggttgcagtgagccaagatcgtgccactgcactccagcctgggtgacagagcgagactccatctcaaaaaaaaaaaaagtattaatatatggaaatacaaatgtcatatatagatgtaaattctcctaattgttcttctgagcatcatgatttttttccatgaatttttattttaagttccagggtacatgcgcgggatgtgcagtttgattacataggtaaacgtgtgccatagtgatttgctgcacagatcaacccatcacctaggtattaagcaaagcatttattagctcttctacctgacattctccctcccccaaccccacccgactggccacagtatgtgttgttcccccaccatgtgtccgtgtcttctcatcgttcagctcccacttataagtgagaacagagcatcatgattttcattgtccatcaaatgctagaagactactctgcttttgttactatgtttgccccatttttctagctcttcttacatgaatttaaacctacatcaatggctatttcctcaacatttggaaacaacaatacttattagaaagaaagtattttatccttccaggctatagatcttacattcctcttacacaacaatcctaattccctcatgttatcctgatcaatgaaatgatttcacttatttttcaaagaagtagctattttactacaaagcaggaatcgcaaggcatggggtgggcactgttatactccatcagtgagtacgtaaaggaaatcaaactgtctgattttgaatcctgcttctattttttacaaccttggacaaattactgatttcctctttcactaggtttatcatttgtaaaatggagatactagtgtctactcatggattattgtgaggcttaaataagaaaacatgtatcaagcatatttgtctggcatgtaataagcactctaaaatttatgcagtgatgaggataatgatcatagacaatctgatagcatcttatccaaaggaaaaaatgcgcatttcctttgagtaagcactactgattctaggaatgtgtcctaaggaaaaaataagtcaaatgtttaaaggtagtcacaagactattttggtagtaagcagtcttttttactggtcacacagtaaaaaattagaaataacctacatgttcatgaagagaagttggtgaaataaattatggtacatgcatacagtagaaaactttggagacaaaatagtaaaatagttacagatataggctttgaatataaattttaacaagctgaggcttctctcgtctcttcagaacaccctgagttcttcccggcctttcttccttgcttttcatttgtgtcagtcagctcttgctcgtatagcaatcctcaaatctcagtagcatataaaggtaagcatttagttctcacttacaagtttgcagggcaggtgaggcagctctgcctcaagccacaatgtctaggacagctctgtttcgcactgtggctgactagctaaaaaatgttcttgtctcagcaatcacaggagaacaagagggtgagagataatgtgtgaagcttcctaagtgctaagtttgaaattagcaccatgtcatttccattcacatttcgctggccaatgaaagtctcatgatgagccacagtcaagagtcagagacataccctcatgaggctgtggagagagtgtagattcagggagcggtgagaaactggggccagtacaccaacttacagcatgatttgtcatcatttttcattctctgctagtaagattgccaaagtctctctgcactcattgaattcatttagctctctttagctctctttttttagctctcatttagtttccatttagctctctttctctcttaccacaatacctaaaaatctttttatggggttacaactctgtctcaggagccacctcagtttggtggcacagagctccccacttgtactctgaaactcttttcttgaagatattgctatccatgtgcatgagttatttttcttctccatagcatccacattaaacaattaattaccttggatttagccaaaataaacactccaaattcatgatgtctttcaggaagagagtttgttttcttttttaaccaaaatgggagattgatcctgtctgtgtcccctagaggagcagaggctggtttgtattagggcagctcttgtagatgagtaacttttcccatggcctcatagaggctgatatagaaacttctggattcaaatgattgtttggaggcattagccaggcattgaaccaattataaagagtgaggttttgccatattctaaccgtaagaaacagaaacggtagagggtaaaaatagaatagaatgtcaatacaactttagccttttccctggattctgagagttcataacctgaaaatcagagattcaaactgggagagatgggctaacaggtatgagcatgggaaaagcatgtttcaagaatttgagatgtatttcccagaaaagcaacatgatgaaaatggtcagaaaaggcaatttccttcctcttttctaatttggctctggagccaccagcagaacctcttcaatatcttgcatgttacagatttcactgctcccaccagcttggagacaacatgtggttcttgacaactctgctcctttggggtaagttggactcagaggggacagttagaagggtacaggctgtggctgttgtgagtcaagagttttgtcttcctgtggtaactctgggtagaactcatgagtatgaagcaacttgtatctgtgcttccatggtttattagagcttattttatgaaaaggatgggaagggcaaccctgaggtagcattaagcctggacgcaccgcagtgaagtttccttgataaccacctgtagcttgttcagttctgttagtactggattttgagaaagagaaatagaaactcaagagatctgagttgatccctcagagtctacattaattctgtctccccaattctctcttcctcattattttccttggaccaactgatatctttattctctgatctcttgcagttccagttgatgggcaagtgggtgagtgatctctaactcagcttctccttctatgccactttcctacttccaaaggatgggtcctattaacctgcagaagagcatatagggaaagcagagaaagaagaaagatttataaattatgtaaaatctcccatattcagagcatgattttcataaaaactatgatttgtaagctttctttctaaagttttctgaatgagctctttcctctgagcgaaatgcctgaatgtatatataacagcaggaaagggccagaattgcacaaacactaaagtagtctgctgacactgaagtagtctgctgggtttcccaacatcccctaaaccagtcccctttacaagaaagcagagtgggttttttctcctcagaaagagccaggcaaatactgaaggcttcaaagagaggagtttgaacctccgtttccaatgtacaagctgctgaagccctgcaatgtactctcagagacagtatagctcagaggataaggaaaacagctccgcttggcttgcccaagtctaaaaccctgcttcattgctcccaacagaaaaac

SEQ ID NO: 4169 - DNA, 6000 bp, Homo sapiens
ttgatcaggctggtctcaaactcctgacctcaagtgatccacccatctccgcctcccaaagtgctgggattacaggcgtgacccaccaaggctggccctgacttatacttataacaagctcaaatcaccaaaaatttcactcagactagatcatttcatccttgggaatgcaaagatcttatttaactaaattttcagttactcaggtctctgagtatattacctgtagtttctgcagatagaaatggttctaggctaggcatggtggctcatgcctataatcccagcactttgggaggccaaggcaggcagatcacttgaggccaggagttcgagaccagcctggccaacatggtgaaaccctgcctgtactaaaaatacaaaaattagccagtttgatggcgggcacctgtagtgccagttattgaggaggctgaggcatgataatcactagaacccagaggcagaggttgcagtgaaccaagatggcaccactgcactccagcctgggtgacagagcaagaccgtctcaaagaaaaaaaaagaaatgtttcttgctgtggagtggttgcaatacagaaatccagtttctttggccatctcaaaatgctacaaatggtgaacttatttgtaataaaaagtatgaattcaggatcgttattttaaaggagtctgcacaggatttgatagctggttggtagtcatgctacaagccaactcagctataatattctcactgtggctattatcaatttacctactcagaaaggtggaatcactgaaattattgaatgtgcagacagaactcttcatgcagataatttttactcaatgatttaaagctattaaatgcttttgctaccataaagctcagcacatcacagttggtgaactgtgatgaaaatttaacaaattctgtttgatttgaggctgcgtagacactaagcctctgaaatcacttgaagcatatttttcctaagttttttcttcataaaaattgcatgttttacaaattatgatggagcaggtcaaatcttcccattagtatttctattattgtatagtaatacaagatcaagtcttaatggaaattatatttagaagctatggatgacattttctgaaattgattctatgtttaaattttcttgtcaatgggaaatacatataaccataagtgaaaaataagctaaaacatgtttaccttttgatttctaataatcgaagctgatatttattgagcatttactatgcaccaggcactgtgtaaaatacttttttgcacattatttcatttaattctcacaaattcatgaggtaggttacgttattaccatttatctgatgaagaaatggttagagaaattaagaacactgcacaaatactagttgtatgacacaagtaatcctttctttctttctctttctttcttcttttctctcttctcttctcttctcttttttcttttcttttctttctggcagagtctcactctgttgcctggagtgcagtggcatgaacatggctcactgcagcctcgatttccagggctcaagcaatcctaccgcacgcttctcaagtagctgggaccacagatgtacccgctacacctagctaatttttaaattttgtgtagagacaaggtttagctatgttgcccaggttggtctcaaattcctgggctcaagcaatcctcctgacttagcctcccaaagtgctaggattacaggcatgaaccactgtgcctggccaatactgccattctttatgcaaatatttttttcaattgttatcaagtaggaaatctaattaacttcagtttcattgaatttcatctttacttccttcctatccatggcttatgagagaagtgttaacatgaagcaacaaggattatagtaaatagagaattaataatctaaaataactgagttggccatattgttattataattatgctgaagcttatttacatattctttgttttgtgttgaagccttgagctctggtgggggaaaatcatgattttgattaaacacaaaatgggcagttaaacctctaaatagtatacatggagaaagctgaagtacatttaattatttagataatcattcctgattatttaacttacatatttacaagcctaaataaaatgtacaaatgtaaatagtgctttttttttttggagacaggtctcactctgtcacccaggctgcagtgcagtggcacactgtaacctcaacctcctgggctcaggtgatcctcccatctcagcctcccaagtagctgggactggaggcgctggccaccatgcccaactaattttttgtatttttttgtacagacagagtttcatcatattgtctaagctggtcttgaacttctggactcaaacgattggcctcgccttggccttccaaagtgttgggattacaggagtaagccacgtgcctgaccaatactgcattttttgacttcctgttttctatccttaaagcactgatttcttggacccagtgaaaacaaatttttcaagttgaagattttaagttaatgtagtcattcatatttgaaggatgtcatgatttattttttaaatttaatgtctttactattgaaaatatttcttgttattatagtttatttataccctaaattaaaaataagtaggcacttcatattctggatttgctgtcacttgcctgcaacaaaacaagtaactgggtttatcctggatgagtcacaaagcaagagcttggattttatcattggtttcagttctatttttagaggtatggggatacaaaagaagttcttaatttggagacatttaaaatggcttgtgtggttttcttcaggaaggaaggatgctgtctaacttcaggaccatcacagcaccctttaaatatgtaataattattttgttcaaaatgtttttttttttttttttttttttttttgagacggagtctcgctctgtcgcaaaatgtttatgttccatatcttatcgctcaatgtataaaatatcactgccactgacatcaatgaaattttatgtgaaatggaatgagttagtaagtgtcaagtaggtattttcctcgtccctcaaaaagttatgtgcccaagtataaatcatcaaaaggataaagattctttccatctattgcttacagactgactattgtttaaaaaggcacgaatttcatagacaagtctttatctccttctttcttaaaaaagcacagaaaatggggaaaaatcttctatactgcaatctaaattataggtaagaaaaataaaaaccaagtgacataggagattggcagtgaattttcaaatatcagtaatttacaggatttacaggattttcattagcgttgtttccatgttttctgtaagatacgaacatttaaattgataagaatggaatgttcatataacatttcttgtatccatttaaagattcacattttcactttaatatataacttaagacttttctttcaaaacacatctaaaaattagtaaaatgcctaaagggaagctttatttacttggtagaaaagctgaaagaaaaaaaaacatattcttcacaatttcagaggtgacaaaaatctcttatatttcagtagtttctgatctcccttaagggatttgagaattatatataatattgcataatcttaagctgattaatgttaaagtgctattggtctattttaactgtgtacttcttaaaatataatgaaagaatttatttggtaatcctgaatctattgacctcacaaacactggtcattattttggtggaaatattcataagcatttttagttactgatttctaacaattgtttcttattatcttcctgattttacaattccccaaagtaaaggtgcgaaaaacaaacatctaccctccttttcgacaaatgccatgatagaggggagacctgtgtggtgtaaagacaaatgcagacatttggaagttgatggttttaagattcagtaaaaacttgagagttttggcttcaaatccccacgctagttttagttctaccggatacgtgtcccctacccatttcaaaggacccagtcacctcggctcttgcctgagtttcagagtcccgccggagttagagctggcagagtccaattgctcagagcgccgaggcgggggcggggcagggggacgcttgcaggtccggtggtcccgcgggctgcgagcccccacggccgaccctagctgcagaccctcctggagaacctcaggcctttcccccagaaacatccctaaaaggcgttccctttgttcattcattcaacaaatatttgttcaatctcatatgcccttctgtcttgggaaaaccaattagggcctctgcagcctcaacacaggggcactgttcccgcctattaatgacgcaatgaacccgggaagacgaatctcgaccactgtttcgcaaataccgcgtgtgatttattaaatgccgtctctccgagtcccaagcggccgggagcattatgccacctcccttgccctcatctctcactgccatgcaagaaagcgttaatggcaaatagggcacgtagccacactccgtcgttcctgcttccaagcaaaccttgtgccaggttcctcatttcgcgaggctccactctcttgggcttcaggctgccgctgggcctccagcaccaaagggcaataggggtctgagagtccgggcctcaggcatcttcaggccgcaggtgggtggagaatagcgcccgcgcgtggcagcggcccaggccgtctcagccggatttttccatccccggggtaggcttggtcccctgtacactccagcggaactacaactcccagcaccgtggctgcccggactcccggaagccgaatcccggctgggaggaagcagctgagacccggccaacagactgggggttaatttagccagaaaagggggcgggaagggctgtagggtacttgtcaattcgccgccatgaacgtggtttttgctgtgaagcagtacatttccaaaatgatagaggacagcgggcctggtatgaaagtacttctcatggataaagagacggtgagtttgcttttgctcagcatttgtgaaggaaccctctcaaccttacaattgctcgtcccattccactgtaggacttagcatttaattaaacatacgaaaatgagggtcggtttgtgtggaattgaaaagttgtttatataaagcttgcccggtgggttttcagtctacatggctccagccactgcctagagactacttctacccggaacaatttattggaatcagaaatccttttctaaatgtccccgccaagaaatcattaatatgtcagagcacttggaaggctttgggatgggcctactgtttccactcaacattgtgtttttaaagtaaagctgttggagctcaagctgaaatgacagattatttgttggccacagaccagaaaacaaaactctttaaggtgatagaaaaaaatatttttggaaacttatggattgttcctgttcaaagagaccatgttttttgtttttaatcttgaagcttcagctgaaaggatagagcgtatttttcattctcgtatgttacctacctgtttggatgttcagtaaatgttttccgtatattactatttaagttatccagctaagtattaatgaaaaaagagggttagatgtgctacttgtttttattattctagactagcatacttttagttaatcttttgtttttacagactggcatagtgagtatggtatacacacaatcggagattctacagaaggaagtgtacctctttgaacgcattgattctcaaaatcgagagatcatgaaacacctgaaggcaatttgttttcttcgacctacaaaggtactgcataaactgagcttccatctgcccaggcagatgcagaacactctgatctgaaagcattaagaaggcaaaataaatttgtattatcata

SEQ ID NO: 4170 - DNA, 6000 bp, Homo sapiens
ttgaacctgggaggcagaggttgccagtgagccatgatcatgccactgcactccagcctgggaaacagagcaagactccgtctcaaaaaataaataaataaataaataataaaataaaagaggccaggcatggtggctcatacctgtaattctaacactttgggaggctgaggcaggagaattacttgagccaggagttcaagaccaacctaggcaatatggtgaaaccttgtctctacaaaaaaattaaaaaattagctgggagtggtggcatgaacctgtagtctcaggtgcttgggagctgaggtgggaggatcgcttgagcccaggaagggaaggctgcagtgagccaagatcacgccactgcactccaacctggacaacagagccatgccgtctcaaaagaaaagaaagtaaaagaaaaacagcccggcagtttttttacaaagttaaacatacgcttcccgtacaatccagcactcagtatctatttattcccactcctaggtatttactcaagaacaataaaaacatatgtctgctcaaagacctgtactcaaatacttatagtgcttttattcatggtgactagaaagaagtggctgcggtggctcatgcttataatctcagcactttgggaggccaagctgggcaaatcactcgagcccaggagttcgagaccagcctgggaaacatgacaaaattttgtctctacaaaaactaagaaaatttttaaaacctgccagtcatggtggcatgcgcatgtagacctagctactcaggaggctgagaagaggatcatttgagtttgaggctgaagtgagctatgattctgccactgcactccagcctaggggacagagtgagaccctgcttccaaaaaaaaagagagaggctgggcgtggtggctcacacctgtaatcccagcactttgggaggctgaggcaggcagatcacctgaggtagggagttcaagactagcctgatcaacatggagaaaccccgtctctactaaaaataccaaattagccgggcgtggtggcaaatgcctgtaatcccagctacttgggaggctgaggcacgagaatcacttgaacctgggaggcagagtttacggtgagccaagatcatgccattgcactgcagcttgggcaacagagtgagactctgtttttttttttttttttttgagatggagtctcgctctgttgcccgggctagagtgcaatggcgctatctcggctcactgcaaactcctcctcctgggttcaagcggttctcctgcctcagcctcccgagtagctgggactacaggcgtgagccaccgcgcccagctgagactgtcaaaaaaaaaagagagagagagagagagagaaagagaaatgctaatttctctaatgccaaatctctaatgtagatttggacacacccagaactatagaatcgggtactatgggggtgaggtccagaaatctctatttatttattctattttatctttgagatagagttttgctcttgtcacccaggctggagtgcggtggtgcagtctcggctcaccgcaacctctgcctcccaagttcaagcgattctcctgccttagcctcccaagtagctgggattacaggcacccgctaccacacctggctaatttttttgtatttttggtggagatggggtttcgccatattagccaggctggtctcaaattcctgacctcaggtgatctgcccgcctcggcctctcaaagtgctgggattacagacatgagccactgcacctggccagaaatctgtattttaataagctttccaagtttaaaaagctttccaggtgattctgatgcacattgacatttgagaaccaatggtgtaggagaaagctcactggtgcctgtgtccttgttctggtttagcctagcagctatatgactaaccatggctaaatccctaaatctctcaaaactcagttttacagggtataacaaggggtttagaatgatgcctgagggcccttctgctctaaaattctgtgaaagacagtaaataaatgttgcaattactagattcattcaatcaacagttatgtaccaggcagcgttctgttcatggaatcaatgtataacacaaaattgcaactgaaatagtgtaacttatcgcttataattaaatgacttgcaaattttcagaccacaaacttttaccggtcctcaatttacaagattctcatactacatttgttgtgtaatgtgaactggaaaactaagaaaatgatccaaagggtcattttttccaaaattacttaattcttttttgtttgtttgttttttcttttttgtttttgtgacagagtctcactctgtcacccaggctggagtgcagtggagcaatctcaactcactgcaacctcccactcccgagttcaagcaattctcctgcctcagcctcctgcgtagctgggattacaggcatgcaccaccacgcctggctaatttttgtatttttagtagagacgaggttttgctatgctttggccaggctggtctggaactcctggcccacctgcctcggcctcccaaagtgctggcattacaggcgtgagccaccacgcctcatctcagtcaagtttcagtatatctacaaggacaggagatggcgccagaaggcagtgagatgcttggttttggttttaacggttttagccaatgcaagcaaggaaagggcttgagagagaggtcagaactaaaacaaaggtgccagagtttgagtggaaactaagactgagtggggagagggagctgtgtcagttttttttttttttaacttacatataagggtccccttgacacctactccaaatcagcacagctagaaagcaacaaaagaaatatccacagtaaagccaaagatcaagataaagtcaagtgcctggaggacggcgctcgccttctggctccctctgtcctagaaaggagggcctttgtcgtctgggaagcataagcacctggatgcgttgctcacccaagatcagggaagtgttgattccaggctaagatatctttgtgaaacaatgttcagttgcgtaggcaaaatcccaaagcccagcagcagtgaaatacctcccagaaggaaccacatacacaaagcattttaaattaaaatttaaaaattcatagacgagccaggaggtggcgcctggcaagacacgctatctgccttggaaatcggaatctcagctcagcgctccaggggaactctgttccggcagaggtcattctgttcagacctcttctttcctactaaatctcttctttcataccaagatgtctctgctttctttttttgtttctttgtgttaagtaccctgattcccgggaaatctaatttatacttcaagtcttttactcttcttagatgggatggatggggctttggggaacctcaaaacataaaactttcctgaaggggacaaataactcagagggtgataggagaagaaaaagggaaatgacatcagcaaaatggcttggctttgcagatcaatcacaggggatagaaaggcacagtgagctcctgtctctgcaggagctgatgatccagcacatgcattattctgttcatttggcttttatcctgctcccttatttagcttctgctccctttgtttggctatttattgctactcggcaggagcaaggagggcagagggagcttcagatgggtgcatcctcctggctggtgcctctggtgaagagcatggaggagaaagaggtttcaatgtctggcttgaaagtatctgtgggtttcacattctctaacgagggatttaggatgtacattccaatcgggatttccagtcccgtggggagcaaacatcagttcacattcctgagacgtgcagcctccatgctccacggacgcagctccttggtggcaggtttcattcagtgccacatgtcctgcctcagccctttgttgggctggaaggaagaccctgagcccctcttccatctggatcacatggtctctccagaccctcccctctctttctctggaaaccacctttttctgatggtggtagtgattgttcctaaagtctctcctttcctcctgccctggcctctctgccggaggtcagtgtcctcttcagtgacaaaagccgccctagatctgggctccctggagagggaggtggctgggtctggcagttacagccgctgtctctccatggtgctgctacacccctcccccactgggcatacaaatgggctttatccagcaaacaacgctccctccccgcactccccccaccccaggccacacaggcacgtggacccaggcctcaccgtgggaagggggtggtggcaggcacagaagagattgctccagatgagttctccttgcctcacttctcttccttagaacttaggacacaactcaggttttagttattgacttcctccacccctcccctgcaccctgagtccctaattccttcttgttatatatctcctaattctggactcttcccattccagggcagctcagattatgcagggaattgggaacaggtacccccaccatctgccgcataccacccagggagctgctcctcagaggagaaatcaggcggggggatgaaaatacagtgtccttttgagggggctgagttgaaccccaaagccccttccttgaccctgcctgctccagggaacacccatctaaacagcatctgtgtgactagcagaggaaggaagagctcaccccagctgggctcctgagccagggccagggctccagtgaaacttgccgcgctccagctccgagtggggccatcctgcatgcctaattggctatttaaggagctgttcaccagcagcccaggcagcacccccgtccccacatacaccagttcagagccaccttaaaagcaggaggcagttgtaaagtcgctggccagctagtggagtggagactgcagagggagataaagagagagggcaaagaggcagcaagagatttgtcctggggatccagaaacccatgataccctactgaacaccgaatcccctggaagcccacagagacagagacagcaagagaagcagagataaatacactcacgccaggagctcgctcgctctctctctctctctctcactcctccctccctctctctctgcctgtcctagtcctctagtcctcaaattcccagtcccctgcaccccttcctgggacactatgttgttctccgccctcctgctggaggtgatttggatcctggctgcagatgggggtaggtacaactaaatgtctgtgtgtggatttgtgctgatgttcacatgtcgccaggtgtgcttaatggggggaggagaggtgtgaaaggaagcctagaggctggaataataggctcagagatgaggaaaaaagagtggggtgtggaggagaccacttcccttctttaccttttgtctctccagccttgttgttattggaggtcggggagaactagcggcaggcaggcagagtgtgtacacatgcaagtgctggaatctctttgcaggctacagattttctccagagctctttcccccactgccctggtcccaggcaggactcctggacttctttatttacaaactcctccaaatagggagtcaaagaggcctggagtaaaaagatggatagatgggggtagggggaagaatacttcctgcccaactcagaccctgatctccaattcatccccttttggccaagattccctcttcattctgtggagcgactaactccccagttatcctctgaaagtggcagtaagagtcaacatttgtttgacattttacagtttacaaaggactttcaggagctcccaggagatgaggagggattcttgggagaacaggctgaagcgctccaggagtgtccccaggaactcctagacctcatttttgtgtttcctgtgcctagcacagtgtccagcacatactaggtgtgtaac

SEQ ID NO: 4171 - DNA, 6000 bp, Homo sapiens
tgggaggccgaggcgggtagatcacaaggtcagtagttcgagaccagcgtggccagtatggtgaaaccccatctctactgaaaatataaaaattacccaggcatggtggcgggtgcctgtagtcccagctagtcgagaggctgaggcaggagaatagcttgaacccaggagacggaggttgcagtgagccaagatagcaccactgcactccagcccgggcgacagagccacattctgtctcaaaaaaaaaaaaaaaaaaaaaaaaagacagagagagataattcttgtcaactgcttagcacagtgtttagtaagtgcatagtaaatgtgtagtaggtggtaactactacatggcattcagtattcagatccttcataatttagcctctccctgtccttctagtcacacctcctgcgacatcactactccagcatctctcccctaacacccaattctctgtcatgcctctatgcctttctttctccttagaatccctttcctttcttttctaattttatgggagagtggagtcttcctgaacacccattcctctctttccaggcacaattcatataactatggagatgatgtcttctgtagtctctggaatagttccaatctcaaatattgtctgttgtaaagactgttctcattttttattctgaaaatatggttatcaaaccatagcacttacacaaactttatgatggcacctattacattgtattctaatgattcacatgtctgttcccctcattagtctgtgatctttttgagggcaggggcttaatcttttcctttttttaattaaaaaaaattgttttggagacatggttttgctctgtcgcccaggctggagagtagtggtgcaattttagcttactgcagccttgacctcctgggctcaagtgatccacccatctcagtttccttagtagctgtgactacaggtgcgcaccaccacgctcagcgaatttttgtattttttgtagagataggatttttgccatgttgcccaggctagtcttgaacccctgggctcaagcaatctgcctgcctcagctcccaaagtgttgggattacaggagtgagccatcctgcctgatgatgggcttaatggtcatctgtgtattccaggaactctaatagtgcctgggacgtagcttgggctaaataatgttaattgagtgaattaattaatgaatgattaattgaataaatagcccatcctcttattgtagaatcctttccttgctcttgccagtccccatcacttcattctaatcttagaaacttttctggccgggcgcagtagctcatacctgtaatcccagcacttagggaggccgaggcaggcagatcacgaggtcaagagatcgagaccatcctggctaacacagtgaaaccctgtctctactaaagatacaaaaaattagccggacgtggtggtttgtgcctgtaatcccagctacttgggaggctgatgcaggagaatcgcttgaacccgggaggcggaagttgcagcgagccaagatcgcgccactgcactctagcctgggcgacagagggagactctgtctcaaaaaaaaaacaataataaaataaataaataaataaaataaagaaactgttctaagatatgaatgacactttaataaaggtgtgggtgtgtactcacatgtactgaagtctgtacctgtggccctactttgaggtcatcagattgtaccccctttcccaaagtatgtattggtgaactcccttttctgtttccttggggcactaagccaacatgtcctgctctgcccctgtttccacaccctgccacgtcaccacagttctactatgccaggaatgttaccggggaggagtggttccatgactcagaggacaccccaggtactgagtgggagtgggggcgccccagggactgagtgggagttggtgaaattaaaaataaaaatagtacttgatgaaaataaaaattaaaaatataaaaaattagctgggcgtggtggtgcatgcctgtagtcccagctactcgggaggctgaggcaggagaatcgcttgaacccgggaggtggaggttgcagtaagccaagcgccactgcactccagcctgggtgacagagccagactctgtctcaaaaataaaataaaatggaattcacagattagctcacagggagaagattcctctgtttgactgcgttggtcattctgggatttattagtctgtttccaattttaaaatcagaaacagctttacatcaacaccagccgattttttttttttttttttttttttttttgagacggagtctcgctctgtcgcccaggctgcagtgcagtggcacgatctcggctcagtgcaagctccgcctcccaggttcatgccattctcctgcctcagcctcccgagtagctggggctactacaggcgccggccaactcacccggctaattttttgtatttttagtaaagacggggtttcactgtgttagccaggatggtctcgatctcctgacctcgtgatccgcccgcctcggcctcccaaagtgctgggattacaggcgtgagccaccgcgtccggctacactatccgatttctaaagtaactcaggaaatggtagcaatcctatgccttttcggaaaacaaggataatttattcaacaaatatttatttattgaatacctatgagccaaatcctgtgctcagtgtgcccctcactagttcctgtcctgtttagttgagtggagggtataggtacagggaattataaaatacttcaacacaacaaaattccactgctgtggaattacaaacaagattttgtctactttcggtgcccaaaggaagacgaataatccagcaggtggcagcagggaaacaattatcttagatcttcataagggaggagtagaaggctgcagtaaatgcatggggatttttttttttttttttttttgagttggagtttcgctcttgttgcccaggctggagtgcaaaggcgccatctcggctcaccgaaacgtctgcctcccaggttcaatcaattctcctgcctcagcctccggcgtagcgagtagctgggattacaggaatgctccactacgcctgggtaattttgtatttttagtagagacggcgtttctccatgttggtcaggctggtcttgaactcccgacctcaggtgatccgcccgcctcggcctcccaaagtgctgggcttacaggcgtgagccactgcgcccggcctttttttttttttttttgagactgagtttcgctctcgttgcccaggctggagtgcaatggcgcgatcttggctcactgcaacctctgcctcctgggttcaagcgattctcctgcctcagcctcccgagtagcagggattacaggcacccgccaccacgcccagctaattttttgtatttttagtagagacgcggtttcactatgttggccaggcttgtctcgtactcctgagctcagatgatccacctacctcggcctcccaaagtgctggaatttcaggcgtgagccacggcgcccggcctgcatggggatattctatggatgttcgggtcctaggttactttatgaggacccacaagacatctggaaagaggataaccaggtcattctgggggttacaaaacctgttttttttgtttgtttgttttgttttgttttgagacagtttcgctctgtcgtccaggctagagtgcagtggcgcgatctccgctcactgcaagctccgcctcccaggttcatgccattctcctgccccaggctcccgagtagcctgggactacaggcgcccgccaccacgcccggctaattttttgtatttttagtagagacggggtttcaccgtgttagccaggatggtctcgatctcctggcctcgtgatccacccgcctcggcctcccagagtgctgggattacaggcgtgagccaccgcgcccggccacaaaacctgttttaatggagttatttcatgggccatgagtttgagaggatctatctgaccgactcttaccccgaatgttttaccattcctctttatttattcattccacagataattatggagcccctactatgtacgaagtcactggaggagctggagatacaagagtgaaccaaacacagtccttgctccccagaagttttacagtctgctcagagagactggtcttcccaccagggttcatagcctacggggtactttgttaaaaacgagcagttactacgaagactacaatgggagaaatttttctgtgtatctccatgccctttggagcacagataattgacagttggaggctaaaggggttgggtcgcgggaaggttgtgataagtccctgatagcctcccgtgcccttttttgacaggtcttcactgattcatgcatcaaatatttactgaactccgtcactgtgcagtgcctaactttgtgcttgaggcaaacaaaacacagatctatttcgaatgccattccgaggaaggtaagacatgcacgcacgtttaatcaaatagtaaacaagagtagtaaaacaggaaaaagactaagaagagttcttggtggtattaaatgttttgtgatattcgacaccttaacgtctctgacttgacaccagtactcccgcagagagttctttcctgggttaggaatttcagaggacttggcggaccgactcttgtcccgagttcagatcactcgacccagtcctagcaaagaactgaacctaagaggacctgccgagccaccgtagggactgtcggccaacccgcgcgcgcacatcttccacccgtggactcgtcagggcgtgaggacccacctcacgtgaccattagcagcctcccgattggttttgctccttttttctccccaatgagtgggctgatgccccgagaaggtcgggcgcatgcgcagtgctcggattttttgcttggctacccggagtgaagcggccgggttgggcgattaacaggccgtggttaggaaggacggagaaggggcgttcgctcctttgggacttttcatgcctcgtttttttttcagatgtggcttggtctgggcgcaaggtcccagcagccagcttaagcttactcttctgtgaaaggggaaagtatcccctgtggaaagcggttaaacttgtggagggggtgcgggacgtgagttcttccccatgccaggcgaatggtgtggccttgagctggtccaggagccggctcgacgtgtctgagggaggccccggagggggcggggaggtggcccacagaacgcgggttctgtaaagagacgttgggaagattcgattccgagaagaggaagaaccggattgaaagagagccaggccgctgagggggagggggctgctaagatggcgtcggcctcctccgggccgtcgtcttcggtcggtttttcatcctttgatcccgcggtcccttcctgtaccttgtcctcaggtaagcccggcagggcgtgggtagggagctggtgaggaatatgcgatgggaggaagagcgagacctaagagggtacctgtagctgggaatgtcctacgtgttaccggtaagtgggcgcgagctgggctttcaaatagggatttatgagcgggcaggagtttgaggaaaggataagtttgattaagaagttgtcgaaaactttggttgtctttgaggaggacggatggagattgaaggtgggggtagggtggcccggcgcggtggctcacgcctgtaatctcagcactttgggaggccttggcgggcggatcatttgaggtcagaagttcgagacgagcctggccaacatagagaaatctcgtccctactaaaaatacaaaaattatccggacagtagtggcgtgcatctgtaatcccagctacttgggaggctgaggcaggataatcccttgagcctgggaggcagagcttgcggtgagccgagattgggccactgctctccagtctgggcgagagag

SEQ ID NO: 4172 - DNA, 6000 bp, Homo sapiens
ctaagctggtctccaactcctgggctctagtgatcctcacctcagcctcccaaagttctgggattacagatgtgaggcaccaagcaggaccttagattttctatttattctactcccaggttgcccctaggagtgcagccttttgagatcctagcccaaaacacgaaggtggtttaccaaggttatcacctttggggacatttggactcctttttttttttttttttttgagagtgagtttccccctattgcccaggctggagtgcagtggcgcaatctcggctcactacaacctctgcctcctgggttcaagtgattctcctgcctcagcctcccgagtagctgggcttacaggcatgcaccaccacgcctggctaatgtttgtatttttagtagagatggggggtctcaccatcttgtgcaggctggacttgaactcctgatctcatgatccatccatctcagcctcccaaagtgctggggttacaggcatgagcgaccgtgcctggccctttttcttttttttaatttaaaaaaattgaaatggggtctcgctctgttgcccaggctggtctgaaactcctaagctcaagccatcctcccgccttggcctcctaaagtgctgggattacaggtgtgagccaccacacccggcctggacttcaccggccccacacaacctattttctgccactaattccaaatcagcaaatgaccccagggtaaaatcagccctactgctgggcttacttctctactttcctgtactttcatgctgtcacaccaataatttctcactatcttatttttttaattattattattttttgagatgaagttttgctcgaaatggagtgaaatggtacgatctcagctcattgcaacctccgcctcctgtgttcaagcaattctgcctccgcctcccaagtagctgggattacaggcacctgccaccacgcccggctaatttttgtatttttagtagagacggggttttgccacgttggccaggctggtctcgaactcctgaccttaggtgatccacctgccttggcctcccaacgtgctaggactataggcgtaagccactgtgcctggcctcactatcttattagttcttttattattatttatttatttatttatttattgttttttttgagacagggtcttgctctgttgcccaggctggagtgcagtggtgtgatctcggctcactgcaatctctgcttctgggttcaagtgattcttgtgcctcagcctcccgagtagctgggattacaggtgtgcaccaccaagcccggctatttttttttttttttttttgagacagagtttcactcttgctgcccaggctggagtgcagtggtgggatctcggctcactgcaacctcaaccccctgggttcaagcaattctgcctcagcctcccgagtagctgggattacaggcacctgccaccacgcttggctaatttttttttttttttgaagagacggagtcttgctctgtcacccaggctggagtgcagtggcgcgatctcggctcactgcaagctccgcctcccaggttcgagccattctcctgcctcagcctcctgaatagctggggctacaggcgcccgccactgtgcccagctaattttttgtatttttagtagagacagggtttcaccatgttagccaggatggtctcaatctcctgaccttgtgatccgcccatctcggcctcccaaaatgctgggattacaggcttgagccactgcgcccggcccagttcttttatttttatttttatttatttattgttttttgaaacagggtcttgctctgctgtccaggctggaatgcaggtgcgcaatcttggctcactgaaacctctgcctcctgggttcaagtgattcttgtgcctcagcctccctagtacctgggattacaggcatgcaccaccaagcccggccaattttttttttttctttgagacagagtttcactcttgttgcccaggctggagtgcaatggcatgatcttggctcaccgcaacctctgcctcccaggttcaagcgattctcctgcctcagcctcctgagtagctgggattacaggcatgcgccaccatgtccggctaatttttgtatttttagtagagacagggtttctccgtgttggtcaagctagtctcgaattctcaacctaaggtgatccacccgcctcggcctcccaaagtgctaggattacaggcatgagccaccgcacctggcctacacccagctaatttttgtatttttagtagagacggggtttcatcatgaaggccagactggtcttgaactcctggcctcaagtgatcagcccacttccgcctcccaaagtgctgggactacaggtatgagacaccatgcccagccagttctttgatttttaaaaaagtatttcatccaacacttttagttgtctgtagctttagggctagttcaccattattgaaaggagctcaattactaaactatatttctagtccagtcatttcttctgagctccagctccactagtccgaggcctatcagacacttccacttgattatctataggcacctcacatccaataaactaaaagtatcatccttccaaaaccttcttcagcttctcagctaatgggatcaacatcacctagatctgttatttgtataatgtcctcacttcccaaagttcaactgattctacttacaaaacatctccccatctgcatctgctgtctacctctacaatctctggaatccgccatctccattacaggacaagaacattatgcctgtcacacaaaagctttcataatcttccctccactgccctcttccctgcctctcttcctcagtcatcctacatgcacacaccttacatcctagatcagggctgaaaacacaaactcctactacagccaggcaggtaatgcacctgagtgaagcagggtgcctaggaaccataatgaactagactcatttcaaggagataatggatacttgctctggttaattgctcatggagggatgcaggacaatatattgccagctcttccaatattttaaggaaagtcagaaatccaggttgggcctggtggctcacacatgttatccaggaattttgggaggccaatgcaagaggatcgcttgagcctaggagttcaagaccagcctgggcaacatagggagacctccatctttgaaggaaaaaaaaaaaaaagtcagaaatccaaatattcatgtaccatcttttttttttttttttttttgagacggagtcttgctctgttgcccaggctggagtgcagtggcgcaatctcggctcgttgcaacctctgtctcccggattcaagcaattctctacctcagcctcccaagtagctgggattacaggcggccgccaccatgtctggctaatttttgtatttttagtagagacggggtttcaccatcttggccaggctgatcttgaactcctgacctcatgatccacccaccctgacctcccaaagtgctgggattagaggcttgagccaccttgcccggccccatcttatgatatttaagtgtggggaattaaatacaatatacataaagagaatgcaagccaaagcatgcctgccatctcaagttggcctatcgaccacaatttgctctagataataagaatattcaagtctcctaaaattccatatataggaaatgtacttcaacattctgctctgtctacacagaatacctttctcatccttccatcctcttgaattatttcttttttggagattttctggccccaatccaagcagaatgaatagccctcatctgagtcctttagcaatttatccatgtctcccctgtagtgcttaatgcatgttgcattacggttatttgtcccaaatggagctcctcaaaggcacggactatatatattcatctttatgccctcggcacctagtgggtgcttaatgcaccgaaggttctctggaaatgtttgctgacctgaagtttggtgatcttatgtcctgcttaggcgcagcgttggagaggttggcgctgcaatgccgtcaataacccccgatgaccattagagggcacactgattccacagcagtctgcaccgggggcccagctgtcaagtgctccaaaacccactccccaatttacgcctccagtggtcatctcccacagccttcattttaacaaccctcaacacaaaacagtcattttcttggggcgtccctgaggtgtgaacctcctccctcccagacacccacccactctccccatcttcctacaatttgggcgctaaagatttaattcctctctgacaccagatcattttttcacagctaatctgcacagtctggaaggtggcagggagggaaagagagggagatcatagaaggaatgggtaacaagcactctgggctcaccttcaactttaacggactttccagaaacccgtcaccttccaccccacacccaaacacacacatccacgcactcactcagtttcctgccaggatcccaaaccagcacacctttccctcttcccccgaggagaccaggtaggaggcgagggaaaaggtggggcgcaagtgggccccggttgcttccacacacaccctccgttcagccgtcctttccatcccggcgagggcgcaccttcagagggtcctgtcctccaaagaggtaggcgtggggcggccgagaccggggaagatggtccacggggaagcgcgcgggctgggcggcggggaggaaggagttaaagatcctggattggctcttctgtcactgagtctgggaggggaagcggctgggagggagggttcggagcttggctcgggtcctccacggttccctccggatagccggagacttgggccggccggacgccccttctggcacactccctggggcaggcgctcacgcacgctacaaacacacactcctctttcctccctcgcgcgccctctctcatccttcttcacgaagcgctcactcgcaccctttctctctctctctctctctctctaacacgcacgcacactcccagttgttcacactcgggtcctctccagcccgacgttctcctggcacccacctgctccgcggcgccctgcgcgcccccctcggtcgcgccccttgcgctctcggcccagaccgtcgcagctacagggggcctcgagccccggggtgagcgtccccgtcccgctcctgctccttcccatagggacgcgcctgatgcctgggaccggccgctgagcccaaggggaccgaggaggccatggtaggagcgctcgcctgctgcggtgcccgctgaggccatgccggggccccggcgccccgctggctcccgcctgcgcctgctcctgctcctgctgctgccgccgctgctgctgctgctccggggcagccacgcgggcaacctgacggtagccgtggtactgccgctggccaatacctcgtacccctggtcgtgggcgcgcgtgggacccgccgtggagctggccctggcccaggtgaaggcgcgccccgacttgctgccgggctggacggtccgcacggtgctgggcagcagcgaaaacgcgctgggcgtctgctccgacaccgcagcgcccctggccgcggtggacctcaagtgggagcacaaccccgctgtgttcctgggccccggctgcgtgtacgccgccgccccagtggggcgcttcaccgcgcactggcgggtcccgctgctgaccgccggcgccccggcgctgggcttcggtgtcaaggacgagtatgcgctgaccacccgcgcggggcccagctacgccaagctgggggacttcgtggcggcgctgcaccgacggctgggctgggagcgccaagcgctcatgctctacgcctaccggccgggtgacgaagagcactgcttcttcctcgtggaggggctgttcatgcgggtccgcgaccgcctcaatattacggtggaccacc

SEQ ID NO: 4173 - DNA, 6000 bp, Homo sapiens
ccaccaaagtgcacaagggcaggctctctgtcagccacttttgttctttaggtgagtcctgtgggcccaccatgagccaggctctgggctggggctcaggtggctcagggactgataggagtggggtaggggattcttcctggctcctcatcaaagactgtccttattccctccagtggctgttgggggatgagagaggtccccagattccatcctggaatcataccttccccctgaacagcctctgcccttccctcacagagcacccagaggccctgtcctgcctactgcttcaactccgaagagaaaagtgagttccacttctggggctctttagccctcaattttaacatcccaagagctgctgtggtctaaagggcttctgtcctcctccttattgccatattttttcctgtcgttaacatctgcttattctgcccttcccccaacgtgacttacaaatgagcagctcccctgggatctgggcttcctctcgactttacccccctgcccaccaggagctgccctcggaggtggggaggtggggaccggacatccctgtttcctgctgccacagcagttctaatccctggtggctcctgctccccgccgcgccccccccaccgccccatgctcctgctggccaccgcacagctaatccaagaggagggagggtcagggtagaggggtcacgcaccatcctctccctcaccctgtgcagagcagagccagctggacctactgtgccttgacagggtggggcagagagggagagggtggcagccccctcttcccgcaaagccctttagcaacatcccccgataaatggggcagcagctgtgtatcttatccttcctacctttctgccttccttccaccctttctgctctcttgcctgagagactataaatggtacagagtgtcctagaggaagtgggaagcttggaggctgtatggggctgtgacttcacaaccctctcctgcccccttcctccagctggaagccaggttggcccacagctttagcagggtaggggtaggggagcatctgcatgccacatgcttgtgcttctgcctcccaggcccactccctgactgttctaggggaggaggaggagaactgagggtcctccttcccaacacacacacgcacacgccttctcctaccacagcaagtgaagaatctcacttcttctctcctggcttccacagaggatgaaaccaggcattccttggcctaaggagaagagggagagggatgtgagagtagtgggtgggtggggaggccagggcttgggaaataagtgggagagacccagcatgccctgcggccactgtgcaagcagcacccagtgcccccttcctcccccaggcccagcgaggagatggtgaagatggtgctgagccggccctgccatcctgacgaccagttcaccaccagcatcctgcggcactggtgcatgaaacatgacgagctgctggccgagcacatcaagtccctgctcatcaagaacaacagcctgcctcgcaagagacagaggtgggacacggtccctgtctaccctccaggccatggcggtctgcagtgattgctgtcggtggtggtggtggtggtggtggtggtggtgatgggggtcagtgctgtcccagcctggtttgtgggcgacatctagtggtccgaagccacatggcatgcgagaccaccgtggccctttctccccatcttccagtgcccctgtggccaggatcccctgttctaggcacacctttctcacccaaccccagccctcccaggctgcctatcctgttccccatgtaggctgcctctgtcttaagggggccctggcgggtggagggtgtctcgcactctggaaccctcccacactcagactctggctctggtgattcctgcacagcctgaggagctctagcagcaagctggcccagctgactctggagcagatcctggagcacttggacaatctgcggctcaacctgaccaacaccaagcagaactgtatgccttccaccctcggcgtccagtgtagacggtgctgccctggcccagactatgcctggagccaggctgggggcaggggcaggacacccggggccacaacccacactcgggataaaacaacctgtgcgtgctgtttaataagctcccagacatctgattgtttttccttccctgctctcccttttcttcctctagtttttagccagacgccaattctccaggcgctgcagcatgtccaagcgagctgtgacgaagcccacaagatgaagtgaggctcctgccactttgggccttggaaagtagtaggggaaaagcctaagggagaggaagcctgctagggacataaacgtaatggccagcaagaccttagggtccagggttgaagaaaaagaaggcctaggcctgggggcagagaagaggatgggaggtgccgtaggagcagcaggctcccactcaaagagctaccgctccttttccttagattcagtgatctcttctccctggcggaggaatatgaggactcttccaccaagccacccaagagccggcgaaaagcagctctgtccagccctcgaagtcgaaagaatgccacacagccccccaatgccgaagaagagtcgggctccagcagtgcttcagtgagaacccagccagtgcacagggggaaaaggagcactgggtgcaggtggagtcggcgccagcagctgcccaggctgttaacttcccatttcccctcccatctcttccaggaagaggaagacacgaaaccgaagcctaccaagcggaaacgaaaagggtcctctgcagtgggctctgacagtgactgaggccctgcattccccatcccacccccggctggactgccctctccttcttggtgattcaaaggttaatagaggctgaggagattgcaggggaaacacccttgctgcatccccaagctcccccggtggaaggaggagctttctcctctggctgagtttgagaagctgccatgcagcccctagccccttccctcctcctggggcctccagcccctcacactgctgttcccagtgatatttgggatctgactgaagccagaggctctgtaaaatcagaccatagtggaagtcctcagccccctggccccttccgcaatctcctcccccagtctcccaaagagccatttcaacagagaagggaaatgacaaaggggcagctggccagataagctaggatgagagcagagactcagtgtgtgggtgtcccttcctgcttccccttcaggtcttggtttgttctgaagggacgttttatagtcactatccacatgccagtgtgaaatgggcatctatgacgtggtcagggtgtccattcctaatcatggggcagatgccacaagcattcagaaaggagtctgaaagggtggccacagccccacgtggtgtgccctggaggcttaggttggtctgaggttggcacctcaatctacaccagagcccagggagtcccagaggcaagtttcacagaattgtcaaatgatcccatttccttgagtctgtttttttttttgtttttttttgttttttttttggcagagataatcgtgtcttaaaagttgtttttaaatgacaataaaacaagccagaatgtcttttgtgctggagtgtctgctggcatttgccccgtgcatgtatagcttggtcttgatttgattggcacccctacttgtaaccgcagaacatccccctttcccttcctgttctgcccccacttttgtctagagcagaagggacttggctttggccactacccatccttcctgctgccactggaggtgggagccaggcactgatctgtctatgcagaaccatcccccgtaggatgaggcctgtccttactcatttctcaagaaacaagatgcttccaaaaggtctgtcatcctccagttgaagtctgtgtgcctaccaagaatggccggaggactcgctgcttgacgggagggatgctccagcttggtctccagggacaactgtacctggagataaagtctggataccagggagggacagagatgctcttccttccacagtgtggccacttgctgggccatgtgaaccagcagaggagagttccttggctatgctgttgttcccccgctgtccagggagaatggaggtggactgaggagtgaagtttgggcgaactgcacagagctgctcctcttcaccccgaaaatttgtctttttacagaatccaggttctcccctccctcatcactgctgttgcttcctttgaaagtctaaaccactggaggcttctttttccttcctctctccttccccagtttcctctgtcccaattaaaaccaggatggagagcatttgctggctggccccaattattgtacccttgcccaaagggaggggcctctgtcgtgacccctcagaaatctggcagtctgggtttccacctttcccctatttaactctcagcccccacccatcccctggggttgcggctggcaggccgggacttgcagaaccaaatgggccaggggccaagttcattcttttgggagagagcaatggtaccttcccttaacgggaaaacgagaaatattgaggggaagatggactgcgatccaaacgccctggctctcaggcctggactctagggcttagccagatgcctaaaccgcccaagccgagaaacaacttagaagacagacataaccctgggattcagggaaggcgcgagcaccgcccaggacctggtagggtgcgagccgcgagcagtccgggagggagcgcgcctagggcggagcgtaggctgtggggggagggctgggagtccggggccgccccacacccgcactcctcccgggtttctgctctccgcccgtgtggagtggtgggggcctgggtgggaatgggcgtgtgccagcgcacgcgcgctccctggaaggagaagtctcagctagaacgagcggccctaggttttcggaagggaggatcagggatgtttgcgagcggctggaaccagacggtgccgatagaggaagcgggctccatggctgccctcctgctgctgcccctgctgctgttgctaccgctgctgctgctgaagctacacctctggccgcagttgcgctggcttccggcggacttggcctttgcggtgcgagctctgtgctgcaaaagggctcttcgagctcgcgccctggccgcggctgccgccgacccggaaggtcccgaggggggctgcagcctggcctggcgcctcgcggaactggcccagcagcgcgccgcgcacacctttctcattcacggctcgcggcgctttagctactcagaggcggagcgcgagagtaacagggctgcacgcgccttcctacgtgcgctaggctgggactggggacccgacggcggcgacagcggcgaggggagcgctggagaaggcgagcgggcagcgccgggagccggagatgcagcggccggaagcggcgcggagtttgccggaggggacggtgccgccagaggtggaggagccgccgcccctctgtcacctggagcaactgtggcgctgctcctccccgctggcccagagtttctgtggctctggttcgggctggccaaggccggcctgcgcactgcctttgtgcccaccgccctgcgccggggccccctgctgcactgcctccgcagctgcggcgcgcgcgcgctggtgctggcgccaggtaaggctggagctccgaactgactaaggcggggccagccacagaagggggcgtgtcggagaccacagaaaggcttggtctcatccctgggcctgggaagaagccgactatcccttggggttcgaaagtgggtggagataggagtctccgggtttgagaagggatgaggctgaatctttggtgccccaaggatccccaaggagtcgagttccaggcctcagacccaagatggaatgtccatacccttcaccctcatcca

SEQ ID NO: 4174 - DNA, 6000 bp, Homo sapiens
aaattcctataattctaatatgacttagcgtatgttattaataattgttacataaaattttgtatgcaacagaagtaaccaaaatttcctagttaattgtggctttactagtggctgtcctaagacttttttttttttttttttgagacagattcttgctctgtcacccaggctggagtgcagtggcacgatctcagctcactgcaacctctgcctcctgggttcaagcacttcctctgcttcagcctcctgagtagctgggattatgggcacctgccctatgcggctaatttttggatttttggtggtgacggggtttcaccatgttggccaggctggtctcaaactcctgacctcaaatgttccacctgcctccgcctcccaaagtgctgggattacagatgtgaaccactgcacctggccctaagactttttatcatccacagacaattgttgtcttgttttgatcttctttagaaggtagtttataatcagccataggactttaacaggtgcacttaaatgcaggtttctgataactttggagattgtgacattagaatagaggaaacaactttcagaactctcatggggagctgaaatgttcatagatatcaaacaaaagttaactgcataaactaaagaagactaaagcaatctttttgcctttgcttaaaacattgctgatcctttgttttattttttagagtcaaggcaacttttcttttcagatatttacagcttttaataatcgagtaaagtatactcctgtgaacaaaatttggagtatatgcatctctctacttgatttctccagaatttggaaattatttgtgtgtattcttaatttatggcaatgcagttatttgcataagggtaataagaatctgttttcttttgcaacaggacacaattggagaaattgtttattttatgaagggtttgactggaatggtgtgctttccattaaggaatcaaacttgacttgtaaagcctataaaagccacttagcgacctgggctcataaccttgcctacacagtccctgtacagggtttctgacctgtggtaagtaaagaatgtcaccttctaaaaggtccaggagccccaagttatctggggacctcaaaaggagaggaagaatttacccaactcaaaggtatttgagggcacaaacccatggcagggctcagctttaaaaagtcttatccaagattctttctatggaacagagttccatcaaagccaattttaaaagcctacgtgaaaaataattattcttgctgcactttatacaatcatcaggccaagtataataaagcacattggtcttaccataaaaatggtctttcataaaaatgggaaactggagagagaaaaattatgtttcaagaactatgatacacttgttattaaattccagtctcatcagttgtctttaagtttgtttctgcaatttaggctaaccctgcttagtcctgtgaaccaaccagtggcctctgactgctgctcagaagaaacaagagggatgggtaatgtaaaaatctgcatcaatattctaattctgggcatgtactggaatcatctagcaacctcatatcagcgtggttccaacagttcctcagttcatggaaagccttctagtttagtttacttgggataattttacttattttgctttatggttgtggaatgtatagctgttgtaatctttgtataggaatggaggacaagcttactgaatgtttccttaaactgaacacttatgaatcttccagagtatcaccttttgtcagaactcatgagttatgaatggccctcaagataccaatgctttttcttcccttcccttcccttcccttcttttcttttctttcagatggagtttcattctttcaggctggagtgcaatggcacagtcttggctcactgcaacctccgcctcccaggttcaagagattctcctgcctcagcctcctgagtagctagggttacaggcacccgccaccacatctggctattttttttgtattttttagtagagacagtgttgcaccatgttggccaggctggtctgaactcctgacctcaggtgatccgcctgcctcagcctcccaaagtgttgggattacaggcatgagccatcccgcctggcccataccaacactttccaactgagctcctctctaccacgaatatgagagattctaagagttaggcaaaaatatcatcgcccctattcatcctgaagaacttacagaagatggaccttcgtccctctgcaacccttaggattagtgcttctcttataaaaggaaggggggaaatgtcagaggcacgtgaaccagagcaagtctattttgaacaagagctgagtaaaatgagaatgagacttactgggctgcattcccagatggttaaagcattctaagttacagaatgagataggaggttgccataagatacaggtcatggccgggcatggtggctcatgccatgacagtttataaatgccatgacaatgacaggaagttaccctatatggtctaaaaaggggaggcatgaataatccacctcttgtttagcatatcatcaagaaacaaccataaacatgggcaaccagcagccctcggggctgctctgtctatggagtagccattgttttattcctttactttcctaataaacttgctttcactttactctatggactcgccctgaattctttttttcttttttttgaggcggagtctcgttctgtcacccaggctggagtgcagtggtgcgatctcggctcactgcaacctccacctcccgggttcatgccattctcctgcctcagcctcccaagtagctgggactacaggcgcccaccaccatgcccggctaatttttttgtatttttaatggagacggggtttcaccatgttagccaggatggtctcaatctcctgactttgtgatcccgccttggcctcccaaagtgctaggattacaggcatgagccgccgcactcagcctgaattatttctagtgtgagatccaagaaccctctcttgggatctggattcagacccctttcctgtaacaagattaggcaccaggagaaactgacacacatggatgatataacagatgcctaaatggatcctatgggggaactggagctggaacagccctttagagttgtcgcaaagtgaggcaaagaggctagacttttatatccctccatcaatcagtgtttgacatgggccccataggagggcatgtaaccttcggtgaggcatctttctgacttgaagggcattgcccaatgagggaggtagctatgtggtatcagcagctggtatttcctacatgtagcgaatgggcatattggctcccaagggggaatctgggtggagcactatagtatccattaaacctagtaaagaaatattatttctttactagtcacacagatgtgcccaggacagtggtagagcccacagggttacataaatcataatggtagccctcaagaacttcataaactgtatatggtattttaaaaagttgcatattgtctgtttccacctactagaacataagctctaggagggcagagactatgttttgttcaccactgtttctccagtgtctagacgtagattctttgaatgcatttaattggagccttgagatatgaagaagtaggatgcggttacttcatgcagagcaagagtggcatgcacccagagaaggccaggtggagctcagcatgagtgtgaaggcctcatgtcaagccatgtcaggggacacaaagatggagtattctctaacctatgtgacactcggcataagggaagtacaagcactcaatatgtgagtttcattcccacagtctgtggtctttagcccagtctttccagatgcctattgagttcttcaagcatccaaatggtttggggtaaggcttcaggttctaaatgagaggctttgtgggttaccagctggagagtcagaaaatctggatttgaattcactcagccatgaaataattgtgtgatcttgggccgggcacggtggctcacgcttgtaatcccagcactttgggaggccaaggaaggtgaatcactagaggtcaggagtttgagaccagcctggccaacatggtgaaaccccgtctttttttttttttttttttttgagacaaagtctcgctctgttgccaggctggagtgcagtggcacaatctcggctcactgcaacctccgcctccctggttcaagtgattcccctgcctcagcctcccgagtagctgggactacaggcgtgcaccaccacgctaatttttttgtattttagtagagatggagtttcaccatgttggccaggatagtcttgatctcctgacctcgtgatctgcctgcctcggcctcccgagaaaccaagtctttactaaaaaatatcaaaattagccaggtgtgatggacctgtagtcccatctacttgggaggctgaggcaggagaattgcttgaacctgggaggtggaggttgcagtaagctgagatggtgccactgcactccagcctgggggacagagcaagactctctctcagaaaaaaaaaaaaaaaaagtttgatcttggggagttctaaggcccactagcctcatctgtagaatggaagcaatagtactactttgcagagctgacttcaggaccaagagatctaatgtctatgaagcggggtacttccttctatttgtcaggatgggggaggctagtcctgtgatgactgggaatgaagggtaaaagagacagaggttgggtaaactccaggctctgtgttcatagcctgctcccagacattctcttgttatctctctgtttcctagcctacacacgtgcacagacacgtagctgctgttcaggaactgagctaatggttttaaagtctgttccttatctttgctggaggcaggcagtagctgtgcagtgacagtgtgcctatgcagacagagggagcagtgaatagcaatagggtgtttccaccatggtcttcactcaggccccggctgaaatcatgggccacctccggatacgcagcctcctggcccggcagtgcctggcagagtttctgggtgtgtttgtactcatggtaggtaggatcactgcgggaaggaaagaagggggttgggcaaaagttcctggctccttctgttgtccttatctctttctcttggtgtcccccttcctctcaactccctatcacttttcgtttttatcctctcgtctctcctaatctcctttcctctcctacttcatcatttttattcttgtcatttttattctttctttaataacaagtgtatcatagttcttgaaacataatttttctctcttcagtttcccatttttatgaaagaccattttcatggtaagaccaatgtgctttattatacttggcctgatgattgtataaagtgcagcaagaataattatttttcacataggcttttaaaattggctttgatggaactcttccatagaaagaatcttagataagactttttaaagctgagccctgccatgggtttgtaccctcaaatgcctatgagttgggtaaattcttttcttttttcccacattctttccctttcttcttcctccactttccccatttcttttcccttccctccttctgcttttctccttcccttgcttgtcttctgtgctcattcatctccttggctgctcccctggccttcccaacctttctccctgttggtctcctgggctccctgttcctcatctctcctcttctcagcagctcctcacccaaggagctgtggcccaggctgtcaccagtggagaaaccaaaggcaacttcttcaccatgtttctggctggctctctggccgttacgatagccatctacgtgggtggtaacgtctcaggtgaggagggtggggtctggtcatcagagcacgtgggatgtgcatgccagtttgtctgtc

SEQ ID NO: 4175 - DNA, 6000 bp, Homo sapiens
aattagccaggtgtgatggacctgtagtcccatctacttgggaggctgaggcaggagaattgcttgaacctgggaggtggaggttgcagtaagctgagatggtgccactgcactccagcctgggggacagagcaagactctctctcagaaaaaaaaaaaaaaaaagtttgatcttggggagttctaaggcccactagcctcatctgtagaatggaagcaatagtactactttgcagagctgacttcaggaccaagagatctaatgtctatgaagcggggtacttccttctatttgtcaggatgggggaggctagtcctgtgatgactgggaatgaagggtaaaagagacagaggttgggtaaactccaggctctgtgttcatagcctgctcccagacattctcttgttatctctctgtttcctagcctacacacgtgcacagacacgtagctgctgttcaggaactgagctaatggttttaaagtctgttccttatctttgctggaggcaggcagtagctgtgcagtgacagtgtgcctatgcagacagagggagcagtgaatagcaatagggtgtttccaccatggtcttcactcaggccccggctgaaatcatgggccacctccggatacgcagcctcctggcccggcagtgcctggcagagtttctgggtgtgtttgtactcatggtaggtaggatcactgcgggaaggaaagaagggggttgggcaaaagttcctggctccttctgttgtccttatctctttctcttggtgtcccccttcctctcaactccctatcacttttcgtttttatcctctcgtctctcctaatctcctttcctctcctacttcatcatttttattcttgtcatttttattctttctttaataacaagtgtatcatagttcttgaaacataatttttctctcttcagtttcccatttttatgaaagaccattttcatggtaagaccaatgtgctttattatacttggcctgatgattgtataaagtgcagcaagaataattatttttcacataggcttttaaaattggctttgatggaactcttccatagaaagaatcttagataagactttttaaagctgagccctgccatgggtttgtaccctcaaatgcctatgagttgggtaaattcttttcttttttcccacattctttccctttcttcttcctccactttccccatttcttttcccttccctccttctgcttttctccttcccttgcttgtcttctgtgctcattcatctccttggctgctcccctggccttcccaacctttctccctgttggtctcctgggctccctgttcctcatctctcctcttctcagcagctcctcacccaaggagctgtggcccaggctgtcaccagtggagaaaccaaaggcaacttcttcaccatgtttctggctggctctctggccgttacgatagccatctacgtgggtggtaacgtctcaggtgaggagggtggggtctggtcatcagagcacgtgggatgtgcatgccagtttgtctgtctggtgatggtggaaacgcaaatccttctgtgactcgtggacattatccccttgaacagtgtcccagactgaaataagcctttggccccaccagcccctcctctttctgtatctctccatcctgcttcctcacactaatgcttggctcacctagacagaaatcaatggcagggcacgaagggcagctgctatcctcttgtatcccccacctgaagtcctctgggggctcatctccactcaggacctctcctgtttgtaccccagatacacactgcatcggtgtgcttgggtggagccttgagacatagtgtgttgctgtggaaaaagcagacagacctaggttccaactttggattcacagtgtcttcttcttttttttttttttttttctttttttttgagatggagtttcactctgttgcccaggctggagagcagtggtgtgatgtctgttcactgcaacctctgcccctgggttcacgcgattctcctgcctcagcatcccgaatagctgattttacaggcacctgctaccacgcctggctaatatttgtgtttttagtggaaacggggtttcaccatgttggccaggctggtctggaattcctgacctcaagtgatccactgcctcggcctcccaaagtgctgggattacaggcgtgagccactgtgcctggcccacagtgtgactttgctaagtcacttaacatctgtaacatctggagcctcaatttcctaagctgtgtgatgagaattacactatctgccttaagagctataggaaggagcagtagtgttgtctggtgacaatgcctggcagtgacacttaatagatgctctttttctttccttgatacttgaaggggcccacctgaatccagccttctccctggccatgtgcatcgttggacgcctcccctgggtcaagctccccatttacatcttggtgcagttgctgtctgctttctgtgcttcgggagccacctatgttctctaccatggtgacagagggaacagagggagctgtgccttgagagcacctgtgggtgggcaggggtgcctcagaatggttttggatgaatgagcaaagagggaaatcctgggtgttcccttcctccacagatgccctacagaactatacaggtgggaacctgacagtgactggccccaaggagacagcctccatttttgccacctatcctgccccctatctgtccctgaacaatggcttcctggatcaggtaagtgtgagggggagacctggggacactactttggtcctgttcctcggcaccccagcctattgttcagtctctgggtggagtgtgggttgggtctatcttggcactccccaccatccccaactgcctgtgttgcacaaagccagatgacatggaatatttggatgagagagggcagatggagcacctggcagctgacagggaaccctctgcctctgttgactccaaggttctgggcactgggatgctgattgtggggctcttggccatcctggacagacggaacaagggagtccctgcgggtctggagcctgtggtggtggggatgctgatcctggccctcgggttatccatgggtgccaactgcgggattccactcaaccctgcccgggacctgggcccacgtctcttcacctacgtggctggctggggtcctgaagtcttcaggtgggagacagactctcctggtgctggcctccactcaccttcctctgctaagggctctgtccctgggtccacagcactctgcctttaaaatagctctcttggcttcttaggacagtgttctttctccaagtcatattctccccctttctcccttgcttccctcccaacttttcactgaaacagtaagatttagaggttgtgttcttaggcatgccacattacttccatgcacattagtgacttcatcagcaaaattaatatattcagataattccctaaggcaagaggctggaccaagctctcctggggttccctcttctaaatactatgctttggtgacaaggcaatcctcttcctggtgtctaccaccctgggaacaactttagggcactctcttgttactgccccccgtccttggagaggggaaggctaagggagtcactcctgataccttcccactgtccttcttttgcagtgctggtaatggctggtggtgggtgcctgtggtggcccctctggtgggggccaccgttggcacagccacttaccagctgttggtggctctgcaccaccctgagggcccagagccagctcaggatctggtgtctgctcaacacaaagcctcagagttggaaactcctgcctcagctcagatgctggagtgtaagctatgattaggacaaccctcacttcactcatggaccctggagccagccactgaccccgcctgggaacaacagtcattcttcctctttgttaatgtgccagaacctgggaggcttctctgtttatctgtttggcatcccttcctcctaaactaagaaggatcctggacagggagaagtggaggaggataaggtaccaggactcaggcttctcatcccctcctcccgcaaagcggttttctgaccctcagggcctctcggaatgtagttgctcgaggtaaccgctagagggtgcgcacctggatgctggatggggacggctgcgggcatctgcagggtggagggggccaccatccagtgtagggcacaaccctggggactgccctccatagcctgtcccgactgccgactcctagctctcatcgcctcggcgcctcccaccttcaccctctcggggatgcctccccaagagggtagttaggggtggggaagccgcctccacccagggggcgtggtgggggcggagggaaggagggcggcggggcacagagacagagagcaaggctgtgaaactgaggcaccgttcctagacatctcggtgctgtgtcgttcattcaaggagagttgagatacagtgaaatgagccagggcgaggagggagggtgaaggaacggagggcgggcggctccgaggagcgagagtcgggctgagggcaacctggcgccagggaaaattctggttattcaccacttctacagctctcctgccgctccctgcagaggatgctcgttttgcagagaaggcagtgttcctctattcccttcttccgaattaaaaataccccctcagagcgatctagcctcccgaattgttttttcttttaagatgcggatggacgtacgtgtgggggcatcccagcccagccacgccgaggctcggaagggctaagaccctcccactgccccgcacaaagatggctgctccctcctccccgctccttctcccctccccaaaaccccctcccgccccccggcccccgccgccggctccgtcacttccgccccgccgtggccgaaactgacacaaagtagcgggccgaggccccgggggagcggggccgcagctgggggggcgggagcccgtggggagccgagccgagcgccccccgccccagcccccggcatgggcagtacggggccgccggggcgggcgccgagcgctgagcgctgaggtgaggcgaggcgaggcgaagcgggggcgcccgggagcgcggggccaggagggcagagggagatgcggccgcagccgcggggctggaggggccggggagcgggtgtagactggggagcaccgggggccaagatttgggagctgcggccagacggggcggggatggcggccgactggagacgaggggctgtcgggttcccggggacggggcagagcgggggtctgcgtacaggatgggaggatggggtgccgaaggggcgcgtggagagcaggagagcggcgcgagtgccaaggagaagctcgtgcagccttggccaggggagacccgcccagagagttgttgggcgagaggagtaaccgggacccgagggtttggtgcctggagaagggagtttgggctggtaggctttgtctcagtaaggtggaggtctatgcctgaggaaaactgagggtgtcaggaaggggcagtagctctgggagatgatagctgtgccgggagccctgagttctgtccttggtgagggaaggtggcccgagctcgtgttggtggccagtgagctggaggtctcgagttccatttcctcctgtttccctgacctgccatcctcctctgaaagaagtggccagcctttggggctcttgcttgtaagggagcagggaccggacctataggaggagctgttttcctccatggagcattgcctgcttgccggggctggctatttttatcccaaatgtggccgagagggggctggggctgggtgacggggcagggcaacgtggctgatgggcctgacctgctcagaaaacccaggctgtgtgagactaagaaggaaaagtgagaggggatcccagttcccaggtctctcct

SEQ ID NO: 4176 - DNA, 6000 bp, Homo sapiens
tgagggagctcctggagacactgcccattctgctgctgctggtggtgctgtgtggcttggactgggctctctactccatcttcgacaccatccgccaccactccttcctgcagtactccttccgcagtaagcccatcccccagacacattccaggcccaagagacaccctctggagaactccaatgcctgcacagccaccccaccctagttcttccaactgtgcctcgtccttctgcctcttttttttttttttttttgagacaaagagtctcgctctgtcacccaggctggaggagtgcattggcacaatctcagctcactgcaacctccacctcccaggttcaagcagttctcctgcctcagcctcttgagtagctgagattacaggtgtgagccaccacggccagctaatttttctatttttagtagagacagagtttcaccatgttggtcaggctggtctcgaactcctgacctcaagtgatccacctgcctcggccacccaaagtgctgggattacaggtgtgtgccactgtgccagccatccttctgcctgttcttttcccctttctgtgattcagcccctccctgtcctcctcaaggtcaaatgacagccctgcaacctgacagctctcacagcaggggaggggggctctgtacccctttacacttacaactgggagcagggaggggttaggattcaggaagggacagaaagactcaggcagctgagaagcatttctgtgtcttgacccctccctgacatccacccccttaacacattcctgatttctccacctgccctgacttccctacctgtcctcctggccgcaggcagtcataaactggaggtgaaggtcgggggagactccatgctagcccggcttcttcgaaaaaccattggggccctgaacacctcctcagagacagtgatggaatcaaacaacatgcgtgagtgatgctgaaagtttggatcagaggaatcgagggcggtggggcaagggtcaaaagactccaaggtaaagagttaggggcctgggccttgggtgtggagagatgggggttggagcgcttgagctggggaaatcggagcagggaacacatctgggcaggcttgaaaaaggggagcatgaccagcttcagtcagaggagtctggaggccagggtcttgtggctagggggccccagccctccagagcagcactgtccaacaggacattcagtcaagatagaaatctgcaagatctgtgccacattgggcccagcggctacagtactgacagggcagttctgcagtgaggggcaggcaggaggagagcaggggaatcagaggactgcacctcccactgggatgggaagtccaacccagggctgccctgccccttggctggtcctgaccagacccctggcctgcccctcccctagcctgcctgccccagcctgtgggcctggatgccagggcctactggagagctgcagtaccgattggcctgttagtgtgtctctgcctgttacaggcttttggctaccgactccggagggtcatcgcagccttctacttccccaaggtttgcccctccccagacctctccacccctacacacctgcacacacacacacacaccacccagctccctaccaactccatatttgggggatgcctttctctatcattgacccccttcctgcccccagcgagagaagaagcggatcctgttcctctacaatgacctattgaagaaaagagcagccttcaccaaactcaggagggccgctatcctgaggcgggagcgacagcagaaggctccggtaagtccaggcgtaagtgctgctgccagctcctggctgggtctaagtacagcaggcaaggggcagctcccttcagtccacccagcacccaccaatggtcgcaggcctactcgagcctggtaagttctttttattttttgagatggaatctcactgtgtcgcccaggctggagtgcagtggcacgatctcggctcactgcaacctctgcctcccaggttcaagcgattatcctatctcagccccccactccacaagtagccaggattacaggcacacgccatcacgcccagctatttttttgtatttttagtagagacagggtttcaccatgttggccaggctggtctcaaactcctgacctcaggtgatctgcccacctcagccttccaaagtcctaggattacaggcgtgagccaccaagcccagccaagcccggtgtaatctgatgcaacacatgctgagggccccagccatccagctcctaaggtcagggctgtgcccgtttctgaatcccaggattcagcccagcctaagacactcagtggaccattaggaagcaggcagaaaaggagaatgagatttaatacagtctgctcatagaaaagcaagagggccgcacagaaacaggaggcccaaggcaaaaccaaagtttctaccagagggctgcagaccagaagctcagtgcagttcaagggacaggaggaggcaggtgggctgggagtcaggaaggcctcatgcaggggcacatggtaaggcacatggaatctgaggaagcagactccagtccatactccctcattaagttgtgtcaccttggccaaggtcttcactgagcctcagtttctccctctgaagaatggcaagactggagagatctgtaaggcctgctcactggagatcagcctagagtggtggtcaggtgtgggactccggtgccagagggcctaagtgtgtatcccggctccttccctcattactatgacaacggtgtgaccttgagcacatgacttaactgctgtgcctgggcttttgccttccataaaatggggttaactactccatctggttgttttaaggattaaatgagttgtacttacatggtgctggcatgcagcaagttccatatgcatgcatgttatcattgggtgaccctgggcagtgatcacatctccaagcatcagttttctcacctgaaaaaaaggagatgataataacactatctgccttacatgacaattgaattgaatttttttttttttttgagactaagtctcactctgtcgcccaggctggagtgcagtggcgtgatcttggctcactgcaacctccacctccccagttcaagcgattctcgtgcctcagcttcccgagtagctgggattacaggcacacactaccacgcccggctaatttagaattgaaataatttatgtacagtatcttagtacaggacctgacattataaacaatgagtggcagccattcttatttaatcagtcctaacaaagttcataaaagtgagactgtgtttgcttagctttttccctagggcctggatacccccagcccccatgacacacaataggggccaaatgaatgtgttgtgaaaaaatgaaaaacaaaaaacaaaaaagaacatgctgggattccttgacagggtcgtgaagcaaactgaatgtgaatgcacagatggaaatgtgccagacagtcattccaagcagaatgtgcaaagactcagtccacagggaatgcgaagtgccagggctagtctcaggagaaactggctcagaagagacagctctcagggagggctaaagtaggaaagaggctagaaagggaccaggtgagggaaggctctgaaggccaagcccaagagttctgcctgtctggcaggcagcagggcctctggagtttcttgggcaaagagtggctgcttcctgggtaaggtggcctgtggaaaatccctgacaactgtgtagagacatgtcgtgagggatggcagggagcatagtgaactaggtttgtggtttggaatcagggcccctggggtccagccaagttggattgtttactatctgtgtgactttgagagtcacttcacctttctcaactgtaaagtggggatagcaacagtgatagtcgatctggcctgctcacttctcagcctcactgtgagaaccaaataagatgatttacaggaaagtgcaaatgagagttgtggctgatatccgcttggagagagcctggagggtgcatcctcccattctccatcacagagttggggagggaggcaccctcgccctccaggggtttcctttgtccaacccagcctcctccaacacgcgggaattgtcaggcctggcgacttcagacaggaaacgctgtccagttccccttctttcccgcctcgctcccgggctggcgctaacgcccacctcccaacagcgccacccgctggcggatatcctgcaccgcggctgcccgctcctgcgccgctggctgtgccggcgctgcgtggtgtgccaggcacccgagacgcccgagtcctacgtgtgccggacgctggactgcgaggccgtgtactgctggtcgtgctgggacgacatgcggcagcggtgcccggtctgcacgccccgcgaagagctctcttcctccgcctttagtgacagcaacgacgacactgcctacgcggggtgaagaggcgtcctgctcgctcttccgcaccgtccttcccggttaataaaatgccctgtacgcttcacgtgggtcggggactggggtgagccgcgcactgcctcgcctgcagtcgggaaagcctgcccgcccgacctctccgagccaggccgcgcacaggaggcagggaggccgcgaagctactagggaggggtccggacctggcgccgggtgaaggcgcgccgcccaagccggtcggaccgggcaccggctcccactccgcacagttgcggggaagcggtagcgctgagcagcgcgggcgtagtgggcggtgtccccgctcccgaggcacccggcgcgcagcggggcgggctttgccgggggcggagcttggcttggggccgggtgggagggggcgggccggggcggggcctggtggccgcgcggcgctgctgggttctccgaggcgacctggccgccggccgctcctccgcgcgctgttccgcacttgctgccctcgcccggcccggagcgccgctgccatgcggctggcgctgctctgggccctggggctcctgggcgcgggcagccctctgccttcctggccgctcccaaatataggtgagtcctccgcctggagtgggtcggggggcggactgggagggaggtgcaggaaagtcggaaggcattagggtaatggggccggacggagaccctgggagagcccagccagagcgcggcccgccctggtccgctgtcctgggcctagggcccggtgacttggcgatggggtgaaaagagaaggaggggggatgccggcgccccctgcctcctgcctggtcatcctctgcgcggtccctgcggacactttcaggctcaggtaccaggtaccgaggggcctgtccagcgccacttcaagatcgtgatgagagggtcgctgctccccaggactggcatcttcgctgctctggggcctagctaaccgttcgacccggtgccagggcgctgagcgggcatggcttgtagggtttagtgaagaggattctctctagcctctattccaggcctggggccgccaggcactcctcaccctggtgctgttgccaccagtgcctggccgagcgggaggggcccgagatgagccaggagaagggagaattggccaggaaagaggctgggacaccaactcctccttggaactttcacttcccgctgctgtcttgggccgggaccgagagggcaggcgcgggtggagtgtccggaggagagagggccattgtgtgttgggggggtggggggtgctcgaggaggaagcagaggctgtaggcagcgggtgtgcctgactgggcatgagggtgtttagggaggtgggggtgtttgcactgctcacccagaaatgggcgttcctggcatctccgatgtgagcgaaggggagggtgagcgggcacccggccacaaggcttagctcagtctcgagagggggcgttcctgaagtggggggagagtgattgggagg

SEQ ID NO: 4177 - DNA, 6000 bp, Homo sapiens
ggggtgagctgggatgggggaagtggaaggggagcagagagcctctagagaggaaaaggatactgggctttggaaatagacatatctgggttttaatccttgctctactacttcccagttgtgtgacctcgggcaggttactaactttgctgagctcagtttccccacctatcaaatggctataataatagtatccccatccagggtacatgagatgagtatgaaagcatctagcacaggctgggcacaatggctcatgcctataatcacagtttttttgtttgtttgtttgttttgttttgagacagagtctcgctctgttgcctaggctggagtgcgctggcgtgatctcggctcactgcaacctctgcctcccaggctcaaacattactcatgtctcagcctccctactcgctgggattacagtcacccgccaccatgcccagctaatttttgtattttcagtagagatgggtttcaccatgttggccaggctagtcttgaacttctgacctcaagtgatcctcccgcctcagcctcccaaagtgctgggattataggggtgagccactgcacccagccaaatcacagtactttgggaggccaaggcaggaggattacttgaggccaggagttcaaaaccagcctggtcaacatagtgagacccccatctctttcaaggaaaaatttaaaaattattcaggcctgctggtgcacacctatgctcccagctacttgggaggctgaggcaggaggactgcttgagcccaggagtttggggctgcagtgagccataattgcaccactgcactccagcctgggcaacagagtgagactccatcttacttgctgtctaaaataaaataaaataaaacaaaacaaaacaaacacaaagaaagaaagcatgtaccacagtgcccagcacacagaaggagctcagtaagtgttagtttgatctaatttgctctggtatggataaagaccctccctccgggctgtctctacacacatacccagcacaacccccagttgtagaaatctgagatcttgaaaagctagagacaaggaaatagttccagagtgcagagctcctcattgctcgccttgtacctcctaggtctgtgacagcaacaggcactgctactgtgaggagggctgggcaccccctgactgcaccactcagctcaaaggtagcatgggggtgggggacaggggcagctgggagggcaaagcgtctcatgctttatcttgccccctcggccctctctttctgacccccctttgctgctggttccctgagtctgtgccccttgaacccttcactctccctgatcacttgacttcactccctgccccctgcgccttcatggatctagagttcttagccccgtcctcccttaaacctgacttccgcccacagcaaccagctccctgaccacagggctgctcctcagcctcctggtcttattggtcctggtgatgcttggtgccagctactggtaccgtgcccgcctgcaccagcgactctgccagctcaagggacccacctgccagtacaggtatgagcatcacctccctgctaccacttccttcaactggggacagtgctgaaggctgcctcacctctgcagcccctgccacctggttctgagccccaggccccttggaccttaaagttgctgactgccataccccacacctcccttccctatatgtgcccacagctttttacctcacagctgtgcccctgtggggtggctggattgctagggccatttctccccaggagcccctgtgctggataagtagggtcttccctcaagctaataaatactgccccccaccccggccctaccacaattttacctaaaccacacataagtgcctgcaaagggttaaccccactcagggatggcatatggtagaaaacagggtctgaggctgggccctctcccttcttgcctttcctcatgcatagggcagcccaatctggtccctctgaacggccaggacctccgcagagggccctgctggcacgaggcactaaggtgagtcctggatgccagaggaaggggactccaccttggccgggcatccagcttgggccctggggggtgcgcattaaaggctccagactcagagaaaggctagcactgcccaagagtcagtcgaaggagtcagggccagccctgccctcccctcccctggctacaggcagggaagctgagtccagaagagtggggagggcagccagctggagcaggagctgctgggctccgtccgctggccaagaggtggctttgagaggtggatctatccatgcccccagcagtgaccccaggagggcacaagggcagtggtgctcagaatggccttccgtaggcccaggtcaccatgttagaagggctggtgagcatccccaccctgagccctctgcttggatgatgggagtgtgtgcacacctcctccccactcgctccccacctgcatgcacctgcataactgcatgcacagcacccactgccctgggcccctgctggccccccctgggcactgacccttccctgcccactctgtctctctgcttcctcttccccctctgtgcctatctgcccctcctgccctctcagcaggctagtgctctcagcttcccggcccccccttccaggccgctgccgcctgaccctgtgtccaagagactccaggtaaatctgggccagggcccgccctgagccaaggcaggtgggaggcttggtacccaactgcagttctcatccctgctccctgccagtggtgctcttcattaggtgatcggggtgcccctcagccttcagacactctgagccccagaagcagcaaagggtgagcctcctgccttggtttctaccaccatctggtggtcaatggcgggactgcagtcggccagggactgcggttgacctacaccttcctcccctgagacatcagctggcatgcctccaagccctctgcgcatgccctcattctctcctgccccctggctgactttgcatgttgacttgaacccctctggggaatctctgtgcatgtccacagcccctggttatgctctcacagccactgcccctctctctgttcaggctgagctggctgaccgacccaatccccctacccgccctctgcccgctgacccggtggtgagaagcccgaaggtaacggtggggggagagaagggcacggcctctccccccacctagggctgtggtgctggtagccatgacggtggtggccgtggcgagatgccccctcagtgcatgagggcacatatcccggtggtgcctttaatggtgacaggtttgtttgcagacaagggtgaccgctggtgctgcccccaagctggtgttccccagcaccagtgcgttgggggtgggcaacatgacacccccccacctaagccggcctcctgccttctctccctcagtctcaggggccagccaagcccccacccccaaggaagccactgcctgccgacccccagggccggtgcccatcgggtgacctgcccggcccaggggctggaatcccgcccctagtggtaccctccaggtaggaggagccctgggcatgggtgggcggggcgagtgacctgggggaaaggggcctctgactcttttttcttggcttcccgcaatccagaccagcgccaccgcctccgacagtgtcctcgctctacctctgacctctccggaggttccgctgcctccaagccggacttagggcttcaagaggcgggcgtgccctctggagtcccctaccatgactgaaggcgccagagactggcggtgtcttaagactccgggcaccgccacgcgctgtcaagcaacactctgcggacctgccggcgtagttgcagcgggggcttggggaggggctgggggttggacgggattgaggaaggtccgcacagcctgtctctgctcagttgcaataaacgtgacatcttgggagcgttccccagagtttgtctgcttctagaacccgggtcgctcctgctgcggttccaggtttggccgccagaagacgctgccgcctcagacgagggcgggctgtgtggggcgggagtaccagaaagggtcggcgtgtgtccccgggatgctcgcagcttccctctgcccagactggggtggctttcggcgcaatctgtcaagctgttggacctgccgtccccactctgaccattggctgggaaaagtggatctggctgatgctcccagagcccaggagccagggcggagcggggcggcggctgctcccacgatcccaaggccgcgcacctgcctcctccccctccgccgccgccacctgagggatcgggaacaaaggtgctttgtacaggccgcaaccacctcattacttcgtcttagggactggggccgcgtgggcccccagcccggaacgaaggtgtggagcggcaagggacagacgccaatcctaaagtgagcatctagcgcgccacctaaggctctttagggaaggtggtcccagagctgtgttgtcccttccgcttgcactgtccctagatgtgcaaagaaaacggggcagtgcatgaaggtggttggacaggcttcatggatcctcgcccgcgcctcactttcccctatctgggcaaaggttatgtacccttatttaaaatcttccaaacttctaataaggcagtctaccctgcactaaagcagacacgaaagagatgacctccctaaaaatactgctgttggaatacgtccttccttcccgccccctcgcagtgcggtgcagcctcagtggaagctttggcgaacctggcgcgcgctgcggtgcacagagggttaactggagttggcgctgggtggagaggaggagacgcgctcccattggcggaaagttattcaggggcggggtcagtgaatctccgtaccccactcccctttccgcaacttccctcttcactttgtacctttctctcctcgactgtgaagcgggccgggacctgccaggccagaccaaaccggacctcgggggcgatgcggctgctgcccctgctgcggactgtcctctgggccgcgttcctcggctcccctctgcgcgggggctccagcctccgccacgtagtctactggaactccagtaaccccaggtagccgggccgaaccgggcgagcgcacagccaagtctgcgcgctcccgggctttgcgcgcgcccgccacccgctctttgcgcggcgccgcctgagcctggccgcgcgccggggctcctttgtttgagccggcgggggaggggggaggggcgaggggcgaggcgcgccctgggtctccccacagcccgcatgtgttggggggcaggcagaagaccccagccccaagggttgtctagggggtcttggagcatggagctgggggggcctttgcccgcactccgggctccgcccccctcgctgctctcctggcgatccccagcctcccgcaggctggagctgtggctgacgaacttgagagcgagggagggggctttactcttatgaaagagcgtgggttactctcctgcccgctgggtctcacctctggctctcactctgtctcctgatctcatttgctatctctgctttcatctctgtctttattggtccttctgtttctttccagtgtcagccctgcccttctagccgaatcacctctgggcaagtctcgtgaccttcctaacctcatttatctcacctgtataatgggctaataatacctagtaccctgggaagtctggcagggtaagtgaggtcatgtatgtgaaagaggctcaggctgtacagatataaactattatttctttctctctcctgagctgcctgcctttgaaccttagtatattttactgtttccatccccctccccaagtctccctgcctctcctatttcctatctgtttttctttctgattttctacttgagacaatctgtgactattcatttcttcactcactaacatttattt

SEQ ID NO: 4178 - DNA, 6000 bp, Homo sapiens
cccagacacaatcatttttgtcaaggaagccttcaaccactaggcagagggtgggggccagaactctggcagggaagacttgttgggggtggtggttatgatgctactcagagacctctgctccaatctctctgcctccttgcagccacttccttccttcctttcttttttaagagacagggtttcactctgttgctcaggctgaagggcaatggtgtgatcattgctcatggcagcctcaaacttttggactcaagtcatcctcctgcctcagcctcccaaagtgctaggattgattacaagtgtgagccactgcatgggcattgcagccactttcttttatttatttatttatttatttttgagacagagtctcgctctgttgctcaggctggagtgcagtggcacgatctcggctcactgcaagcttcgcctcccgggttcacgccattctcctgcctcagcctcccgagtagctgggactacaggcacccgccaccatgcctggctaattttttgtatttttagtagagacgaggtttcaccatgttagccaggatggtctcgatctcctgacctcgtgatcctcccgcctcagcctcccaaagtgctgggattacaggtgtgagccacccggccattgcagtcactttctagagagctaaactttggtgaaagtctggatttaggaagacttttaaggcttaaggagagtctctggggtctgaggagaaggtcaaggtcccttcttccacactgtcaagaatagagacttccttttttgactgtaacctcctcttctcattccatctaatcttttcctaccccttgcatactttctaagccctaggtcacatctctccctatgttagctgttaggaaagcttggaaatgagggagaacaaatggaaaagagtctgggctggtctaggtgggcagacctcagtagataacctcttaattataagaaaccctccattaatccagtgcctctgggatcctaaacactgtgttaagtgcttcccaggtattatggatcttaatcctcttaactaccagctccctgaggtggggcattattatccccattttacagatgaggaagcagtctcagagaagttgagtgactagcatagttagcgagtggcagaactggaattcgaatccaagcccaggctgttcactgctaagccaatactgctgcctctcagcttttcttgaaatacattcagaggactcacacacacctctagtgtaacaccccagagctccaggcttcttggcttgctggactcattagagggatcaggacatgaccagaatcagaggtgattacaccccaatgccacccaccaagccctgcatcctaatttcctgtgaactggaccacataccagtgcttatgttccctgctgtcaggcttgtatgtagttccatgtcaactcacagacgttagagcatcctcagagccatgccgacacacacacacttgctgggacccaggtttcctggttaggacggcaccaacagcctgcctgggctggggccacacacacgggccctgtgcaaggtgcagaacctgtgaatatttcatgcctggagctggcagctgcctctcttgctcacacgtgtgcctgatcttccctctcacaggctccttgtttatttgtttaatgaattatttatccatggccccgcttccctcctgacctcccccttccccaggccctagcctccatgatttattgaacacagctcagctctgtggttgccacctactgtcccagacgctgccttcggccacacagcctgagagctccctctgtcccacacctgctcagctccctgcttccttggcccctgagggatggaggagagtgaggcaccatgtcagagtcctcccaggagctgagctcagtgtcccgggagagatcttggcagccagcagtgtgctagcaagcccaagagtcagagcctgcaggtaaggaggaggaggcctgaagccctgaaaacaggaccagccccatggagggagctccaacctccacagaggccctcatccaacagagaggtcgttcagggcccaggccttagacaccagtttttcacactataggttgtgatctatagtggggatggtaaagtcaagaagtcaattttatgggcttcaaccagctttttattttattgtttttaattttaaaactagaacagaggaaaatatcatcgtgcatcctctgtagtaagggtaagtattgtttcatgaaacttattatttcagttaaatgtgtgtgtgtatgagtgtgtgtgtatgagtgtgtgtgtgtgtgtgtgtgtgtgactgaactgcagtgcaaaatataatcctactgtggtggatcacagtcagaaacaatttgagttacatttatacccaaacgtctagaccccatcaataaggcctgggtccttccatgactcacatgccacagagagaagcccaggcctttagattaggccctgggcatgtggacagtggctcagatcttatacacagggactcagtccctagagaagcccagaccttatgaatagaggcctatagacagacataggcattatagctagaagcacatatcctgtagacagaattgccatatatggtcatatagtttgtgcatggcacaaaggagccacccaaggggaaggggacatcggcccaagctccctcactaagacagggagccactagagccacctctcactgaaggaggcagcacctttgtttttgcacaaaggcaccacttgccaagagatgcaccctagggactgagcctgcaaagaagggtcctttttctaattcacacaaaggcccaaatcagctagcagccctatggatagaggcccaggtagacaaagcactagatcccacggacacaggcctagctaggccctataaagagtatctcaacttcaaaaccagaggcttcgactccatagagagagctgcttaaatcctgtagagagggctccggattctaagagaagggctcagttattattggagggtgggtgtgggggtgccagattctaaagagtacccaggccctatagaaaaaggcccaaattcttaagcagaacctagattcgataaacagggatatatcttttctaaaatggaatttaaagtcctagaccaaaccagcaagttcctgttcactatcaatatgagcagcgtctctgccaactgtgggcccctacagagagaagctgcccttgtggagcagggaatatgatttgagtggagggggctgggatttgtggcacctggagtaagcaggttagcatcatttgggtgaaacaaatctctctggggatgaggagcctgcagggagggagagctgtttgcagagtcccccactcccatcccaaggggcctaatttatttgctggctcctgagaaggaagaagagatctcctggggtggagaggagcccagagaaaacagagactactctcacctggcagcagtcagacactgaacctattctggatagcaccgcccctgcccccagcctagcacctgaggctgacttgtggtcaagactctgtcctgccacagataagcagatagggaggtgcctgcatgttccctctcctgaaggatagaagcaaagtagcagcatgcctgtctccctggacacaggtggttggcttgcgttctgagaacccagtcaggcctggttccgcctggtctgggcctctccaaaagagaagagataagggacagatagccctaggtctggtttctgaacccttttcctgaacttctacttcctagaaagagagaagaggagagcaaggaactgtgtgtgtcaggatgcatgtgggtttgtgtgtgtgttgtgtgtggatggatataggtgtgtgcttgggtgtctctgtgcctgatctctagcagtctgatagtaccctttcctatgtgtgtctggaaggtgtacctgtgtgtccatatgtctgtgtcaggcacctgtgtctctatgttctctgcctttgggtgactgtgccttttttcctgaatgtgtgtgtgtgatgtgtgtgcttgggtgtcactgtgaggacaatgactgtggtgagagctggaacacaaggtgctctgccctctgactcaggatcagcgtctctgagagtaggagtgagaatccctggggacaaccctggctgccccgggaggggccctgcctaagtgccagtgaggaatcctttgtaggtgtccagggaaccctgctttgccccagctgactctctccttgaccccctcctgcgccttgggttctggaccactgaagactcttacagctcccagtattgacattctcaggggctgagctcttttactctgcctccaagataaacaagcctcatgctcagctgggggcttcaggtcaccagctgtcaaagccttggtgccagctgaggacttctccaccacccttctgtgcccacctgagtcctcatgcacacgggaaaagggggcatggacgcagcagagggccacagttttcagaagggaaggggtccagccctacttactaagaggtcctggatccccaacttcttctcaagtcttctccttcccctcattcccagagatgattgggcttccctgagatcgagatccttatcttgggttcccaaatccttctgggaaattcagcctggggagcaaaagacccaggaccagttgtagcaaactgaactcaagaaggagagacgaggcacgcgctggtctttcccgagggggcagtacggtccccacctcccacgcgtcgcgcgctcccgaccggagcgggacggggcctgtcgggggcgcgccaggggcggggcttcgggggcgcgcccaggagggcggagggaagggctgggggcgtggcctaaggctgggggccgacggcggcggcagcagggagctgggaagcggagaagccgggagcgcggggctcagtcggggggcggcggcggcggcggctccggggatggcggcggctccgctgctgctgctgctgctgctcgtgcccgtgccgctgctgccgctgctggcccaagggcccggaggggcgctgggaaaccggcatgcggtgtactggaacagctccaaccagcagtgagtcggggaccctgggagtccgcgcgtcccgtctcagtgagagggggagccggtgggcccgagaagtcctgggggatcccggggtgggagtcctgggagaccagagctgggggctgggaggggacggagagggggacgcactctgtgggcgtctaggaaactcgggggtgtctgaagaggctgttgggctatagtaaggagcgctcgggccgtgtggaggaggctgctggaggggccccccaccccatcttggcttctctccgcacccgccgctggaatagcatgcccctgtcccatagtcccaccagttgggctggggtttgggggtagcgctgtgctggggataggccgctgcattttggggcccagggatgacctgtttttggccatgagggcttccaggggttctgtctaggactcctgcttttaaaagtggggtccagagctgaggcagggagtccgaccgagcacctccctagaaggaaggcgaatgggttgtcttggttgtgtggataagcccggctagggtgagctagggctgggtcgctgagttggggggccctgggaatgctgcttggttaggatgggaacgtggggtaccggcgagacggaaggcggcagagagatgtcggtgtgtcacacacgcacacacacgcccgggctggggacggcgaatggctccaagtgtgagcgggcgtgcgcggctgtcagtgtgcgtgtgtgtctgagtgtgtgatttgtgtgtctgcgtcggcgatcgtctgggggtgggagcgggctgcgggtcggggaaggggctgcggtcgctgtccgcgcggccagctgcgtctgggctggggtggctgttggcgccg

SEQ ID NO: 4179 - DNA, 6000 bp, Homo sapiens
ggagtgcaatggcactatctcggctcaccatatcctctgcttcccaggttcaagcgattctcatgcctcagcctcctgagtagctgagattacaagcatgtgccaccctgcccggctaattttgtattttttgtagagacggggtttcaccttgttgtccaggctgatctcgaactcctgacctcaggtgatccacccgcctcagcctcccaaagttctgggattacaggcgtgagccactgcacctggcaattgcaaggttatttctaagttcttttttagagactgtctagctctgtcacccaggctgcagtgtagaggcatagtcacagctcactgtaacctcaactcctggactcaagtgatcctcctgcctcagcctccagagtagcatgcactatgtaccccagctaacttattattattattattattattttgtgtacagacgggttctcaaaatgtcacccaggctaatttctaactcctggtcttacacgatcctcccaggtcagcctcccaatagtcctaagttctttttctttttctttttttttttttttttttttgagagtcttgttctgtcgcccaggctggagtgcagtgcagtggcacgatctcgggtcactgcaacctctgcctcccgggttcaagtgattctcctgcctcagcctcctgggtagctgggattacaggtgtgtgccaccatgcctggataatttttgtatttttagtagagacggagtttcaccatgttggtcaagctggtctcaaactcctgacctcgtgatctgtccgcctcagcctcccaaagggctgggattagaggtgtgagccaccatgcccggccaatagtcctaaattctaagagccaatccacccaactgctcagcaactgagggatgtctgaatgtgcatggatatgtttatttctgtcctgctttcattgcaatggcaaactctgaaatactcacgtaatgaagcattacactccctttaaaacattgtttacaaagggtttataacatggaaaatgtcttctgttgtaaagggaaaaaaagaagcacacaattgaaatgagtcatgtttatcacattgtctaaaagcaagcaaaatctcttccccagcaaaaagctggcagggcagggaggccaatgttaacagcagccggtggtcctcccctccccttatcctcctgttctctattttccaactttttttttttttgagatggagtgtcactctgttacccacgctagagtacagtggtgcgatctcagctcactgcaacttccacctcccagattcaagtgattctcctgcctcagcctcccaagtagctgggattacaggcacccacgactacacccagctaatttttgtatttttaggagagatggggtttcaccatgttggccaggctggtctcaaactcctgacctcaagtgattcacccgcctcagcctcccaaagtgctggaattacaggcgtgagccaccgtgcccggcctattttccaacttctgaaaaatgtgtgcacattactaataaagtggggaagggtatactttatgtttcaaaatgaccttgagggagtacgacagagattgctctcagcccaggttctgctcctccccctgctgcctcaccccattgcccagagatgacccctggggctgagccaggtttcacttgccccagggccctgcagctctggccttcccctccccaaactgcagggcacccagcaaaggagtcgcaatccagtacctgcacctgttcccaactggaaatgctgcctccaggcagccagggcctaccccaagacctcagaggaatttcctctgaggaaattcctgccctcccaggaatttccagaaaggactcatggaggaatttcctagacatgcagacaggcagacagacagacacctcaggcagctctcgtcactaagcgcagatgtttgcctgcgggtgacgtgctgggagccaacacaagcacacaattttgcggcgagaggcagcacgaagcaagaatggagagcagacccacccgggcaggctgggggctggcatgaggaagggactgggagggggccccagagttggtcagcagatcgagtctccaggaacagaagtccctactattatctctgtctgaatggcacagtgccctgcaactctcctctcagcacagcaggcattgcaggggctccaggaagggtcagggtagtgtgactgtgagtggtagggccgcagtctgggcttgagcacttagcaagtttgctgtcctggtggcttgtcaatatcccctaccggcctgggggctccccaaggtagtgattttatcttaaacccatccttacactctcggtgcccatcgcaacacccagctcatcacaacactcagtgtctagggctgctccagtagggtggatgatcgacccccatatggataggggagtggatagagagtgatgggatcaatgccctaagtgagatgagaatactggggacagcaccaaagcagggaaagagggctccgggtcctgtcggtgcgcagaatttccatgcacgcttctgcacccagcttgctccagacctagacgcaggcaagagctgacgtggccccgccagactgggcccagcgagcccgaacctgcctggcccaagcagctgcagcgtgggacttcacacgtccccgcccagtcccagtggtcagagaaaccagggaatccggcccaaagctgtctcctccaggaggcaacccgggccacctgctctaaagagctaccagcatccctcccctcttcaacccccctgctggctccttttcagaacagttatgtccagcagaagttaagttccttcactgaacagtgagtgatttcactcactccacagatatttactgaccatctactgtatgtgctagatgctgtgccaggtgctggcagtaagataatgaacaaaacaaaaacccatgtcctcctggagctttgactctatggaatgcccgaactgggaggcagtactctcgccggggccacgtgggaggtcgacacccaggtgtcctcctaggtgagcaaaaggcgcgtgaggtgccgccctgggagcagtcggcgggtggacttcgtcctgggcgagaggagcgggccgcacctcggacaaacgcttggctgggcacgtcgcctggggcaggtgcccgagggagaggggggtggcgctggccgtgcgcaaaacccggccctgacccggccacggggttagaggccgttggtactctatgtttattgtaaacgcagcgaatacggcctccagcggcctcagcgcacgtggtggtgcagtggggagccggctgggccctccccagctccaggctcctccccggcggggtcagcgccagacttgctgcggcgtccgggccccgcgtaattacaggggctgtagccaggcctggccgtaaaataggaggatgaaacggcctgggaactggagaagctgggccggagctggccaggggccccgggtccgtggcttcccgcgatgcgcagccgcagggaagggccggctgaggatgcgcacacacactcacaacaccaacctggcgcgcacacagccacacaaccacacacgtaaaccaccaaacgcacgcagacacacagcattcggctctcccactccaggctcactcgtgagcctaatcaaacacctgcccgccctctccaccccaggagctgacacccgcccgccaagccctctccagacggcagcagatccaggcggggagaagagccccgagaggcaaattccagtgggtttgtttacacagcgcgggggagggggcctgagccgggtactggggcccgactgactgggagccccagctcagactgggccagctccagctgtgcagcctgaggactgcgcacaaacgcccctccgttccaccccacccccgctgcacgccggtacgcgtctcccctcctcttcacacgctgttcacaaacattagcatacgtctgtcaaagagtttcacacgcttccacacacgcggctgtgatactactcacaaatgctttcatgctagcgcgccatcacacgtatttcatgtgtggttacagtttgtcacccttcatgcccagattctcacagtccatattcaagagcctgttcgcacggtgtacgcgtgtgttgttacatatactcaggttattagcgctctttgacttatctaaaataagaacggccccctctcgagcccagggtcccgcgtgtcgctcctgcgggcaggcactgatgtgatggacagaggcgtccttagccccggccgcacacgttacacactcgatcacacaaagcgttgcactttattcccggcatctaggcgatgacacaatctccagaacaaagacaacattgacaaacccaacaaaaacaaacagccgcgtgtgtgtggggaggggcagtcaagcgcagagtccgggaaggggatgggggaggaggagagtgtgggaacgcgggcgcccgagcctgggcatgcgaggctcagaaaggtgcggggcatgtcaacaacctcgcaccctgcaaggtccgcgcgcggagcagcaaagccgtgtcccgcacccccgcgttcgcagactcgcacttgcgagttcttcccttctcccgcacgcgactgcgcccagggacgcaagcccaccaccgggacaggctcacaaagctccacgcagacccacaagtgagcgaacacacatctctgagcagatctgcgggggcagaggagcgcgcttcgctctttcctgcacccccagcctcctcgcctccccaccccgcccctcctccacctccccagcccccaagcccccaggcagccgcgcgccgggcggggcgagggcggggcggggtgtcgggcggcgccggcccaaaaggcggagtcgctaggcgaaggggccagatctgtgagcccagcgctgactgcgccgcggagaaagccagtgggaacccagacccataggagacccgcgtccccgctcggcctggccaggccccgcgctatggagttcctctgggcccctctcttgggtctgtgctgcagtctggccgctgctgatcgccacaccgtcttctggaacagttcaaatcccaagtaagcctcgagactcccgctggcagcctgggctcccggctggcactaccccaccgggataactgtcccggccaaaccctgagctgagcctagagtagatgaccgaggtaggagggcggctgtagattttcctcccctcacttctccgtcatatctgggagcaccccaccccggggcatgcttgtgtctacttgcatgggcttatatctgcccttcccttccttctctctggcacccctattactctaaagtgagggactcatgctgggcagttcctgccttcagcatagacttcgcccctggcagccagggcccttgttccaggccccccacccccccactgtgaaagcctccacgcctctccttgtgtgtcctttgggtatctgaccacactgacagatacctggtgtgacatcaagagtgcacagaatgctcaaggtaaccctggaaggacctctcaggagagagctgggctgtaggcattcattatgcattcaccctgtatttaaagcaaacctggaaagtccctcactaggggtcttttggggtggcatgagtgaggcacatgctgtgcatgggtaggctgagggaatcacctgtttatggggctctcaagtagtaaaagcgaagagctgggagagggagatcatgggaaagcttcagaatgaacagaagaggttaaaggggttacagaaggttctgggcaggaaggagttaatttctcctgggcaggtttagggctgtgaggcaaatggtactgggaggaagactctgtcggcccctttgttcttgcccttgagttttctgaagttatgggaacaatatttgagggaatacaggagagggtggtag

SEQ ID NO: 4180 - DNA, 6000 bp, Homo sapiens
cgagaccaggccgggcgcggtggcttacgcctgtaatcccagcactttgagaggccgaggtgggtgcatcacttgagattaggtgtttgagaccagcctggccaacgtggtgaaatcccatctctactaaaaatgcaaaaattagctaggcatggtggagggcgcctgtaatcccagctgcttgggaggctgaggcaggagaatcacttgaactcagtggagactgcagtgacccagattgcaccactgcactccggcctgggcaacaggacaagactccatcaccaaaaaaaaaaaaaatactcgagaccagtatctcttggtcagccaaggccaagcaattaaccaattcttctcttagatcactttttttctcggatgggtgtattggagattgtggagtcaggtgaaagatttggaataacagggttagaaaccctaggaacaggtgagccaaaggaatgggttttaagggagagggagatcaagaagacaggagtcaccaaaggccacaggatccgtggtccaatgtcagcaaacaagtctctgtgttacctgcactgtggatggactcgtccccttggaatggacactcactcagggctcctacccgggccatggacccacccagaataattttcatagattccacaaagccctggggggatagcagcagagtaaggtgggaaggtctaccaaccccttccccagctggtgcaaactctatttccacagaactcagaggctcctcccggctcacctgcatcctcaaatacgccttctgtccagtcctaatctccagcccatcgacctccgctggaggaatgggggccagtgctggaaggcctgcatgttggtcacccagtttgcagtccacgtagagatgtagggcagggctgggtctggagggacctcggagtcgcaggagaactgtgtgtgtgcgcccatcagccaggcccgcttgctgtaggttcacggcgtggactttgccatcctcccgctggtatcgcaccagtactgcccaggaggggagatcagtatgggcgctatcccccaccccctgcctcccagctgagccttggatcaactctgctagataccacatctctagggcccctatccctaattctactatgtggctctcaacaccttgtatttaataggtacacaataaatgtttttgaaattgctttagaggccaggcacggtggctcacacctgtaatcccagcactttagaaggccaaggtgggcagatcacttgaggtcagaagttcgagaacagcctggtcaacatggcaaaaccctgtttctactaaaaatacaaaagttagccaggcatggtggtgggcacctgtagtcccagctactcaggaggctgagataggagaattgcttgaacccaggaggcagaggttgcagtgagctgagattgtaccactgcactccagcctaggtgacaaagcaagactccatttaaaaaaataattggtttagagacaaatactttcttagtcttcattggtatcagatgactgtatcctctcctagggtgacagctggttttgtggccactgacctgttccagggatctgaaagacctttctgtatcaccgctgaggcacagagacatgcctcaccctccttccaggcatccccaagtacaacctcccatccctataaatatcaggactcaagcctcaccctattgtttggtacatgggctcctaaagcaccttataagcaccccataccaggtgcccctgatgtctgggcacagcctgatgggaccttggtccctaatggaggccaaggagaatgaggaagcacttgggaagtagggatgagggagagtgcttaaggaggtcaccattgcaagaaaggagatgcccaccagtcacctttgttgatcttgcctacaacagaggcctccagccatcgagtgttgtcttggcgagaatagaggccaaagaggacaccaccctgcttggggggcaggcggaaggtggataagaggtagatgtccccagcagtgagcaaggctgtccggatcttctctgccacagctaccatctgccgagactcgcccacagtcagcaggtcaattactggtcaggcaggggttatcaaggttagagaatgggatcaaatgctaaggtatgccctcccccgagcccacatcaccccctacccccaccaccaggcagcgttagtcacctcaaaattcaacccttggctgggcatggtggctcgcacctgtaatcccaacaccttgggaggttgaggcaggtggatcgcctaaggtcaggagttcgagaccagcctggccaacacggtgaaaccccgtgtctactaaaaatacaaaaacaacaacaaaaaagaaaaaaaaaccacctagccgggcgtggtggcgggcacctgtaatcccagctactcaggaggctgaggcaggagactcgcttgaacctgagaggtggaggttgcagtgagccgagatcgcgccattgcactccagcctgggcaacaagagtgaaactccatctcaaaaagacaaaacgaaaacaaaaaaaaacctcaacccttgttgctctcagaggacagaggcactgtgccttcctttccccattattgcctattactaccttccaggaacctgcaggtttgagactcacttggaaacacagaaacagcaccccacaaatttgagatgcccccaccaggtggcgcaaaggagatgctgtgctgatcccccacaggagtggcacctggtgtccacaacgtagaaatggaaggcagcttctctttccactcctgggtttggctcgttccacaccctagttcccctcctcccatcctaggggcgcagcacactcgctctggataagaacagctgcccactgaggactctaaccctcccaccatctgggctatctcccacgggaatgtaggacccagctcctctgcctcctgtgtcctggccaatctgtggttttccctccagccagtaaagaatctatgcctgtgtcatctgctccagctacctctcccacatccatcggcccatcccaccaccagacctccgggagagcccaggcttcttggtccccacccccgccctgtccttgggcagccaggagcccagggggacgaagcccagggacctacagtacgcccaccttcaggctgctctcccagaccctagggtgcctacagatgctcaggaaccaccccagccaggcagcctgagcatccagttcctgagtcctctgccctggcctcatgcctgaccctgtcctgttccagctcccccactactctccggtgcccactcctctccaccaggccataatttcaccaactctaggcagtcttaagttttcctctggctcaatttctggactcttcccctctccccttgcccacatgttctctgctacttgggctgagggcaaatggggaagaagcagagagcggtctaagaggatggagacaggcttaccctgcagatcctgactggcagatgtgaaaaagcaaaggaggagaagagccagggccccccgaagttcctgcgtctccatgcctctcagccggctcactacccctggcaggcaggcagctgggaggggaaaaggctaggcggagagagcaggagccggggggcggagggacagaattggagggggggccagcaggcgggtgagggggggctgaaacaaagagctgccaatcaccctggaggcatcatcagctctgggaaccaggggcactgggaaagaatcctggaggcctccctgctttctacctctccctaatgatcctcccccaggtgcctccctctccgcagtcatcattgttgggggtctcggcacacagcgctaccgaatgccactgttttctggaagccacgattgtggaaggcaagaacccctggcaggggcagtgctagacagtgggcattattccacagctggcaggaaaggatgccaagggagtggccgcaactagcttgctatagtgcccagggatgcccacatggcatgaattttgctgttctggcggagcaagtgctctttattagggtggggggtcccctgacaagtgcctgtttctccattttccctcattcgtaggaaagcttgggagtctggaagcgtctgacgggaactgaagggagaatctaaagcagtggtcagtgaggtcagagtgaagaaaccaaaaaagaggaaagggacaccagggacaggcgcagaagaccaggggtacaggcgaggagccaaggaccagactgtggaacactgtgggtactagcggacgggccgtgacccggatgaagcagaggggcgcctgagttcccgtcacctaagcgacagcctgcgagcctctcttcccctcccccacccaagccccagcccggcctccgctccggccgccgccaccgcccctgttttgtttccatggcgacaggcggcgcagggcccgctccaaacataacgcgctgtggaaaacatgctgctcgggggacccccccgcagtccccgctcggggacgagccccaaggggccctggagcagtacaggccacgtgcagtttggcaagagcccccagacctggcccaggcgcacaagaccccgctctccagagcctgccgcgccttcaggggttcggggctccacttggacgaggcgccgtgacactccgaggcgcgccgggccgacagcgctgtcccgctacgtgggccacctctggatgggccggcggccgccctcccccgaggcccgcggcccagtcccccgcagttcagctgccagtcgggccagaagaagcctcgcctccccggggatctccccaggccccctgaccgcaacgatcggaggggcggtggcggggggcgggcccaggcaggggagggcagaagcacacaaggaagtgtttccgggacagagggtgggcaagatggcggcgcccatggagctgttctgctggtcagggggctgggggctgccgtcagtggacctggacagcctggccgtgctggtgaggggtggcgccggcgccctctgctgtgccctgatgactggggagggggccgaactagccaagcatccaaaccttgccagggctactcagcacgggcgcagtgggggaaactgaggcagtcaaagagcgtacgtggccgatatggcctcagtgccctatgctgtagttttctaggcttaatgcagcaatgaaaagacgcctggttgggagttcaggtgatgggttctagtccttgctcatccattcactggctgtgtgaccttgcggagatcctttctctttgggcattttttttctccattcggaggtttactaggctggactgtctcagggacctactctagcttggaattcctgccttctcctcagcccccttctcctcttcctcctcacttaacagcatttactgaggctattgtttgttagaccaaacgactcacagccaggctttgtataaagagcttagcaatcagacttcctttgcttcatttattcattgactccttgctttaaagaggatctattagatttcttccaaatattaaacattgccaggcaaagatgaataaaatttggttcctcccttcgagtttacagaaaggcagataggtaagcaaataaatataataaaatattcacatataagttaaagtaggaacagaccacagatactgccaaagagaagggcattatcagtgcttccaagaagagggatactggttaggaaaagcttctgaggatagatgttcaccaggtagatggcaagagaggagatagaggaaaggattttcctggctgtcctgtaatcacagacatgtccggaatctctctgagccctgtgttgtccatttgtaaaatagaaatggtagtgactcccccttttttttcgagactaagatactaagtatagggaatggcacataaggtattcaataaatgttatttctcttcttgataccactgt

SEQ ID NO: 4181 - DNA, 6000 bp, Homo sapiens
tcttcagctataaaatggaatataatagcatctacttcattagatggtaaatgatcaatacatgtttgctattgctgttttcataaacaggtatttccattaatagaaacaaatcaaaagcaaagtgtgattgtttaaaaggttaggctatgttggctgggcacgagatggctcacgtccgtaatcccaacactttgggaggccaaggtgggcagattacctgaggtcaggagttcgagaccagcctgatcaacatggagaaaccctgtctctactaaaaatacaaaattagccgggcgtggtggcacacgcctgtgatcccagctactccagaggctgaggcaggacaatcacttgaacccggagacagaggttgcagtgagccgagatcactccccattgcactccagcctgggcaacaagagcgaaactccatctcaaaaaaaaaaaaaaaggttaggctacattaacaacaaactttgtgtcgaaacaaggaagataagagtcctactatcctctgcgctatgttacttcttggctttttgcttcaattctagttatcacattttaagggcattactgacctaaaccagagggtatcctctatgttcttttagtatctgtttgtaaacctcttttacggtacttatcagttttgtaatggtctctcatctttctctttctcatctccttcctccaaaactatcagcttttcgagaaatgggattatttcaactcatatccctaatatccagcagtatctgggtttttttttttgaaacaaggtcttgctctgtcacccaggctgcactgcagtggcacgaacatagttcgctgcagcctcgacctcctgggctcaagcaatgctcccacctcagcctcccaagtcattgggattacggtcccatccaagccactgcaccagttcagtatttgggtattgtagatactcaatgtatcactgagtattgatactcaatgtgtcactgaatattgtagatactcaatgaatgctccctgaataataaatgaaacagaggttaaacaacttattctgtgcagcatttgggccaaatgttaagcattatataaaaactgatagtggcttggtgcagtggctcacgcctgtaatcccaacactctgggaggccaaggcgggcggataacaaggtcaggagttcgagaccagcctggtcaatatggtgaaacgctgtctctactaaaaaatacaaaaattagccgggcatggtggtgggcacctgtagtcccagcttcttgggaggctgaggcaggagaatcgcttgaacccgggaggtggaggttgcagtgggccaagatcatgccactgcactccaccctgggcaacagagggagactctgtcaaaaaaaaaaaaaaaaaaaaaaaaaaaaggcatcttattacccaggaaaactttactgtcataaatagatccaataatagaataagccgccttgtgttagatcactggcaatgttcaagcgaagcctgaatgtccacttatcagagtactagatgaaagcctgaactagagaactgaaaaataaaagttatttgtaactctaagcgtctaaggttagatttctctttcttcttttctttctttctctctctctctctttctttccagagacaaggtctcgctctgttgcccagaccggagtgcagtggcaagatcctagttcactgcagcctcagactcctgggctccagtgaccctctggcctcggcctcccgagtagctaggactacaaggcacttgccaccaccctcaacgactttttttctttttttttttttgtagagacggggtctcgatttgttacccaggctggtctcaaactcctggcctcaagcgatcctcccgccccagcctcccaaagtgctaggattagaggcgtgagccaccgcgcccgacctacagttagttttaaacctcccttctgtttctccaagacattaggggagattctccatcccctcaatcaactgatgtaattaaaactcagtaactaaagctcaataaaacatgaagatttcgttgattcctgtgagagatggtggtgaccttataagaaatagaatgggagtagccagggcagctcttttatttcacagataattactgagatcaaaaaaaggggaaaaaaagaaaaagaaagaaagaaaaagaaggaaagaaagacagctacttcagctccaggcacctcaaacacagcagtagctcgacagaatccacttttttgggaacccaagtcggaccagcagggtgaatgaatgccaatgtggaggcagccccggcacggccctctcctaggaaaacattttcaaaaggggtcctaaccgcgcttccacctcggtgcccagggctggctccagtccccattcccaactagacactggacttcacgcccttaacttccgccacgcacccagcgcccaccctcagacccgaccttctcaacctggacatcgttcgtccaggtgtcccagctcccacctgcctcttcccaccccaccacacacaaacctgtaccctcaccagccggcctgattccacggaaacggctttggcaccaccggaagtcagccaacaacagcgaattgcgtgcgcgtccccgagcctcggagcgccgcgccgcagtgcatcaaggagcatgcgcctaacactatgcgccatcccattttagggcagagtgaagccacaacgttagtgcgtcagttattggcaaaaaaatttaaaggcactacttagctttctctgcccatggagttatcctactcaaaactgaggttaagattcagtggtttagattaacagctaatttgggggccaggcgcggtggctcacgcctgtaatcccggcaccttgggagacggaggcgggcggattacctgaggtcgggagttcgagatcaccctggctaacatggtgaaaccccgtctctactaaatatacaaaattagctgggcgtggtggcgcacgcctgtaatcccagctactccggaggctgaggcaggagaatcgcttgaacccgggagacggaggtggcagtgagccggcatcgtgccactgcactccaacctgagcgacagtgagactctgtatcaaaaaaaaaaaaagattaacaactaatttttctcactacgagtcacctggaacacaggaccaagggactgaagaagtcataaaatgccagaaaaagaagtctctaaattacaaatagtgcaggctcctgattaaaactaaggcactcttggactcaggctatagtaattattcatatatgtacaatattctgcattttacaaaatgctctcacattttcttaggtgacttggtctccacaatagactgtaagattattatatcatattccagtttgcacaggacaaagttctggctcatctgagtaggtgatttcacaacggtacacagacagctatcaaggagaatcaggtattaagtctcctaactctagctaataatgcattgacccagtgtccaggaggctgcctggggtgtaacagatgttcaataattcaatacgtgctttttgaatgagcgaatgaatgaatgacttctaaaatgatgttatttccacttttctagaaaaacaatgtctggaatccacggagattaaaaaaataataaaaaacagaatgtcaaaaggtggaaaaatactttcaaccccctcattttacaggtaaaccaccaacacaaatttatacatttgaactaatcctatctgtaaacagaatccaacggatgaaattatccacagccaaaatgaaggttgaaatttatgcaaacatggcagtagtctgactaacctgaatcacaccaactctcccaaataccaaggaagactccagaagctcggagtttcatgtgtgttgttctttgacctacagaatacacagatctttcggtttggcctctctcatacgaaaccctaagcacttgaggttcatgaaaaaaattcaacactgattaactttggcacttttcattagttgtttttttttttttttttaaacagctttgcataccacaatatccatctgttttacgtgtacaaccaaatttttttttttttttttttttcagacggagtcttgttctgttgcccaggctggagtgcagtggcgcgatctcggttcactgcaacctccacctcctgggctcaagcgatcctcgtgtctcagcctcccaagtagcgtgtgccaccacgcccggctaatctttgtatttttagtagagatgggggtttcaccatgctggccaggctggtctcgaactcctgacctcaagtgatctgcccgccttggcctcccaaaggtttgggattacaggcatgagccaccgtgcccggctgtttttttaaaattagtaaatgttcagagttgtgcaaccatccccaggtttggtctttcatcagagtttctgaggtttaagacagtttccatccactgtgaaatataagccaaaaaaaaaagttctgtaataacctttagcggtctcagaaatgcataatgatggcagtcgatactgaaatccaggcagtacagaattttattttcccaaaattctggaactcaggaccgagaacattttgctgctgtattaaagcccagaaaactgaaatcagaggatttcatataataatctacctatgcttcttacccttcagtactttctcgttttggaaccacagcgcgtcagtgggcgcggcctcattctcgggaaaactcggcggtgggaggagtcccctccgggagagcttcctgaagggggcgagggctgacttccgtaatctttcggaagaggcggagtcttcttccgaggaccattcggaagaggcggagtcttcttccgaggaccattcggaagaaggcggagcctacctctcatcaggaccagtctgactgcacctgcatccttagctcagcgcatccccggagcatcttaagagctgagcgcagctgacaactaggggccggaccgtcgcaggaggcgtccgctggataccttcccccttccctgacctagagctctacagctgctgcctcggtactgaccgagggttcccagagctgtctcaccattgcaaaaacgttatagcaacagcctctgattacgacatggctgagatcaccaatatccgacctagctttggtaagtagactcgggaaaactaagcttgaggtggtcagaatggttgcaaggccaagggggcccagcggcagggcagagaatgcagcccagaccagagccttcaaaatgccagccccactaaaatcgggcctgtggtggtgggtagtgggtagtgggcagttgacagtgcatgaacttgagctatgggctgcagggactggcagggcctgagccacaccgagggtggggaagtccaggatgctaaaaccttgtatggtgcactgtcagcactgctggaggtgagaaacagcaagcgtgcggaggatgtgaacccctccttctgggggaggagaggtggggtaggccaagccctcccccttggggcacacagggcggtgccccttcctccccctcccattcctaagggctgcgggggagggaagtgacaagggggatggggcatcaagatggcagcttggagactgtgggccgtgtggctggcagccaggggaggcggcggcctctggggaaagaggggtgcggggtggggagcaaaaaggaagccactccttaagccggtcagctggatgctggggctaggaggaaacgtgagccctgcaagctccattccgcatcgtaatggtggggtccctccgatgctaccaaatggcgcttggcgctgctgggctgggggatgacgtgatgtctatttctgggcctcctggcagcgccgacgctctccttccggggcctttgttccctgtttccctgggccgccttttcaaaaagggggactgaccagcgttgatgctggcgggggcgc

SEQ ID NO: 4182 - DNA, 6000 bp, Homo sapiens; identical to SEQ ID NO: 3187

SEQ ID NO: 4183 - DNA, 6000 bp, Homo sapiens
agccatgctgctcccaggcaggttaaaaagccattattttatggatgtgaggcagggagggtaaatgctctgcccagcatcacacagcaggctacaggcaaccaagcctgggatctagggcccttcgccccagactcatggtgccttttctagtcccctgccagctgacagagaggccagcctggaaggggctttttcttttttcttttttttttttttttttgagatggagtttcgctctttttgcccaggctggagtgcaatggcatgatctcggctcactacaacctccgcctcctgggttcaagtgattctcctgcctcagcctcccgagtagctggtactgcaggcatgcgccaccatgcccggctaattttgtatttttagtagagatggggtttctccaggttggccaggctggtctcgaactcctgacctcaggtgatccgccagcctcagcctcccaaaatgctgggattacaggcgtgagccaccgcacccagccggaaggggctttttcaactcctcattttgccaacaaagttagggcccagtagagacataagggagctctagtaacaaggctgtttaggatcagggctgggagagggcacaggcttggctctcaaaaaggctccatacaaaccgctgcctgcctgtgctcctccccgaatgggaaagaatccggctgtcttctttccctatgtccatctagtctagacccttggaaagtcctgtctgaagtctgctctctacagcacaaaccttccccttttaatacatctcagagggtgttagccacagaaggcttctgggggagccaccttcttctcaggcagcttaggaaggagaggcagaacctgaacctggcagtggaccccctccctcagaagtcaggatactgtaaatagaagagggctccttggggttcttaacagagtctgtcccttggcttatttgcatagttgcatagatatttgtgggctcattcgtgtcctcattggcaaactgaatttgcatggggttgggctgcggtccagctgtgtcgccccggcatatacacagttcccggggtagagggaaacccagaggaactggttgtaaagaggaatgggccccagctgaccccctgaacccaggtggtgacatgtgcacggtggtgcctgctgaaggtgggcaagggagctgagcagggaccgggggctactgtacctccttttcacctcctcccgcatctggagcccctcctcctccacatgtgcgaatccaggagccacagaaggtggggcgcagtgggacatgggtaggaggaggaagaatatggggagattctagtccctcccacttagagatgcggtcgccatggtgactgaggaccagtgaggcgggatggggttgagaatgggggtgggggtgtggcaggggctgaggcactgagagaccggaaagcctggcattccagagggagggaaacgcagcggcatccccaggctccaggtaagggagcgggggagctgacagttctgaagggagggggcggggccattgtctggtgctggctctgccctaaagagggggctgacagaggggtcgggctattgtgtgtgatactcagcgcagccttccagagctagtcagactggaggaggggacctgggaagctctgggtaaggggttaggagggactgagctggtgggtggcaaaaaggctgggagacagtggggatgggaagaggtggagggacacagggggcgtagaggcttggggacgtccctagtgcctatacacgctaggcactcaatacatataagttgacttgacttgcctgtgaccataacaagagggcagatgagggccagggcaggtggagctaaggcagggaagtcaggaggcaatgttccccagaactggactcttctgtgggctgcccctgaagctgaaagggaggaggtgggggaaactggacctgccagatcactcgtgaagccaggagttgcttctctcctggctccaggagctgctcctttagtgcagcatccgtgttctgcaggggctcagaagagactgagcgtctggggctggttgaagctcagaggtagcatagagtcggggcgggaagcaacctctccatctcccctcccacctccacatctagacctttcctctgcacaatagaacctggcaggaaggggctacatcgcatgctgtgtaagggttgcaggggaggagctggactctggcagggcagagggtgcactcagtgttgttgtcatggcaggacccagggctgggctccagggcttgtggagaaatgggctgggggaaaccccagattggagctgtgaaaatgacacggcccctgtgggcaggtccctgaacatctgaccccttcccactgccaccccacctgacctgctgcctgacaccattcccagccaaggtacttctgctccttggccttggtttcctcatttgtacggttgtcaggaagggtatgtctgagtaccctgtcagccctgagcttctttgatgctgtgtgcaggacctgctatattatttgtggggcccagtgcaaaataaaaatgtagagccccttgtttaagtattatgaggactttcaacagagcaacagcagagcattaaaccaagtgtggcccttctgagcacagggccctgtgtggctgcacaggtctcgtgcccacgaagccagcactggctggggccctgccagctgaagcaggggagatggcagtggggcttggggtctgaccccagagactggtgtgaggggtgcactgctgggggcagggtgcccttcctattgctgtttttgaccaggaggcccttgcagaggcagggggtggtacctcacagccttccttcaagaaggtttctgttccctctgaaacgctttattgacacaaataagcttgcccataagggccacgcttggggctgggcacagtgtctcacgcctgtaatcctagcagttttggagtctgagtcaggcggatcacttgaggtcaggagtttgagagcagcctagccagcatggtgaaaccccatctctactaaaaatacaaaaaaaattagccgggcttggtggcacatgcctgtagtctcagctacctgggaggctgaggcaggagaatggcttgaacccgggaggtggaggttgcagtgagccgagatcgcaccaccacactccagcctaggcaacaacagagcaacacttcgtctcaaaaaaaaaaaaaaaaaaaaaaaaaagcccactcttggtttaatgctgtgcggttgccctgttgaaagtcctcagaaatcaccccagagatctgatttcttagcctagagtagataaagctcactaccctcccagcccacccttgccttctctatccaagtggctcagaactgtggactggggcaggagggaggactgagggactaggactctgtagagtctttgtagctaagagatttgctattgaatgaggcagatctgaatttaacttggcttctagctgtgtaacctcccttcttgatctgtaaaatgggattatggcagtacctagctgctaaaattgttgggagggctaaagcctgatagtgtgaactattcatattggctagaggggctggggaagaggacgtccggagttgggagaattctggatgtctggaggaagaactgggggcagggcatggagtctatgacttccagaaaggtgggaataggacatcaggctgggagtgtagggctggaactcccccagcctccccgtatcagaactcttcccagtgacccaaatgagccaatctgtttaagcagagaggcccaggggcagactggcttcccaaatctgagctgggggttggggagacacagaaggtagggtctggataaatgggagtttctcttgattctaagaaactggaagggacctggcaaccagcctctgggagagtctgggggagtcctaggcaagtcttgacagaaacgattgtcaggcaggatatgtctgagaccaacccccggggaaactgagagagatgaaagaaggctgagtacctcagatgaggaattataaggagtagcctgagctgtaacatcccccatgttggctggtgctgtagcaggagggatggaagttacactacaggaaggacttcctgccagggaggaatgtgcatgtcagatggaagtggattatttattagagttggattagccctgggatgtctgtgctctttaacctgcagtcagctgaccatgtcgagtgggcaggaacctacccactttgtaggccacagagttcttggcgctggatgcctcattaaccccgcgttatgaggctccccctggagcctttagggaggggtgagcagccacctttgggggttgggtgcctccaaagtgtggtccagtgagcacgagttcagatgggaaatgttctgggctttctactggcctgatttctgggcttcctattggcctgatgtcaaagagtgatggagattagactgcaagggggacttcctcagcaaaatcatggataagagcctaatacaattattttattttatttttttaaagactgtggcccagctgagagtgggaggtttaaaggttagaccactgcagggacttcccagtaggtaggagtagagagaccccaccttgtgggtaagtgaaaagaagaatatgtcatgtcccctatctgggaaatcttaagcaagagaagaaaccactgctaggctggttatactggctgtgacatgatggagaggcaggggaatcgctgaaatgacctagaagggcctcttaaactttctggttggaccgagcagaggagggagagagaggtgtgtctcttgtgaggtgggtgaacgtctttttattccctcccaatccaccaacttccgcccaagccaggatctgtcacaactcgagaggtggaaattccggtttccctggcctagagctcccagtgctggctttggcatgatgggcacctggagggccgcactcccgttccagccaggctgagccttctgtcccctgcctctggggcctgggaaccccccttcttctttctcctgaatggcacccccgccctagaatccagacaccgagtttcccactgtggctggttcaagggtatgtgaggtgagatgggtggcttggggtgggtggtcttggggaagattatgtagaggcccagggaggcagacacaggagcaagagacaagggggccggggagctgcagaggctgggagccggccagccacccctgcccaggcagctccccgggaaatgctgataaccaacctggtgggatggaccctcattgcctccctggaagtatcaggccaggcaggcctgagcctcaaagaccctgaacccagctggggctgggggagaggttagagcaggcagactcaaacccagtctgcctacctgggtcagagctgagtatgaggcacaggtgtcaacagatctgaaagtgacaggagagtaaggtctgaggaatttatattttgggtacaggaacctgctccccaaaatgttccctgcccagagccaggcaacggtttgggcttgggctatgagaagagggaaggcaaaggaggaaagacaggaaagacttcctgagagtaaggcaaaaaaaggcaaaccagagctgttggtgagaagacaacagaagaagcaggataggggagacctgggctcctacccataggggacagtgaggtgacaggctgaggcctggaaggatgatgaaagtgagaccgtcttagggcccttccagatagggaaccttctctgccccaatgccccacccctgccaccaatacacacgcttctgctgcctggggctctcctattggtcctcggggggatgtggtaagaactgctcacccagaaagtgcccgggtgcctgtttccccagagctccctggtgacagtctgtggctgagcatggccctcccagccctg

SEQ ID NO: 4184 - DNA, 6000 bp, Homo sapiens
atttggaaatcccaagtgggcaccaatgacttactgacttactgaccgcacagtctcttcaccttcgttttcgagggttccattgcaatccattgcagcacttctcacatggggcaccacctgctaagtctgtccctcagactctagcccagcgatgaatgaaaggagtactcagacataggtatccagtgaaagagcgggatagggaactaccagcactaggggccgaagagagttcgcagccccactaagctggtgacactcacatttatttagtacagatttaatgacaaaggcttggggcaaacacaatttgtgggtaataaacattgtcacccccccaagtagagaccagtcctgtgtgtgaatgatcaaaggtttgtttctggagacaggagtaaacaaatttatctaggttagttcctttatattcccttgttatctaccctttgctctcaggctccgaataagagaatttggctgccttcagccaaattttctttcgaagctttgcaaaacctcccagccttccaagaacgtttgtgtctttccctgtaatttctcccatcaccctgaccgctctcctacaatatataaaatttataatatataaaaagtattataaataatgtgtaaaatatgtatatatagaaaatatattctatatacagagcatttatatacatatatacagtttttctttttctttttttgagacagagtctcattttatcacccaagctggagtgcagtggcatgatctcagctcactgcaacctctgcctcccatgttcaagcaattctcgtgtctcagcctctcaagtagctgagattacaggtgcacgccaccacgcccagctaatttttgtatttttagtagagacagggtttcgccatgatggccaggatggtcttgaactcccgacctcaagtgatctgtccatcttggcctcccaaagtgctgggattacaggcatgagccactgcgcctggcctgcatatttcttttttcttttttcaaggaactggctatttgattgtaggagctggcaagtctgaaatctgtagggcaggcctgcaggctgggaactctggggacagcaggtgatgttacagtcttaatgcagaatttcttcctcggggaaaccttggttttgctcttcaggcttttcaaatgattagatgagacccacccacattattgaggcaatctcctttacttatagtcaacggactagatgttaactgtgccagcaaaataacctttatagcaacatctagattagtggggtttttgtttgttttttgagacagagtctccttctattgcccagactagagtacagtggcgcaatctgggctcactgcaacctctactctcaggttcaagtgattctcatgcctcagcctctcaagtagctgggactacaggcacgtgccactacacccggctaatttttgtatttttttctttttagtagagacagggtttccccatgttggccaggctggtctcaaactcctgatctcaagtgatccacccgcctctgcctcccaaagtgctgagattacaggtgtgagccaccatgcctggcctatattagtgtttgattgaataaaaaggtagtataacctagccatgttgatagaaaactaaccatcacactaagattgaaatgtccattagatattttaaggcagttataaataagtctggagtttagaaggagggacccatcctagaaatatcaatttttaaaaatagtaggcccagcacagtagctcatgcctgtaatcccagcactttgggaggccaaggcaggtggatcacctgaggtcaggagtttgagaccagcctggccaacatggtgaaaccccatctctactaaaaatacaaacaattagccgggcacggtggctggtgtctataatcccagctacttgggaggctgaggcaggagaatcacttgaacccatgaggcagagattgcagtgagccaagatcatgccactgcgctccggcctgggagacagagtgagactctgtctccaaaaaaataaataaataaaaataaaaatagtaaaatacacacaacataaagtttactattaataacattaatacatacacagtattgtgcaaccatcaccactacctagttctagaacattttcattgcccaaaaggaaaccctgaacccattagttactttccatcctctccctcaatctccagacttccggcaatcacttatccactaatctgctttttgtctctattgatttgtctattctggttatttcaaataaataggattacctaatatgtggcctttgtatctggtttatatcacttagcttaatggtttcaaggttcatctatgttgtagcatacattcattcctttttattgcttaatactattccactgtgtaaatataccacattttgtttacccattcatgggttgatggacatttgggttgtttctacttttggcaattgtgaatagtgctgctaaaaataaacatttgtgtatgagtttttgtttgaatacctgtttacagttgtattgggtatatacccaggagtaaaattgctgaatcatatgctaattttatgtttagcttattgaggaactgccactgttttccacagcaactgtagcatgttacattcccaccagcaagatccgagggttccaatttctccacatccttaccaacgctcattttcggctttttgtttgttttaattttagccaccctagtgggtgtgaagtggcattttatcaacttggttatgatttgcatttccttaatgactaatgatgttgagcatcttttcatgtgcttcttggccatttgtatatcttctttggggaaaggtctattcaagtcttttgcccatttttctttccttttatttcttttatttcacctgtgactatagacaggctccaaagaggagttttccagtctctttcctgggtttaatggagacttaccttacccttctgtgttattttttaatttggttgtgtgggcggcaagccacccaggtgccgacacaagagaccgaggacatgagctgttccagtataataaaatataaaagaagaatagttataccagatatagatcttagatatgattatatatatcattaatcagtagtttgtagcaattactctttattccaatattataataatcctcgctctataatcataacctaggaaaaaccaggccatacagagataggagctgaggagacatagtgagaagtgaccagaaaacaagagtgtgagccttctgttatgcccagacagggccaccaaagggctccttggtctagcggtaatgccagcgtctgggaagatgccccttgccaagcggaccgtggtctagcagtagcggaccgggaaagggagtcttcctttccccgggggagtttagagaagactctactcctccacctcttgtggaaggcctgacattagtcaggcccgcccgcggttatccggaggcctaaccgtctccctgtgatgctgtgcttcagtggtcacgctcctagtctgccttgatgttccatcttgtacacctggctctgccttttagttagcagtagcaaattagcgaaaatactaaaaatctctgataagcagaaataatagtgtaagctgtttctctctttctcctctctctctctctgcctcggctgccaggcaggaaagggccccctgtccagtggacacgtgacccatgtggccttacctatcattggagatggctcacactccttatcctgcccctttgtctcgtatccaataaatatcagcgcagcctggcattcggggccactaccggtctccgcgtcttggtggtagtggtcccccgggcccagcggtcttttatctctttgtcttgtgtctctatttctacactctctcgtctccgcacacgaggagaaaacccactaaccctgtcatttttctccaccttaatgtcatttttctccaccttcaggttgtcccccattgctgcagttttttgagttcccaaacttcaaaattggctatgtatcctcagtgattcctgctgcatgttgtcctctactattttggctctataaataatgagaaatgtggcaagcgcagtggctcacgcctgtcatcccaccgcttcgggagactgagtccgcagcatcgcttgagcccaggagttcaggttacaatgagctatgatcttgccactgcactatagcctgggcgatagagtagtattttgactctaaaaaacaaaaaagaggaaagaagaaaaagttatacaaaaatcacacattagatttgttcttttttttttctttttgagacagtctcgctctgtcgccgtccagtggcacgatctcggctcactacaacctccgggttcaagcgattctcgtgcctcagccacccggctagctgggattacaggcgcgcgccattactcccggctaatttatttcgtatttttagtggagacggggtttcgccaaggcggccaggctggtctcgaacttcggacttcaggtgatccgtccgactcggcgtcccagaattctgagattacaggcgtgagccaccgtgcccggccttgatttgaatataaaggttccaacactcccaaacacaaggtgaccccatttacaactggatcttcaataagcgtctggtgattcaatttccgccaattagaaagagcccaaccagaacacgcaggcgccttaacgctgagggcataacgaaggtaaagaaggcgtggctactgcccaaatccaagatggctaccaggaggccgtcagttctcggaagtgcggcacatcctcactcctgggaggctcaaaggctcaaacgccattggcagaatccccgacagctcatcctccgccccctgcagggggcggtaatgacagagtcctaatttccggttccggcagtaccggtagcccagtcgagatggaggaagatgcgaccggcagacggcattcgctgggaacgacggatagactgggggctgcggcctagaggtccgggcttggagttcgcctcagacgcggtggagccgccggagtctgagaaggtaagaagccgccggcttgaggtccctgacaactaaggtctctgaggatctgcacttgtcagggaggcaaaggatgcctggggtgtcaggctgcggtaccatgcagttttgggaatgaaggacaactgcggtgaggcgtctcttcctggcagaggatcgtgagattcgctgacagcgaagaagcacggcaaggggcatgttcgaagacccagagttgggtgtgcgggggccaggacagaggctgcataaagggggtgtcccacggagtatcttgagaggattgtcatgtggtgtctgtgatgagggatcacgtgggtacctatggaagaccaaaggaaagctgggtgggaatctcaccatgtccgaggtagggaggagatgatctcgaaggagggttcggaggcatccccaggcattcccctagggaaatgtatattcagtaggacaggtgggcaagcatgtacatatattcacgttcatgtggtagatagctcccaggatgcagatgcaatagggagaacagaaggaatggaggatgttggtctctattccctgtttccagctgagaaatggggacccatgggtgtcttgtcaggagttgtagaagatgatttgatttgaaaagatctgattattataaaagtttggttcttattcagcaggtctagggtgcaccctgaaattctgtatttctaacaggctcccacgtgatgtccatgatgccagtctgtggaccaccttgggtggcaaggacttagagcatcactgtccagtagaactttctgtaatgataatgctttgctgttaacaaaatgccttcacaattcttaactcatatgagttgtactacagctctatttttttttttttttttgag

SEQ ID NO: 4185 - DNA, 6000 bp, Homo sapiens
taaatagtgtgttataataatgctcaaaataatgccaacattaaaattaatccatggctccttttgcccttagagagctggagacatatagtcaaaatgttgagttttataatcacttgaaataatttttttttttttgaaacagagtctcactctgtctcccaggctggagtgcagtagcacaatcttggctcactgcgacctccgcctcccaggttcaagggatcctcatgcctctgctgctccagtagctgggattataggtgtgcactaccacacacagctaatttttgtatttttagtagagatggcatttcaccttgttggccaggctggcctcgaacccctgacctcaggcgatccgcccatctctgcctccctaagtgctgggattacaggcttgagcctggccgaaagaaaattcttctatgtagttttgctccaacttcatatatagttaggtacatttgttacaatttgttttatacttttagggattgcttcatttttcttcattttaatttaattaaaattaatgtaaactctctctaattaatttcgtattttaattatataaaatatttacatggctccaacatcaaaaccatacaacaaggggttattaccattttacaggtgaagaaactgaagcacagggagattagtacctgccccaacatcacagacaaatgagtggtccttccccataggaggctgggagaggcactacaggcagccttctggtgggacctcaagaggtaaattcagatgtactcgggctccagccctccagttcctcccgctgttctttgtgcaacaagctgatggtctcctctgaacacatgggtttgcaaccctcaaagcgcggtctgaccagctcatggggacgctggctcctgctggtgcagcaggggggctctctgatgatgctgttcagcctgtagtccccattgctgtctccctactgctccacatcccctcccactccacactccctgtctgcggcagcaagagccctcagagccacactcagccatttctgccccccaccccctcctgcctgggctggggtcccgtgcttcctggcctctttcagaagctatcaaagcccccattctctgaacacagctgtgccagcattcagagccacatccccctcttcagccctactcccacatgcctatggcacaagacccagatgcccgtgcagggcctcggagaggaactcagctgcctaggcccccactccaagtctgggagaaagggggcaggtgttcaaggaggttggcaggacaggctctcccagtggccactgtggaatagaatccagtgaggaaggcccaaggctaacactggagatggggggaactcaggatgcaggagcgtggagggcagattctcttttctcaacttgggtcatggcctcagctttggcatggatgggggatgttgggggtccggtggaggcaggagattgattgttctcatccagagaggctggaaaattccccagggcccaggagactgggaggcagccagctgggctgcacgtgggagagggaggagagctgcccacgctctccctctctctctttcttctctccacctccctctttctccctcccctgatagacatctggggagccctggcaagaaccttggcctgggagtcaggagacttgatttttggtcatggttcagccagttccatgctgtgtgactctggacagttgcttgacctctttgggtctcagtttccgtgttcagaagatattcaaggttactggaggaatttttctcctgttactgagacaggaggttctacctgaaatctgactttcattcttcccgctgccattgattctgtttgctttcagccaatccccagggatctctttctgagatctggaggggctaggcagagcccctcctctggagggggttcttgcctctggaggaggctgattcttgcctcctctcagaaagtaaatagaaacgggggaagacacatatggccaagtgtccgtaattgtaaagagagtctctgatcagcaattgctggttcaaactgcaggttagccttcagtataaattttctcagctggaaatgttggaaaagcctcagagtgcccatttcctcccctgagaaatcctctggaaaggtctctactcccaaataatgagctctccagggcagtggtcctctgacctcctggccaggagatctgggcagattaggttgctgtgtgtgtgcgcaagtgtgtgtgactgggaaaggaaaagaactagattttgctaagcccgagtcatgggccaggggtttcccttgcctagaacaggtacagtagatattgcccagtgcagtagatattattcagcccactgttcagaagagagagtttcagaggaggaacggggccctttctgaggtttgccactgcaaatgacaaaacaggaatttgacctcagtgcctgtgatgccagagtcctcgtctgcgcaacagcagctgtctgttctctcaccacgtctggtctcccaccagggatctgctttttggaacagactgtctggtaccagcccttgtccagacccaggtgctgctggcctcagtcaagggtggattcccccagggcaccgaagtgagtgccaatccttctggtcatgaggagaggtggtaaggaaggtcactttctctgccttctctggtcacagccaggtttccctgaggcaagaactgtggttacatctgagccaccactgggattaaatttcagccgcttggttgcctggctcagcctggctggcctcaagccctgtagagccagtgtggaggtaggctggacacatgcatccatgctgagactgtcctgaggaaggggggttttcttgcagctctgaaatgcaacttctaaggggagcaaaaagacatcctaaggctgcccagatctgtccccgaaggccttctcagatccgctctttctactagaagaattggaactgcatttccaggcctcgagcagttcctggtccacagctggaattcaattcaactcatattggtctaacgaagtaaatagatcgaggtcccttcctccccagactgtcccaggcaccttcctctgtccccttcagtcttgcatcctttctggggcatttttcttttcttttcttttcttttcttttttttttttttttttttgagagggagcctcactctatcacccaggatataatgcagtggcacgatctcagctcactgcaacctccacttcccaggttcaagcaatcctccctgcctcagcctcccaagtagctgggattacaggtgtccaccaccacaccggctaatttttgtatttttttagtagagatggggtttcgctatgttcactaggctggtcttgaactcccgacttcaggtgatccgcccaccttggccttccaatgctgggattataggcatgagacaccgcacctggctggcatttttcttggtaaggaaatttaccatctacccctccctaccccccaggtcttcttttcctgtccctacagtagatgggtctctgggaaggggccagaatcttccctttagaccctcaaagatttggagtgggtttttatgtgaggttctcaaagccctttggaaccaagtccatggcactgggagtgaaagccaggcagtggtgagtgggggcgttggcacattcagtggggagcagtccagagttcccaagagggacctagggtgcagtctagatggaaggctggggatctgccttgaggttgcatttgcattgaatgcaccttactttacttggggtattttgaagatgctgtggagattatgaggatcaaagccctccaaagctatccttggtgccaatattggtatccaggggagggaatctaggcatctggctgtcctgcccactgtccgtgccaggggctttgcctacagtcccaggagggaggagggaaaagcaaagagagcctgggaaaggagagggaagcagaggccctggagctgggggaaaggagggtcattggtattctgggcgctgaggagttcctggctgggcagcactcaaggcccaccccctggcatcaggctgcacattcagcatcgacagccctggccagtaggccttctgggctcccagcaacgcctgcattttgcacattggtttgcatgactggtaatgtcccttcacagggccaccctcaccccacccccaccccaggtctagagatttcctgaattgctttgcttaacccatgattctgctgtctaacctccatccttccagctgcaaagtcagctcctcctctgtgcagggagtgggagcaccacaggagccaatgcccaatcatagctgcctccagggaggtagctacggtcctttgcaccccattctgcctccagaaaagagttttccattttttttattagaaagggtgtctcttttcaggagcaaagcccccattctcccttcatccacttcttacagtctaattgactccctcctccttcttctttgaacaacgagaagactctccagttgtccaacttccacccctccagctgcaacatcgtcatcctttagctcagcgaacgctgggcgaacgctccctccccgcccctcctgcccctcctccctactccaagccctcggcttctcatccgctgaacgatgtcctacttcgctcgtccttgctctcgccgctgctgccggagccgaagcagagaaggcagcgggtcccgtgaccgtcccgagagccccgcgctcccgaccagggggcgggggcggccccggggagggcggggcaggggcggggggaagaaagggggttttgtgctgcgccgggagggccggcgccctcttccgaatgtcctgcggccccagcctctcctcacgctcgcgcagtctccgccgcagtctcagctgcagctgcaggactgagccgtgcacccggaggagacccccggaggaggcgacaaacttcgcagtgccgcgacccaaccccagccctgggtaggtgagtgcctccgcagccccgccgcccgccgtggggtcggggacagggagaagggagtgcctgcctggtctgcgccccccgcctgtcagcccttgcctcgaggctctggggcacccaactcgtcgactcctgacaccgcagcggggtaggctgctggacagccccgagcgcctgcagctgctgctgccatctctgatctacatgcttccagctctgccagtggcagcccccctgctgctcgcagtctgatcagcaacccctcgggtcctcgcatcttccctgctgcgcgctcctgtcccagcgcggccgccgagatttccgaccttgtcccaggcagggcggtagcgttccggatcagtccttgcctccgtgcccccacgcacaggcagctccaggagcagcggccagcaacccttctggggacaccttactgtagtccggcaggacagccgatcagagccgctctagggggtggtcggagtgcccatttcggctggaatcccaactcggctccttgctctgtgaccttggggtagttagttgacttctctgaacctcgggttcctcatcggtgtaatgagcaaaacataaacaatctttttctcacagttgaggttatccacaggaagcatttaggagaactggctcaggtagacatcagtaactattagctggaattcggttaccactattgcattccttcctagcactgccaggggcctgggaattccctctcccaggtatttccatatcctgtcaggtattcccccacctattggaatagctctgcctacatggttctaataggaccaagagattggcgtcaagtccaaggggcaccattattatctgcattacttagattgcagatgatgacagtaagatcagggaacagtgttacccttagacccacccacagtattaccagtgcctatgttgctatggctaactttgctatt

SEQ ID NO: 4186 - DNA, 6000 bp, Homo sapiens
cttccttggaatatcttctttgctctgcacagatgtcagagagggtgaacaactatcatttcaactgctgagacccctgttccttggcaagatatcaagcataggtggcaaaactgagatgaggaaacgccagtccccaggcccagaattcttcttcactttttttacagggccagatactctttacagagaggccagcctagctggacccaggctcaaggccccctggccactaaggagaggtctggggtacttagactgatgctgtctttcctcttgccccactctcccctcagattgcagattaaagactttttccactgccatatggcggtcccctgcccctgccctttttcttgtacatctcaaaagctgggcaacttaaggaaaaggagcagaagagaaataaactggtataatagcaggaaatctcaaggctgaatatctggaaggacttatgcagtacctgggctgtgagatacaaaagtggagaagggatgaagagccccctttgctgggaggactttggaagaaggggtacatctctcactctcactgctctgggctatagtctgcagcaggggaagagacaaggtgacctctggtgatcccttgcccttggggactcaaggtttcctttaaggtcaggattattttccaagctgagaataaggatctcaccctttctctcctctgtctctggtaagcagcagggacacaatactccacctctctaggggggaaaaggacaatttatagaattgttctgctgttcttagccctcattgagacaaagaattcatttctgtctctcaaggtggcttctcctgcttatggtcataaattgccttcctgctcactccctgacctcttgatctttttgcttttgtgctaaaaaaaattattaatatttctcttaactccatatataacctttggctgtttctctcctttattctaggtgaagtagcatccttagggattacttcctccgccttcgcgcctgcctgcttctgttggggcagggctctgtgcatgaggatgaagacaaatctacaggaggaagattcaaaagatctctgtttggggaagctctaaaactgaaaaataatcacagctaacatttactgagcatatgctgcatgcctagtattgttctaagggctgtatggatatgaactcaatcctcacaactaccccataatgtaactactattattatccctgttttcatatgaaaaaaacaagaactagagaggttagctacataaaatgtccaaggtcacacagaaaggaagggaaagaacctagatttgaatccctgtctggtttcagggcccatgtgctttgctgtcaactactctgcaaggtacctctctgatagggagggacttacccagctttcgctctaccctcagggagctccagaatggtgtgacatgcatattccttgcccctcaagaatccccaagtttgataggggaggcagatatcctgtcctaggaagatatgtccagtctgatggaaaagacacaagctttatctttggatcatctgactaatactagggactcagccccaggatgtctacagtttgatgagttatgttattagattctaagagactcagttaattcgactagacaaaattgtgagccttagtgttaaagagacgaggatggagcaaagttagggcagcttaattggggttgccccaggaggggagggtgatacaagattggcaataagcagaagaaatgctagtggagataagagggcaggacacttgtgtggtgtgcagacttgctgaagacaatgtctggaaagcaggggtttgcttagtttagcagctctctaccttggctgtctactagaatcacctggagctatgtctaaaaatactgatgcttgaacttcaccccagaacaattaatctttagggatgagggcatggcactggtgtttttaaacagccctcagggcagggcatggtggctcatgcctgtaaccacagcactttgggaggctgaggcgggtggatcacctgagatcaggagttcgagaccagcttggccaacatggcgaaatgctgtctctactaaaaatacaaaaactacccaggcatggtggcacacacctgtaatcccagctacttgggaggctgtggcaggagaatcacttgaacccgggaggcggaggttacagtgagctgagatcatgccacggcactccagcccaggtgacagatctaaactccatctcaaaaaattaaaaaataataataataaaattaaaggccctcaggaggtgctatgcacaactggtgttgaggaccactggctggggatgaggtctatggtgtcttaagctctgagatctgggatgctggatgacttatgtggaagaaattctagagacatgagtttgctatgaactgagctggtgaagatttggaattaaaggaaagggggagggaaaagaaaagctaaaggaccagaggagacaggccagattgttgttttcgctgttagtgagctagagaaacttggttcctctgtttctaggcttttgaggcaaaataaaaggcccacaaaaatccaaaaggtctgataacccagtcccttctcataaaaagaatagctatcaagcctgatatcagacatggagattaggcaggaaacactgagctaagaatattcccttccttcgattaaagacctttttttttaaattaatgctctcctaggccgagtgtggtggctcacacctgtaaccccagtactttgggaggccgaggcaggcaaatcacttgaggtcagcagttcaagaccagcctggccaacatggtgaaaccccatctctactaaaaatacagaaattagctgggcatggtggcgggtgcctgtaatcccagctactcaagaggctgaggcaggagaatcgcttgaacccaggagatggaggttgcagtgagccaagatcatgccactacactccagcctgggtgacagagtgcaactccttcaaaaaaaaaaaagaaagaaaagaaaagaaaagaaaacacacacacaccaaaaataatactttcctaagtcagggtcaccctcgccttcccctccatacaccatcatgtggagtggaaaggagaaaaggctgtctcgctgacatgtccggagctccctacctcagggtttttgcctttgctgctaccatcttcctgctgcattcttccctcagacgcctgagcagctaaaccctcagttccttcaggtctgtgcccaaatgtggctgtagcagaacagctttctttgattacctgtaagaacagtaattcctccctctctccctctccctaatcttttatcctgctttatttgtcccccatagcatttaccataacctagtatatttcatatttttttctactgcctctgactttcctccagaatggaacattaaagggaaagactttgtccttttttttttattattattgtctccccaaagcctagaatggtgactggaaaatagcagtctggagctgaaaaaatatctgtggaatgtatgattaatgaatgaacaaatgaaaagccttatgtgtctgtgtgttggtgtctttctgtgtacgtttgggattgcagtcctatttctctggccaaagtatggctctattcttaagctgtgcttgcctgtgttttggaatatatgaagaattctctgggtctgtgcatatggggcttctgcatatgagcttgggtgttttcctgcctttctctgtcttctaattgtgtgtggatgcgtctggaccacaggctggtgttagtatctgcggaggaaagaggagctgtggccgctacacatcaacagagggcaccagagagccacgcacctactttcaggggcagaaattgagaaaacttggcggggagtgttagagacccaggagatctgggatctgggaggaaagaagtggagacctctttggaccaacacattactgtaaaattgtgcaattccagcaacttctctgtccattccctagggtccagacctctggctacccgagcaatcctgtgagcagaagtatctggtcaggggtgagaagaggagctggttgccaaactgggcccttaagaaagtggagatccctcctgaatgctctcatgattctcaggaattcccttccttcctagttcctccatgtccctaccccaaaagatctcaaactccagcgtgcttagagatctgactggtggctgtcttctcctctggcttgcattcagggaggtgaggccaggtcttggcccttcaaagccatccagttggctaccttctccttcgggatgggtggaaggctaagatgaacaaaggaagggtcaactgtgcctcttccaggccgctgagtcctccaacgcctagctgtgctcaaccttgactgggtgaagccaaggcagggcctcaaggcaggtccaagaggcagctcccattctccagttctgggttttataggtggggagaggcatgtatgcccctcccttatccaagcattcattagtcaattgagaattcttaatttggggaatctaggggctagactttgggtgtggaatttaaaaagaaaggtctttatgtttatttaactccctgccccccaccccactcctagacacacacacggaaacacacacacacacacacacacacacacactccccatcacatcctctgagctagaggctgatgtccctcagcccatgttcctcctccactgcttagttccatagcccgcgaccaagattgcgtctataaataggagggggtggggtggccaggggtcccgtcgtgcctgccccagaacccacgacggtcacatttttcacccccttttgcctttgccctcaattcctttccctctttgctctccttccatctcagttccagcgaggggggtatgtgtgtgcgcgcgttgtgggggggcagggggagggctcgtggagggaggcgccgtcggagggagagtagacgtcaggcggagggagggaggcaggcaggcagggaggcagggagggagagagggaaggaagagaaggggagagaaagggggagcaaagaccgaaagagacccagagagatacagcttgagaggagaaataattaaagggggagggcgaccaggaggagaaaaaggtctgggaggaaagagagataaagagaatcggagggcagggaaatgagtttgtgcgcgtgagtgtgcgcgcgcgcgtgtgtgtgtgcaggggcgggcgcgggcgggcggggggcgggctcccgggctcccgggctcccctcctccccagcccgctcctctggctcgctcgccaactccgggccccagccgcgggcgggcgcacggcgggcggacagcatgctgagcctcctcgtctggatcctcactctctccgatactttctcccaaggtaagggcccccagcccacccccggacgctcggcttccccccggggccggggcactgcttccccggtgggagagtgctggagtgccccgcggcccgcggccagtccccgggtccggacgccacgaggcgggggctcggtccgggcgcagagccctgggggagggggcgcggagtaacgaggggctggggagaatgagtttgccgttgatttgcccaagttgtttcctctggctgcgcgggagaaccgagcaatggggccgcgagggctggaggtccgagtaaaacggggaaccgaacgctttctcttgagcttctggcagccctaccgaccctcgccctctgaggccggggttccggacgcctgagtccagcctaagggcaaggctgggaagagggtgggatttcggatttcgggcgagggggtgagcgaaaagctgggtcccacctcccgaagatgttgccaaggggatccccctactccagcccagcccctcgggggtctgagtctgaatcacggctccagcctgcctggggctgccccctc

SEQ ID NO: 4187 - DNA, 6000 bp, Homo sapiens
atttgatagaaaaaacaaaacaaaacaaaaaaacaccctacagtaacactcgtcagttgtttaacctgagcgtttggcctactaggagtagcagcttttttccttcatgcacgctcacatccacaccgcctctgcacacatacagattgagcacacacttccagatgctggtaggccaaaatatgcttcccattgctctaatcaagtgggaaacagtgtagctagtgattaaccacactatatacacaactagcaaataccttaaggcaaccattgcaatggggggttaacttgcagggtggatttaatgttctagatcaagtcagcctgtatatacatatgtgtatgtgaatctatacacgtacacctttctattttttaaccctccaagacaatgtttatttttttaattttgtgcaaatttctaaatatcctaccatttaaggcaaagagtttgcattaagaaaggtcagaaaataggcttacgtttattcaaaagcatctcaccttgcacactactgttgttgttttttaaacacatacaacttttaagtgtggacactggatccccaatatctaaaaaattatttctaataacaaacacaagtttttgaggaaaaaatgatttgaaatatagacaatggatccccaattcctaaaaaattatttccattaacaaacacaagtctcggtggtggggtggtggggagaaccagaaagagcagctttgaaatgcagggaagcaaagtaaaatggaaaagaaaaagtaactgaagtttactaatactgaaactttcaacagccaaagtttcacctttttagaatctagagcaactcatttggaattttaaataaataagcttaagtttattcacatgttctggtccaagcagagttctagggccatgactctgcctgctgttggtcaaattcgcctagtagccttttgatgtgagccagcttgttatgaagatattcacatctgtatttttcttcatggtaattgggactagactgctttatcttccgatattcttgtaagacttcttcatgaacattctgatactcttttgagcctggagaaaggcgctttctttgtgcatctagtttgataaatcttctagctacagtctccatcctggcatgcaaagctctgtactcatcatactctgcactgacgtcatctttataattccggcgttgctcataggagatgatagcaatatattttatcaaataatctgggagttcaattgctgaaggttccatggaggcagtgcaatcctctttagctcctccactggaatttggactggagttatttagcttggcaatttcctcttctctcttaagatctttctccttttcctcaatagtctcaatgtcgtgcttttttatttggtccttttccttatgttttttagacttctttttggactttttgtgagacactgaatggttttcttccataggctttggacactttaatagaactgaaccagggggtaaggtttccagagaagtcctagaggtatacttgtcttgttggttctcatagatactattgttttgactaaaactgtcaacaggtaggtcttgagcccccggccttctggagtgctaggggaattggagttagaatttacaatctgaggaggatgtgaaaccggcagatgggttgaaggcaagcggtggaggggtggggatggcagcagctgcagggggcagagggaggcctgcagcagatttttcactggtgggattcaaatgaccatttagtgttggtggtactctgctcgtcaggtgagatattcgggcttttttatccattaaatgatcaataaactctgaatccaaaagccgtgtctgaggagaagatacagcgtttctactagaacatactggagattctgaacggctggtgcctgcagcattctgagatggatttagttttctagagagcattgactccaatgaccaagtgtctatttcactgtatccaggccagtctctctgaagctctttaaaaacataatcctttgaagtatacgagaggtccttaggattcagattggctacctgttgcagaattgctcccagggagttcctgtctttttgattgacaccatctttctggagtctagcaagtagctccggtttcttgtaggccttcagggccagtaagtgaaccaccctgtccctgtatggcttctgagagacgctgctgctgctgtgtgtctatcgaattggatttgcagggttcatgggggttgaccttttcctctcaggaactgtatctgaaacagcttgaggtgctttccgaatttgcactcttttccctacatatggtccaccgggtttgataacttctgtgcttcggttgcgggattcctcctctgcctgggtcgttctttctcgtgtcatctgatccgagtcgtttgttgcacacactgtaattttatcttgtataaatcccaggcaattgagctgggaggctccagagctggagaatgtttgctggacgcagtcaaagctgccctgagggttgtctttgcccacatttgacaaataaaagttaaagttatgaacttcattgaggggatcatttttgggaattttgacaagctcctggagtctttggaactgaattgaaggtcgaaaagaaattaaattcttgtggctctggtaagtctggagcgcctggatcgccgactcggtgagcttcacatgcagtacggtgatgttgtcctgccccagccgtccgcacgagagcccatagcgctgccccgcgacccccccacccccgacatcttaaactcccagaggtgccgccgccgccagtccagctccagcctccactgcggccgcagctgcttgggcttctgcagccgccgccactgctagggccatcccgctgctggcgtactgtcatatactgcgcggagccagacctcggactgccatcgccgccacctgccccaccctctggccccgcgccccgccccaggctagtctcattggtctagttccctcagaaccgtcctcatcggccgccctccactttcacgggggcggggcccaaagtcgctggagttttgctcctgggactggacgtccgagaggtaagagagctatcacaaggttttctaatccttatgtttcttttagtggatctccaggttactgtggtttgtattatcaggctacttacaaaaatgaatacctctttaaatcaggccattttacagcaaactacggtccttgatcaccattatgctctgaataaagactatgagcaattgcacttgaatgctgttaaactttattgactgaactttgaattgtttgattttgatcaggttggcttgtggaaagtgctattaagaagagttctttagttcgttggtattatcctcctgatagctattataaaagtttccctgatgtgtcctctcaagaatcttaaattctcatatgcagctatcctttgtacattaaatggtctccttatggttaggataacaaaaacatgaagaaagcatataagattccaactaatttgacgttgtgaattgtgaattctgaactgaaaccaagtaagtcccttatgatcaggctccaaggttttggtcagcctctcaaaattgagaggctgaaaccctttgaccaaaattaacacatttgccccttccctccagctcctggaaaccactaccctaactctgtttccataaaatagtaaactattttagagtccacatataagtgagatcatgtagtacccaccgtgggcttattttaaggctctgagtaaatcaccatctctctgtgctagggtattctgagtcagtcttgttataaaatattttgtttaggtaacatattgcaaaacgtttcataattcaatggttcctttcccagaaaaaaagcagtgaaagttccaatagccaaaaagtgtctaactcaactgacctttgggaaaaaatatccgtataattccagatagtcctaacttctgaaggtaatatagcctggcctctgttgataaacaaacaaaaacaaaaaaaccacacacacacacacaaaccagcttcttgtctttaagtgtgcaagaatgttagcacttaaaatttttaagatacacaaaaactaaacagaactgttcaagtttttaaagggagcttggaaatttgaagaaagtaaagttaaaaatattgccccatgagtcatataattatttttctttttatttctcatagcttccctcctatccattatttaggcaattttgtatccaaatttaataatttaacaccttatttgttacaagaacacgttactatgttattttaagcttttttgggcaaattacacataattagataggctgggttagggctgtctacaagatcccagcctagagtgtggtgcagtagcctattttctctaggactcttgctgcaacaggatatgggagaagggaaacattaacgttagcagaatgggaggaatcagattatggagacatgatccttgccttctggcacctctccagctgatttagaagaggacacagagggagacagacatatggccatttctataattataaactctgctacatgctgagaggatggcttctcaaagccagttagtgtacaagcagtggaggttgggactgccctacttctcctgcctagggtcacacagtctggcagatctggaaagacttccctgagaaagtgaccttggaactgataccttagtggaaataactaggcattgggagggggtgaggtgaggagaaggtcaagagctttcatgtagagggaactttgtgcagagaccttagtcaggaagaggttttgcatagtggaggaactgaaagctaacagccaggctacagtacagagcaaatgatgctggggtgtgaggtgatgtcaaaaggtagacaccagggctagagggcgcataatcttgcaggccgtgctaatgattttgttttctacccaagaatgctacttcaggagatcagtcaaaaggttagggtgatggtgacggtggaaatatagaaaaaggaatttattcaagaggtattcaaaaagaagtgaaatagagatgagttggagatagattggataaaaagagtgagggagagggaggtgtcaggctgcagcccaggttctgagttgccaaagaggagtcttttcctccaggtgagctaaggcttagaaccacgatttttggtcactttttcttattttcagtgtgagaagtggcgagttggctgtccaggtacacactgtcatcttacacttactgtttaagacagaggcgcatatttggaaagtgaatgagtcaggagccagaggagaaggtatgccggcagagcctagggcggagaggaggaagagagtctgggggcgcgtccccaaaaaggagacagggaagacagagcagaggccggggaggggagagcaaggaccatgacaggaggaaagagaggctagggaacactgaggtggaggaatcctgggatatgacagttgtaaagaattgtagccaacctaatccagttctctcaatgtgcaactgaggaaattaattttcatgcgtttactttattgtaaatgtggtacttgcacttgagaaattttggaaaacataaagatgtaaagcaaattaagatcactcatagtctttccacctagagacatgtactgctaaagcaaggactttgatccttttttccctttgcatttttaccatggttggaattgtaacacagacacaaccttatgtcctgcttccaaaacataaataatggttgtaaagcgtcccacacgttgacccaaagtctcctttgaaacaggaaattgagacacgccggttgtgaaacctactgaagtgagcggcggcgccaggattcctgggaccccgacctctttgcagctcgcacagctaagggcgagggcgcccttcggcagaagcagcaaaccg

SEQ ID NO: 4188 - DNA, 6000 bp, Homo sapiens
ttaatttgctaatgttgtaccccttgggcacagggatactcacagtgtgagcacagaggctcttaggtgcctgggggccgcactccatgactccggcgcatgcaagctgcccactggctgctgggttccccttgctgggaagaggaagtcagtctctccttcccacagtggccactccaaccctccacagatgggtgaccaccatgaaattgcaaccactgtatggagatgcacttgattcttggatcaagggtgggaaagcatgtcgtcctgatctgtctcaaaacactctgtggtgcagcctgggtggggatggctaaagccaacctctgtgcagacactgtgggatgcatgcccccaaatcttattctccctgtgtccctggcaaaagcaagggaattgtgaaaggtgatggcagaaggggccacctctgctgatgagatcagacggctgtatgggcagacagtggcagggtagtggtggacaggagggcaagaattgcctgtggccccagacattggggagcagatggcagagaatcagtgctggggaggtgaagtgatgggagccaagaccacatgtcagcaaagaagccctcacacaagttttttttggctcatttgacttcatttataaaacacacattaagataaaattatgaagaatttaaggatgatgatcatagggcatcaactatgatgctgcattggttgcgtgccccatgaagcaagcccgggatatacaatacaccgattaactcactatttgggggatgatcctgactttgtctctttacaaccttcggaaaattttgcctctttcagactttccatcctacaactctggttagctcagtcttccccaaccatttctgccatcttccaccttggtctcagtcatgcggatgtcttgtgcctgatcagaccaatgttggtcctctcttcctatctctctcaccttttcattccctgctctttgcattaacttgggaaacatttgtgtgtgtatgctagctttagtgccctcattttgttaccttggcgtgaagtctgccgtccctgcagctctatttcatttgaatgagggagaagcctcataaagttttaaaagagctttttaaggattacagtccctatatctctaaggttttcccaggacccattccacatgagaaatcaggataagcttgctaaacttgtacagctgacccttgaataacatgggggttaggagtgatgacggccccgtgcagtcaaaaatccatgtataacttttgacttttccaaatcttaactatgaatagcctactattggctggaagccttactgctaacataaacagttgatgaacatatattttgtatgttatatgtattatatatgatattcttaaagtaagcaagagaaaagaaaatattttaaagaaaatcagaagggagagaaaatatatctgctatttattaagtggatcatcacatgttcgtcttcattgtcttcatgtacagtaggcagaagaggaggaggaagaggagttgccttgtcttagtggtggcagagtcagaagaaaatccacgtgtgagtaaatgcacacagttgaaacccatgttattcaagagtgaactgcagtgtgagggtttgagtcaatctagtctggagctaactgggtttgctgttttgctgttgctgcaatagtcttcaagttcctctacattgctctgttcctagggtggggctggtttgccagaaggttttgttaatgtctccactctcaggttttggtgtttcctttgtgaaatatctctagaggacctacctccatgctttccattcttctagctgcagactcgtcttgtaattgatatttatgatactgcttgggagaaggagtaagagcactgtcttttgttctggtgcagtctcattcttaggcaggtcagttgtttttgaattttttgaagttttgtcatgtaagtgttcctgcctttcttccagcagtttgggacctctaatagtctggaaccaggatgttttctcgttctttcccattgtttttcttctcctcagctgcagtgggttttcacatatgccctgagggcagcagggctttctgccctttccccaccaggttagggcttttttttttcttttagatggaatattgctctgtcacccaggctggagtgcagtggcgcgatctcggctcactgcaacctccgcctcccgggttcaagtagctgagactacaggtgtgcaccaccacaactggctaatttttgtattattactacagatggggttgcaccatgttggccaggttggtctcgaactcctgaccttgtgatccgcccacgttggcctcccaaagtgctgagattacaggtgtgagccaccgcacccggccacggtttttttttttttctatgttgcaatagaggagatgggtctggttgggacttactacccttcccatgcagtagctgttctcatacctcaggcccgcatcatgagagaggatttatctggtctacatctctgaccctaatgtttcagaagaccctggtgaggttcatagaaaaaggcttagagactgatgcgaatttccctgtttttgtgactcccagggcttctatatactcatgctagcctttactaatttgtctaaaattttagctgaattcttattcttactggcttgtataatatctggcatctgtcccaagtaaacaagggtttgcattccatctgtcctttgaggagtctgtctttctttatattttgggttaactggttgccttgatatttcagttctttgataaattcaagttatgattttgataatctggcttcaaaaaattataagtatgaaaatgaagctctttccagctttttgcatgctaatcttaactttaaaaaaattatctgtaatcccagcactttgggaggctgaggcaggtggatcatctgaggtcaggagtttgagaccaacatggtgaaaccccatctctattaataatatcaaagttagccaggcatggtggtgcatacctgtaatcccagttacttgcaaaaccgaggcaggacaattgctttaacctgggaggcagaggttgcagtgagctgagatcatgccactgaactccagcctgggtgacagagtgagactctgtctcaaaacaaaacaaaacaaaacaaaacaaaaaacaaataaaaaaattatttgcaggccatgcctggtggctcatgccaacaatcccagcactttgggaggctgacacaggaggattgcttgaggccgggagttggaggttacagtgagctatgattattccactgcactccagcctgagtaacagagtgaaaccctgtctcaagaaaaaaaattttttccccctaaattagcttcagatactttttttttgaaaaccaaaaaatagtaaatagcccagacacatttatatggatgatatctacaaagcacaaacatatatttagaagcccttcaacagttacaagcagcgtaaaagaggaatgtaaatgtgtccggcaaagactcatttataacaaaacaaccctgaaacatccaaataggactaataaaaagggatcctgggataaagactttggaatactccattaacttcactgctcacaagttctgactagtttcttataagtaataggacatttatagcaggatcttttatgtaaatctcatgccagtaacttgtacttttatcctaaataaaactgtatgagattctcatctcactacatagggttacaagtaacttttatgatatctttaaaaagtttcatgttgaatatcacctccataattaaaaaatggatgcatagactgaattcattcattcatttgacaaatattcactaagcacctaccacttgtgagatactctgttaggtggggatacagtatgataactgtatggaactaacactccaagtcaaacattgaagtcaaaattctgggctggcgtacattagttaggagcccccattttagaaaatattatttcaagcaggccttgtttttatccagagagtgtatacagtataataaaactcagtacaccaagatttatatttcatggcgtgtttttctccctaagtagagaaaaagctccttcagtaaagtgattgtgttgtcaaccactgcatattcttaagtgtaccaagatgcttgactccaggcaggtgctaagagagactgttgggtgagtgaatgtatatcaatgaaaatcaaacagaggaaattttctttatatgttttagtgttcctgtggtttttttttttttttttttttttttttttttttttttttttgtgatggttactggctcttctctaagaataatggagaaaaggtgttagtttgtactgtcgcacagggcagtcgtaggagactctgaaaaagcaaataaatcaatgttaaatcagaaatgtgaatgtagtaaggggctgaagagacaggggaagagaatacatgggaaaatattgaaaaggacagagtgatcaaaaagagcagggacatgggagcattgggcagcacactgggagccatttcactttatgctcttattgtatgattgagaaaaaaatgtccttagtggttaagtggcttttcaatgccacatcagacttgttccatagcagttgaattaggggaaggtgaataagttggaggttggtgacaaggagagaagctggaacagagaggagagtcagaaccagagggaaatgagagactgagtaggcatctcagggtttttgaaggagtggattttctttgttgcagtcaggggaggtttgtctgttggctgcagaaagaagtcagaatagagatatcgtggggtaggtttgtttggaacagaaatcaaagaccaatttttctgagagaaggaaataacatctgcaaatgatatgctgtttttgctacttccattgttagctgttctcccaggtgatggcaatgcagacggtaagaactctgacaactgcccagttgggtggtgggtgaaggtctctctctctctctctgtgtgtgtgtgtgtgtgtgtgtgtgtgtgtgtgtgtgtgtgtgtgtggtttccctagcatatacctggaaagtgagagtgccaggctggttccattctgactatccatgactccaggtccctgagctcttatgaaggtggttgataaggcatgggactgtgtggcaagtgaatgtctgctaagatcatgatggatccccttttctccagattctgagttcccgcactctggcacctttctctctccatcctctttctcaatgtctttctccccattctatctgttcttttgtcgcagggctcaaggagcctctctccttccatgtcacctggatcgcatccttttacaaccattcctggaaacaaaatctggtctcaggttggctgagtgatttgcagactcatacctgggacagcaattccagcaccatcgttttcctgtgcccctggtccaggggaaacttcagcaatgaggagtggaaggaactggaaacattattccgtatacgcaccattcggtcatttgagggaattcgtagatacgcccatgaattgcagtttgaatgtgagttcagttttctccatggagagtggtgaggtgggagagaggggttgtctcaatgtttcttattcctttaggaaacagcctgactctcttctgtatcttattctattctttccaccataaaactgcaattgcatacttttgggcaagggctatcatccagaccttaattctccaaacacttctgctacttatgaactcctctctcattgattgcagggttgtgcattattatcttttcttacaggtatcccaggaccacccttctgcctgccctacaaccagataccttcagctttctcactttctcattcattctcttcagcagtctctctatatatactcaattgtaacccattgcatttaattcaacctaa

SEQ ID NO: 4189 - DNA, 6000 bp, Homo sapiens
tctatgtgttttgtagtttgtttgtttcttctctttttttgagatggagtctcactctgtaacccaggctggagtgcagtggtgcaatctcggctcactgcaacccccacctcttgggttcaagcgattctcctgcctcagtctcctgagtagctgggattacagtcacacaccatcacacctggctaatttttgtatttttagtagagatggggtttcaccatgttggtaaggctagtctcgaactcctgacctcatgatccacctgcctcagcctcccaaagtgctgggattacaggcatgagcctccataaacacagaaatctaaggactaagtgaaaagcaatattttaggcttcaaaatttagccagggtggtgcttagaatgaatgggtagggagtttaggtagaattggtgataagatagagaggagacccaagggattcaaacaaaggataagtagaaagcaatatgagatcatagaaaagttaaacattaagacaaagaagcccagaagagacagaaaatactgtataaacagaaatgaacagaagcacaggacaagtcaaataatattaaagttgaaatggaactagaaaatatcaagttcctccaattttgtcattttacagtggggaattagtgcttctagtaagtggtaaatctaggagttttcatagctctcagactgggacctttttggctgttgcagagggcagagggtggaggatatacgctagccacaggaactatgcttggaggccagaaagaaggagtgaatcacttcaataagagttgaggaggaaatgaaaggccatgtaagagtcacgtggctgtgggaggcttgtggggtttccgtaatggggaagtaggcagagggcaaggtttctgctgggaggaagggatgacagagctgtgtggggtgggaacatgacactggagttctgaggaaatctctctctctctcggggtgcaaaagtcacccactagagtggtcttagggaagtgacaggcaagaagagcccaggcgaaggcaaacacaacaacgtctgtggtctgagcaaaaggacaagaaaagggaagttggggaaggacaggaagagcactgggctccctcgggacaacccagcccctctgttcaggctgggttctaatcatagggtgtcctacccacttcagattattctcttaggattttgtgtgttcagagagcttaataaccacttactcctctccccattgcattttatatcaatttcagattcttgcatctatatttataagtattcaccagtgtaaagagtctgccagtttcccttcttacactacctccacccttcctttttagggatagatgtacataaactcttgtgtataaaattgtcatacttaggagtctgggttatttttcatgaaagcaatttgaatattttaggctgatagacattctaaggatcacgttttccatggcagctctggggcagagcactgcatggacatggagggatatggactgtgacacaccggcagggactgtggctgtgatctctgtcccacaggatgaaagcaggactacatatcagtcagatcagagaggaaaaaccaggtggagggagagaaatgacatggtgactgtgtggagcaaaggagagggaagttttcggagaacacacatttctaggtatctatttgaatgcgtattgccatgatgggggtgagggtgttacttactcttctaggcaccctgagggggaatttcccataaatactttttgtttttttttcctcaccccttaatctttcctctgaaaacagactgatttatctcactgataaattcaggagggaaactgggcaagtatatatcagcacctcctactgccctttacctctctgggcaagttgctccccaaaggctcagtcttgctctcctcctccaggccctggctctcacaggaacagctgctcaggtggggaacttagggttttatcagcattgcctgaaataagtgagtgtattagtcttcttgggctgtgctaacacaaggcaatcagctgggtggcttaaacaacaggaagttattctctcacagctctagaggctagaagttcaaagtctccatctggaagactcagtttctagtgaaggttctcttcctggtttatacagacaactgccttctcactatgagctcatatggcctttccatggtgggtgcacacacacacacacacacagagacagagagcgacagggagagacagagagacagagaaggaaagtggaagggcactccagtgtctcttcttataaggacactaagcctattggatcagggtcttaccgtttagacatgagattgacattacttcttagaggccccatttccaaatataatcacactgagagttagggattcaacatgtgattttttttttctttgggagggtacacaaactttcagtccataacaatgagaaggccactccatttagggtccagtatgagcaagatcacttggattacacacttaaagcaaattatctagtggcactatcagaagtcaagattgaccattagatccatctatctcatgttattttcaacttgtttgcttctgaattcaagagggcaaaaaggatgatacttactgggttttataatattatccaatatagctaggttatgttgcagttataaataaactttagaacttggaggcttaacacaatgaagtttatttctcatgcagttaaactgcatgtagatcaggctgctcttctccatctcatagtcttgccatttagaaatttgactgccaagttggtaccacagggtaagatgatcagatgtgatattttcagtggtcaggactggagctggctaatgcttccaacaccacacattccattgcccagaactcagtccatgaccttaacccaactattaggaaataggacagttgcatctttcctgtaggaacatggaaaaaaatgtgaataaacacataatgtggtatctactattgttttctaaaaccacaaaccaagtatttgccattaacagcacaagatgagcaaagataacacctagtgcttatgaatgatttgggtaggatttgaactgggtattgctcttaaagatattatagttcatagaaattgccacatatctgtggccatgataggaagagctcattgagaatgacttctggcctcactattaacgttgacaaacctaagaaatagtgtatatatcaaagtatcatgttgtacacagtaaatacatagaataaatataaatttaaaacagaaacaatgttacaaatgggattttcctttttaaggcacggtcttgctctgttacccaggctggagtacagtgacatgaacatggctcactacagccctgactttcagggctcaaaagatcttcctgcctctgcctcccatttagctgggactacaggcatgtgccaccacatttggccaactttttaatttttttatcgagatgaggtctaactttgttgcccaggctggtctcaaactcctgggctcaagtgatcttcccaccttggtctcccaaagtgctgggattacaggcatgagtcattgtgcctagcacaaattcatgcccagattttaagtgactgctccaatgcattcagtgaataattaatatgatttaagaaacactataataataaatgtatttcctggatctcaaaaaaactgtgttcatgtatttacacatattaaccagccagggtcactgataagtcactgaatacttcatataaactacttaaatcaaacattgacaaatgctgccctttttatacaatgtgttttggtcagatcacaaaacaacttaaatttggatttttgtggtctccccatgtatgagtcctcttgaaaagctgcatgttctgactatcacaatcgtataccattccacactgtacagaattttcagtatttagttgagatgcatgctgttcttccaggacttcaaattatgaacttcccagggggttagtcagtcaaaatgctgctctagagaatatagttctaagtagatttgtatctgggattctatacattgaaattaaaatcacaatgcattttaattttttgtttaaacatctgcagtttaaaactctttgatagaagagattacattgttaacctctgtgtgtttatatgcctagtaagacactggtatcaaccatgtactatgtaattttttagtgaatgactatacagattaaatgcagtagaagggcttctttatatttgttatggtcctatgcattctgaatggctgcaatttaatctctaaggataatgtagagtggactgtagtttatataattgtgcagggaaatcttggaagatgtaaaaagcaacgtctccaatttataaaagaatcagtgagaatgaggaaataagaaagatgggtgaaaagaggtgaaattggaaagagaaaactttgaggacattcaaaagggggaaagaaagaatggagtgatgagaagaggggacactatggagagtggaggcaaagttaagtggagaaactggaagaactgtgatctattaaaacaagcaggaactgaaaaaatgacatggtttctcctttttatcttacaaatgacatgcaaaatccagagggacaaaatgacctttctttcaatgccatacaccactttgtctaaggcagttgaggaagggaagtagatataatggagcttagtggcagagcagctggaatcctgagagaagagaataactttagttcagagcaggtggggaaatgagagattgagtaggaggaccaaggttgagggaagcagatcttcttagttgctgtcagcggctgatggggaagattgttggtagaaggaagtcagaatataggtacagagggataagtttgctaagaacagagatcagcaaacagcttttctgagagaaagaaacatctgcaaatgacatgctgtttctgcagtttctgctgctagctcttcttctcccaggtggtgacaatgcagacggtaagaacatcgctgtcagctgcaaggttacatgtatctgggtagagtgtgctgggctttcccgagatggatcaatagagatgccagaatgcttgccatctgagcatacctgtctccaggtccagtttactcttttggaggatggtggcagagcatgggctctgtgtaaggaaaatgttatagctaaagtagtcattaatgtttctctgtggtaactggttcaatttccatttcctctccattttccgttaaaacaatcagggcccaggaaaatgatgtggtttctcctttttatgttacaaatgacacgcaaggtccagagggatgaagcaacctttcaatgccacgcaccactttgtctaaggcagttgaggaagggaagtagataagatggagcttagtgggagagcagctaaaatcctaagggaagagagtaactttagttcagagcagatggggaaatgagagattgagtaggaggcctaaggttaagggaagcagattgtcttagttgctgtcagtggctgatggggaagattgtctgttggtagaaggaagtcagaatatagatgtagagggataagtttgctaagaacagagatcagcaaatggcttttctgagagaaggaaacaactgcaaatgacatgctgtttctgtagtttccgctgctagttcttctcctccccggtggtgacaatgcagatagtatgaacatctctgtcagctgcaaggttacatgtatctgggttgagcatgatgggctttcccaagatggatcaatgaagaagccagaatggttgccatttgagcatacctctctccaggtccagtttactcttttagaggatggtggcagagcatggggctctgtgtaaggaaaatggtatagctaaagtagtcattaatgtttctctgtggtaactggttcaccttccatt

SEQ ID NO: 4190 - DNA, 6000 bp, Homo sapiens
gcactcctcagcccttgggtggttgatgggactgggcgccgtggagcagggggctgcgctcatcggggaggctccggccgcacaggagcccatggagggggtgggagtctcaggcatggcgggctgcaggtcccgagccctgccccacggggaggcagctaaggcctggtgagaaatcaagcacagcgctggtgggctggcactgctgggggatccagtacaccctccgcagccgctggcccgggtgctaagtctctcattgctcggggccggcagggccggctggctgctccgagtgcaggcccgccaagcccacgcccaccctgcactccagctggaaccgcccgcagcccaggttcccgctcgcgcctctccctccacacctccctgcaagctgagggagccggctccggccttggccagcccagaaaggggctcctacagtgcagcggcgggctgaaaggcttctcaagtgctgccaaagtgggagcccaggcagaggaggcaccgagagcaagcaaggtctgtgaggactgccagcacgctgtcacctctcaatgccactgcactccagcctgggtgacagagtgagaatccgtctcaaaaagaaaaaaaaaagaaaaaatgtaactatgtgaagtgatggatatggtaataacttgactgtggcgattacttcacagtatatacatatatcataacatcatgttgtgcaccttaagtatacccaatttaaaaaaaattaaggtagaatataaatatataatttatcatcttcaccattttaaaatgtacagctcagtggcaataaatacttttttatactcaatttttatttgttggttgtacctcactaaagctgaaaaatatatttgaataaatgttaaagaaatgtaagtatacacaaacaagaaaataagtatgtagaaattgcaatctttcctgaaaataagccaaaagaataaaactcgtatttaaattctttgaaaaaaaattagcagatggaacattttcttacatttgtacaaatgtactcaaaaattttattttaaatcaattttaatgagttatctcccataaatttcttacatagaaagattaagttgtccaaaggcacatcttataatatgttttgagagaattttctggttttggcaaaaggggatctgcgaatgtgactggggcagcctcaggaaaacataagagggggaatttctttttaaaagagacctctggccacagacactaagtatttttagtaaaaaatgtggttaggcactgatggaatattttttttttttttttttttgagacggagtctttctctgttgcccaggctggagtgcagtggcacaatcttggctcactgcaacctctgcctcccaggttcaagcgattctcttgcctcagcttctcgaatagctgggaccataggcacgtgccaccacgccctgctaatttttttgtatttttagtagagaggggtttcaccgtgttagccaggatggtctcgatctcctgacctcctgatctgcctgcctcggcctcccaaagtgctgggattacaggagtgagccactgtgcctggcccactgatggaattttgtaaagcaggaaggaaataattgtaccatataatgttacaaaaattaaaattaatatatattttttctttggaatttatcttctggataattttaatttagaaggaatttcattattttgttaatgattatggggttgctgtcagacattatttctactttgctcagtaatttgcagttatctgtgagttctgtagcctcaaaattaaaaactagggtgtggttatctttacttacataaaagtgcaattttttgtggaataacaacattgttttattctctaaatatactttgctttattttactttgcaaatgattttaaaattctccctcttttttttttttttgaaacagagtcacactctcctgcccaggatgtagtacagtggcacaatctcagttccctgcaatctccacctcctaggctcaagcaattctcctgcctcagcctcctgagtagctggaattacaggcacacatcatggcacctggctaatttttactttttttggtagagacagggtttcgccatgttggcaaggctggtctcgaattcgcctgccttggcttcccaaagtgctgggattacgggtgtgagccaccgtgcctggcctgattcaaaaattctaatggccggggcacggttgctcacgcctgtaatctcagcactttgggaggccgaggcgggtggatcacgaggtcaggagatcgagaccgtcttggtcaacatgaagaaaccctgtctctactaaaaatacaaaaaatagatggtcatggtggctcttgcctgtaatcccagctgctcaggaggctgaggcaggagagtcgtttgaaccagggattcgggggttgcaatgagccgagatcctgtggctgcactgcagcctgggcaacagagcaagacagcaagactccgtctcaggaaaaaacaaaacaaaacaaaaattctaaggaatacagttacttgtagtattgatgtttggcataggtcattccaatctttttattatgtattattgtttttgtaggttattatatattctcttgaatatttatctttgtttactgttcataattttattatgaaaccaattttggatttacatagcgatttatagatagatttacatagcaacttatagctttgaatgtatttgtagaaaagaaagagtattgaaaataaatgtagacattctactcaggaaacaaggaaactttttttaatctttctttaaccttagaatttagaaatgataataagatgaaactaggtttggacctttttcttttgtttttttgtttgcagtttttttttctttttttaattatttttatttatttatttattttttattattatactttaagttctagggtacatgtgcacaacgtgaaggtttgttacatatgtatacatgtgtcgtgttggtgtgctgcacccattaactcgtcatttacattaggtatatctcttaatgctatccctcccccctccccccaccccacaacaggccccggtgtgtgatgttcctcttcctgtgtccatgtgttctcattgttcaattcccacctatgagtgagaacatgcggtgtttggttttttgtccttgtgatagtttgctgagaatgatggtttccagcttcatccatgtccctacaaaggacatgaactcatcattttttatggctgcatagtatttcatggtgtatatgtgccacattttcttaatccagtctatcattgttggacatttgggttggttccaagtctttgttattgtgaatagtgccacaataaacatacgtgtgcatgtgtctttatagcaacatgatttataatcctttgtgtatatacccagtaatgggatggctgggtcaaatggtatttctagttctagatccctgaggaatcgccaccctgacttccacaatggttgaactagtttacagtcccaccaacagtgtaaaagtgttcctatttctccacatcctctccagcacctctccagcacagaaagagtattgaaaataaatgtagatattctactcaggaaacaaggaaactttttatctttcttttaacttagaatttagaaatgataataagatgaaactaggtttggacctttttcaataattctgaccaccgttcagtaaatttactgtataagaaaagtagaggtttggggttgaattttgttttattttttcccaaagatgtctatctctgatatcttagggcctggcaattgtttttggtcataggtgggctctgaataaatgtcagttgaacaaatatataaaaaccaaacaaaggaatgttatttcaactgccttcagagtgtcacaacaaatatcaatgaaaaagaaacaaaaataaagactcaattaattctccagtgaacacttcagtcctctaaaggtacttccctgtgtccacccaaactgctctctaaccgaacgcaagcaaggggactccaatgctctcaggccatgaactaatgaggagcttcatgcctgccctcagtctttcttcatacccagggcaaagctggcccacagacttccagacatgctttcttcgtttgggtagagatggggatccaagtcccctatgtatttcctccagagccacctgtaaaacatgggtgaaatctacctgccctctagctcaccacttccaggtcaagcccactcatggaccactttaacagtgacagttggcttgactggggaaactgaaaaaaaggagctttctttagattttctgataatctgcattgccattgctgctcctttttcagcagcacagagagttggattatggagggttgcctgcttattatgcagctacatccaggatgctgagtgtcttctgatcatgatcaagagcagagtgaagagatacaggcggaggagaggatcacagagaggtagaagtgggagactggtggataggtcactaggcaccactgagtgactaccatcacttctcacagattagattattgacaagccaagtatggatttgatttctacaaggccaaaagctactccatcttctagccagaccacagactttgttttaagccaggactcgttttccagcagttagtgcaattagggaggttgggaggatgtacacaagagcagggagaaaatctggagccagacagtgagagaggcagaggggaaatgaaaaaccccgtgggaggctgcagcaaagcgaggcagtgtggcttctctgacagggaagtcagcagagggagaggtttgtctgtctgtacagcaagggaagtcagacgagagtgcaagagggtgtggagaggggtactgatatctgaattattagggcaggtgtcctgccaaggaatccctcctttaacagagcttcaatgctgctcctgttcctcctcttcgagggtctctgctgtcctggggaaaatacagcaggtaagaagagtgcaggtggaaagatacctatggtagggcaccagagggctgagaggaagctctggggaggtcctgggggaagggagcagtactcttctaggatgcccttggaatatgcctttcaggctagttccaggcagagaattcttgctctcagtctcagtttttgtctctgattttggagaaaggaagctggccccacaggaaaagggtattggagtatgtacaagctacctaactgtctctcatctctgggttccttttttccctttggcatcacttttcccatccctttacattctctctacttgtcatttccctctctctcagctccccaggctctacaatcctatcatctagcagcagaggagcagctgtccttccgcatgctccaaacttcctcctttgccaaccacagctgggcacacagtgagggctcaggatggctgggtgacctgcagactcatggctgggacactgtcttgggcaccatccgctttctgaagccctggtcccatggaaacttcagcaagcaggagctgaaaaacttacagtcactgttccagttatacttccatagttttatccagatagtgcaagcttctgctggtcaatttcagcttgaatgtaagttcgttgctctaagctgataatttgcctgggaacaccaactattttccaaagtggaagatagtatatagactctgaccatcatttaaccttactaaccttgttccccactctctgactcccactccctcctctgcttcacccttcaccaccacccacactccaccatatacacaaaagggcctgcatgtacatatctcaacatgaatatagcttcatgtctggctctttggaatgattgtctcctctggatcttctgcccctcattcctgccctcagactcagcctttctcaaccctctttctgcccttc

SEQ ID NO: 4191 - DNA, 6000 bp, Homo sapiens
cttccatattgatctgagttcatctacagtctcataggccattctcttttctagtatcatgcaactcccatctttccttcagaaccaaacttatatgacctcttctctgagaagccttcttggctaagtgtaatgactgaaaatttagagtttgcagtaagacaacctgtatttgaaacctgagtctgtcatttaccatctttgtgctcttgtaccagtcattttgcctcttcaagcctcactgtcatcatctgtaaaatagggtaatgaatactgaccagcatgcttgtgaatattaagacggataataaatgtaaagaacttagtatataatttgacccttaatagttattgctaataataaatttaacttgtctagaaattctcatgcctaagtcatatgtatatatagggtgatttaatttggtagatatttaccttgactttatctgctttctggtaagccgtgggaggcagtgctgctgctttgcacaactccaatttgaacaatgccccctggagttgtgcaatatggcaactctgggaaagaggagggttttcagtttgtttccatttatagtttgaatattttaactttataaataaattaatgtcttaaaagtgtcagtggggtctctgggccagaagatttgggggcttttgttgggttggtttgtattttgtatcactatttaaaaagaaaaaaaagactaaaccaataataacatgctttgaagaaactcagtcttttagaagtcattccaatcagtattagtttttagtagaagttcaattaaaaagtatttattgacagaaagaagaatgagcacaagccttcaggtcaagtagacctggatttggattcactatttacaaactacataatcttgttaaacctttgtttccttgatttggtaagggagctaatcattccagacacactcaggtactttctggtacttaagtgagctactgtgtacataaagtacccagcacaaaatctggcatttgatgggttctcaataatggtacctatgatcatttttattatgtgcaagttgctgctctggttgctggtttaaaactggttagaaccaagatgctggttaaaattggtgattaaattcaggttggtattaggattaatagtcagagcctataatagattaggattaggactgaaattacaattcaattaaggttacaattgtaatgcatacaggggttattattaaggttggtgttaattaaaactggataatagaagtaagaagcagtatgaggagtactggtttagctgggtagaaaattgaagaggaaagcaatgtggaaacctatgtagaatttactgatacagaaaactcatagaggagaaaaaagggttagagtacaaagcagaatctgaatggatattaagccttcttaatttttttccctacaggtgctgtcatcttctccctgatgaatatgtaaaattcacccactcaggctgagttctttcccttttccctcccgggcaggagcagcatggggaaaggaatgcccagtgcccacacagctgcgtttagtccagcaccagtgccagcatcacattccacacccccagctacccaggctgttgctgagtggacaggggcacctaggaggcaaaacccgccttctcttccctccccttccctgcttcctcagattttcactgtagctaccagctttgtaatcccacagacaacctactccagactttgtgcacgtctctgggaaatgcatattgtatgtcacagcgttcagagtggaaagtaaccatagagatcacaatccaacatggatacttttattttacctattttcatgatggggttcatccttgtaggtcaatctttctttgtaaaactatattcctagtgagtacggtgggcacctgtaggatgctgggtgcacatgtaaaaagggcattagaatgactacaggcaagaagttattccaaatgctaacatccacatcagtaggagaaactaccctttcactctgaaatatgcaagggtgaggaattcctcaaattggacaccgctccagagttttgggaatgattcctcttatccttcctgcctccaagggtactatctcccattccccacccagtggtggcaacccttctaccagctagccgtatgaacacagaaagtcatttagcttctctgagtttcattttcctcatctgttcaacaagcggtattaattagataatcttgaaggtcccatacaactctaacattcttttattctataattctaaaagccagtgactgtttcctattcccaggacttaaactgttgccaaactgatgctgatgatgcagaaaggagaagaggagccagtaggaaaagagcattccagagtctcatttgctaactcttaatactctctccaaaacagctttcctccttacctctcacccttggttcttgtcccatgcagttacagtagagagtagggccagaccagcaagtatttcagaattaagggggtcaggcagaaggggatcactgcagagcagcagatggaaaagacagattaattagaagactatgagacctaatcctacatcctgccctccctatcccacccatccccactctcactcccctacccctgcattaacctgttctctcttaagcccacttagatgatctctaagatgtcttctagctgcaaagataatactctttatccactaagacgctttaactagggtagtctgatctttctcttctgaagctgatttgttttgaaaacacccacattactgcctgctctctgcataactaacttcatgccaacatggccccacctctgtgggaaagttcaatctttcctatatctctcccccactccctagcccagcctcttctctctcttacatccaggtttccacacccctcaaatatagtaccccctttattttcactttttggagattccaagatatcaacaaaccctaggagacagaatggtctggagtcactgagatatatcaagtcaggcaagtcagacagccaaagatggtcaacacttccctgcaagaaaatcttaactatccaggcactcaagaaatgtccaagaggcaggcagaactcttctcccagaaaccatcaactctaacaaccctaagagaaaaactgtggggcagcatcctgacaatccagaaggatttccctggggaatatttcccctgacctctccatcattgcttgtaatttatataggactttactggtaaccaagtactttccacacccctgcccgtgagtttctgggtgacagagacattaactacatcacagagggctgaaaaactctgttttcaagaaggaaagattacccaaacattaaggattagcccagtgagacagtcattagcagacaaagagagctggtctaagagttagaagacatgcacccaaatccctcatctagggataaaatattagcctcacaggattggaagacactttaaaatcatattgttgcacatcccagccaacacttgtgtcttctactattaactgtcagtgtaaccttggttcagttagcctcctttgagcctcagttgtacctatataattaaggggttggaatagacattttctaagaattcttagatatctaatatcattttattctagaattctaacatttagaaatgtatttccaaaagctaagtttcagtaaaactgatttagaaagatccctttctgagatatatcaagactcggagatactcagtcacaaagaatggcaaacaccagggacttgggacacttaagccaagaccaagtacaaacaccctgcatctctcatcttgttatatctggcctcaggattgacagcagctttggtcacagacgcaggggtccttggagggtttctagatcagactcttcatccatgaaccttactaactcaaacttgagatgggcgagatctgcaaaagaacaagaaagaagaaaacgtattggagaaagggaccgggggttaaagagatgtaatagggagggttaagaaagaaaacgactgagttgctttgttaggctgccagattgggcaagagtctggggtgaaatcatgttttcagagggtgagttatttccttgacatgagattgagggagacattggttcccaaggcctgggagtttgttggaaaatgcctttcaagggagattgcctggggccacgaattgttgctggacagataactatgggctcttgggtaagaggaatcagggatgttagggtttaggaaaatgatgagagttagcaattatccactggacaggtgtccctgggtacactgttgatagggggaccccagggcttaaggccaggggccacaaattgttgctggacagataactatgggctcttgggtaagaggaattagggatgttagcgtttaggagaaggctgagagttagtagttatccactggagagatgtccctgggtacatggttggtgggggaccccagggcttaaggggatccccagttgccaaaggatggagggcggagctggaggacctcaggctagtgagcacgcccttgcccaggcctgcagtggctgcactcgccagctggcccatggccctgtccgactcccctccctccaccccaagcctaagaggggtgagcgcagggtcccactgctgagccagctccctccctctgatccacacccgagcccggctggccgagctcccgggggagagggtggaaggcaccacgaaggcaaggagggggtgtgggaggcggggggtgtggggaatgcggcagcctggcccccccgcgaccagcccagccccccgccaaaccccctccacctccaaccaaatggtttgctccgagcgccctatttaatccccgcgactgcagcagcgccggctccctcccggtccccacctcggccccgggctccgaagcggctcgggggcgccctttcggtcaacatcgtagtccaccccctccccatccccagcccccggggattcaggctcgccagcgcccagccagggagccggccgggaagcgcgatgggggccccagccgcctcgctcctgctcctgctcctgctgttcgcctgctgctgggcgcccggcggggccaacctctcccaggacggtgagtgagggagggggcggcgcctggggaggtggggagtgacccgaggcgggggctgggatcgggagtctcgcggaaggagcctgttggctttgtttggaaccggggttaaagtcaccagccgctgctaatacccttgtgtctgtctctgagcatccgtgtctctgtggactgtgggtgtgccggtgtgtgcacccttctgtgtacaccactgagcgtgtgtctgcgtgtgcaccggggtttggctctcggggctgatgtccgttaggagcagcccggggtctggatgtgttgctgtccgtgtgcgcgcgcgtctgtgttggtgtctggctctgcgtttctgtgtcagtatctgtgtgtatgtctgtgtcagtgtgtgttgggggcggagtgagatttgtcgctgtttcagtcagggcgtgtgtcgggtgtttgtgtatgtatgtctgtaggggttgggtagccagtgcaatcccccaaactgctgtatgcaaacatttctgctcccccgcccgtcccccaccacccgcggcgcagctccgagtgggcagagaagggggcctgggtgaggctgctgaagggggcgtgggcaaagaagagggcccttatccttggagcaaaacaacaacacagggcggagggggcccaggatggcaatatccctggcagtggtagaagctgggaaaagaaatccgacaggagcagaggcggggtgggggtaggggggagcgcaaaagaaagaatcaagatatttggggaggaggatgcatgagaaacccaaagctttcctgggctaagcactgattttcccaaatttgggatgg

SEQ ID NO: 4192 - DNA, 6000 bp, Homo sapiens
cacatgtatttatgtttatggtaaaaatgggatgattattacttttgtagcctttcttctttttaataatatgagatcatgctatacaaacttccttatatccagtttactttttctcttagcaatgcattttgaaactttcgcatatcaataaacattttcctacattataatttttaaataattgccttgacttttattacaggaatgctctttataataatatggtttgtttggatcaagattcaaatgagcactgcttattgcatttgattgtaactcgttaaaagtttttttgagtctagactagggtttctcaacagtggtgctgttgacactttgaaactgctaatttttgttgtgtgtgtacgtgtgtgggtgtgaggtgagttaggaggggagatggtcttctgtgttacaagatgtttagcaggatcactggcctctacccacccagaggacagatgccagtagaatccttctctcttttcccactgtattggaaaaaataaaaaatgtctctaaacattaccaaatattgcctggagggcaagggtatttcaacatcccattgcccccatattttaaaaagtctcatttacacattaaaaagccaggtcaaaatcttactttctagatggcatttactcatagtatcattaaatttgttatatcttctgtactttttataaattggaaattagttttaaaggcttaattagattcaggttcagcttattaaattatattagatatattaaactggatatactataacctgtaatatagtatattaaactatggactatattaaactatatataaaaacacacataaaatttggtgtatatatcagtttaatatatatataaattataaatttgataatcaagtaaagttgtctgatttaacaaaaatacaggacatccagttaaattttaattttaaataaatagcataatttttaggataagtatgttacaaatattgcatggaatatacaaaataaattatttattgttttttgaaattcaaattcagtgcagcattctgtattttatctgggaactctaatcaggagacacatactgttttgttgtcttactctaagcaaagctgatttcaaaatactatattgtacctcataaatacaaacaattattatttgtctattaaaaaataaaatttaatccaggcactgtggctcatgcctgtaatcccagcactttgggaggccaaggcagccggatcacttgagatcaggagtgcaagaccagcctggacaaaccagcatggtgaaacacaatctctaccaaaaatacaaaaattagcaggacgtggtggcgcgcccctgtaattccagctactcaggaggctgaggcaggagaactgcttgaacccgggaggcagaggttgcagtgacccgagatcatgccactgcactccagcctgagtgacagagtgagaccctgccaccaaaataaataaataaataaataaataaaatttaaatgcatgcacaaaagctaactgatcaatatttcaggtggcaacagcttgctcctccattcaaatggatcccatcaacctttatcatttaatttattgataaattttgtctaaatcattttttttttgagacaaagtctctctctgttgcccaggctggagtgcagtggcgcagtctcggctcactgcaagctccgcctcccgggttcatgccattctcctgcctcagcctcccgagtagctgggactacaggcgcccgccaccacgcccggctaattttttgtatttttagtagggacagggtttcaccatgttagccaggatggtctcgatctcctgaccttgtgatccgcccgccttggcctcccaaagtgctgggattacaggcgtaagccatcgtgcccggcctaaatcatttaaaattaggagttgcaaaacggtgctttcttaatcatgccatttcttttacatttagtcaatggaattattttatatagaaggtttctttcatcatttagcttggggtgcaagctaaaaatgagtaaaattggaatttaagcctcaatcttctaattctgatccagtgtatattctattacatccagtgaaagaaactattctgactacaaatagtcataatccagcaagcctatgtcctataattagcagatatatgagatgtcaggaacatattatagggggaggaggcagtacctgcaaactgaagcaaatttataagtgatttcctaagtaaaaaagattaattctctagaaataaggagtaaacgatggtgcccaaaagagaaaagaatgatgcacaattgaaaaatctagggcattttttcatttccctccatgctggccacaaattctgaataacgcatgtcagaataacccatgcttccaactacatagccatgcatgtgccatgtaaaaccaaattgcttgtggcttctgagaggacaagaattttggttcacaaacacactgtaaaaggcagggcaaagaagactctcttttcttcagccatgtgactaaggtggcacaaagaatttcagcttccttttactcattgactttattatactgtatttctagttaattaaatttacagtcaaatattctgtggttagaattgtagaaagagtattagaagtccatctctttcccatactttacatattctcaagaggactggcaggccatcggtcataaaagaaaatattctgtgatactaattaccatagaaattaactaaagaatatgtcctggatgctggttttcctaagtacagatgcaaagacaagattggtggtttccacaaaggatgaataattggagataaggagttgtccagcaccagcattctctagtgctcttttagaaatatgcatatataaatatgtacatgtagataaacatatttatatatgtctatatacacattgttatatatattatttcatatattgtatattatatataaatatataatgtattatatatgtatataggcatatttatatatgtatgtatatttatatataaatataaaattatatattatatatgtgtgcagatagataaagacttgcctctgaggaaggaaaggatgatttattaggttgtaacatcttgatataataatcaatgaattaattgctcatttgcctctctaataaatacatattaaaaatctaagcatgctctctgctgtgctgagtatcagataaagagcagtgaactaaactaatatagtcattgacttcaatgaggatgtgataaggagctagaccaggaaagatgcaattttcatatattgtgatacatgctatgataaggtaagaatggagtaatatgggagcaataagtaatcttctggcatgcattttaatatatgaattgcttacattcaccagaaagtgaaagccatatagaaatgactggtctggtacacttactgttaaaaatgaatacattcacatactaagttattttgtaagtttgagtaatgtctcagagactggtcagctccagtgagtttaccattgagatctagggcttgcatggtagagacacagaccctggatcatgggggctacaccaagatttttctaattaccaaattcatcggactattcttggttctttccctacttcataactgaaacatttaacactattaatcactctccctcttgaaatgctcttctgccttggttttgtgacactactatctcctggtgtttctgttagagtttactggatgtggtcatttagtgtgtagtgtgcatctgtcagtctgcactgcagaagcgatggtgaatgtcatttactctggtaattcagttaacctgggttatcaacagagctctactgcactcttatcatttcagtatgtgattaacctaaatattttaaccatccactaactctatctcatcattctaatttaattctctctgtgttactacctggtatattttgttcaataatttgttcactttttaattgactttctccccatgatggactataataatccttgagggcacctgttctctcatcctttccttggtcctgtatcttcaactaaagcagcagcagaaacaacaacaggagcctcacaatttagtactgcattttccactaattaattgcttagatatataattctcacaaaacattctgaggggttcgggcttctcaatccctaaaatgaagaaatttaaattggttatgactatgatcctttcctttttaacatttttcctatactttaagacttatgataaaaactcattaggaaactagaaataacatgtcttccccaagtcacttctaacaaatatcccatggttatcgtcagtcctgccatctttccactattctgcttccaactcctttctttctttgacttccactttcaaatctatcacgacctcctgctgctctttcttttctgccagctcagagtcagaggcatagaaggcaaggttactgtagatcttgaactgtcaacctggcaggcaagataggagagtgaaggactcatcaactagccagtagcagtcactgctctttagaagccaccttaggaccaaattgttcaagtaactgaactgttatcttcctgaactcctgcaattctaattgccagaaaacatctagatgttgggcctgcagaggaccttagcacacttgtagtacaatctttccatttcatacacacaactgtgttgaaagaagtctcaacttgtgaggtgtaaacatgaaatcattatttttgaaattactactactgctgtggacccattcttcttgggcagtagcctcccttaatgacttcttagactaattccataaccttttaatcactttatgctactaaaacagtctcattggagttattaggcacaatcaaatctaattaattttgattttataaaattaatcaatttaattttatcttctgttcaaaattcttttcagtctccagcatcctccacctgtctaccaccgagcatggggtaagtttatggctccagtggcttgttatgtgttgggaggtaaagggtgatggccacactactcacatccctccctcttccagatatcagccccttccttgagagtaggaagaagaaagcaactctccatgctgtattagctgtcggctccttgttttgttttaactgctattcctgtgtgaacactacctcataagtggaggtcagattgtggtagtgtaacctttttgctagttgtcaccatttctctagcattattcattgttctttctcatttgcagtgattcaaatataggtgctctcatgggaatacctttgtaggttctccagaagaacctatgtcccatgcatctgcacagcaaaaagaatgacctattaacttatggttcaatcaattctactttcctctgctctcattgcaggccgcccactccagagcctcttgttattagagttcccctcacccagagagtgtcccctttgagggagagggacaatatggcttaagttcttgtcactttcctttatgcccacctaactcaggggtacttaagtaggtgccacacaatggaggctaactctagcaccctctctctcaggtccattacttctaacctgccttttcctgcaaaccctagcagtgtcagattctccatcagtaccctagcagtgtcagattctccatcagtatcttgcctcataaattttaagtcaaaagatgaccacaaactctcaacttattggagggaataattaagttatcccaaatgttgtggccaaagtgctggagcaccttgttgaatgcctttcttcctcatgtttaagatccctaccattcagacctctaagcttcaaatcctggctttgccattcactagttgtataatctaaacctccctacctcattaaaaacaaggatgctgatagtacctgtttcataggattcctgtgagtattaaa

SEQ ID NO: 4193 - DNA, 6000 bp, Homo sapiens
ttcttttagatttggctaagaagtaaggctttatttaaataagcatccatccaccaaatagctctgtgtccgtcaacttcatatcgaccgtgataacagtgactactgacagagtgtacaagatgagaaggacccaggcttttccctccagtactgggatcttttgcgtccggccacctgttcacatctccctctgcactgctgaacaggctacagttggcaggacctgcagccgacagcacgtctgctccttcagcattcatcacttgctgtgcctttgctcagaggggcccttctctcaggttctttggaagaataacccaggttgtacttattctggaattctttcccatatggggcacagattcatattgtgactgaacctctcaggagtatcatgattactgggaccatcagcttgagttcttaaccccatgaggcttacacatgctcgatgctctttagtgtttgttggatgcattagtgcgcacaagatgggaaccaggtgttcgatgagtgagtgaatgcctgcatgagcttccagtttccccctctctacctcaggagagcgcagtgtggttttgtctctgttttatgcaggcttccttcaaatctctgggaatgtgtgtctttgcctcaaaagcagaccaacctaaaccaaagaccccttccatccagactcctgcaggctgttccatcccactcactttctcttctcttttctctcctcggtttctccctctccggctgtgtgcaacatgcctctagttcatccaagactccactccctctacttatccccagcagcgccaggaccagggtgagactagagaggcacctcaggcacaaaagttaaggaggcactcaggctcacagtggtgccagtgtcatctcatgagaagtaaggccatttcgcatccatttcccatctgcagaggctaagcaacagtgggcgtttctaagaagtgacagagacaggcttcttccagggtcttctccctctaggccagtcttcctgccatgtcatggcactgctgcctaagctgactagccagggaggggtgcacaccggcttccctgccccaggcagcctcttggtctgtggctcctcgtggcatggtgcctgctgacagattaaatgaaagcagacacaaagacagggcttaggtggggtcctaccttcccctttcagtccccatcccacaccacgccctcaaagcagtgcccagaggcctccccactccctagtaacaccttcctctttggctcccacctttggctcccgaaaagcctgctgaatgcccgctccttctgccggctgctttgcctctgcctcctttcctgcctggctccccttctctcccagctcctcaggcaccccacctttctttcccttctccatctctcctcctgggagaagtgtggccccattctgcccccagcacaaagcttcacccaaattccaccccaccctggatctccacaccaagcggctcagggttaatggtcgagttcaggaagcttatgtggccttggtcaacacctgctccctcacccccagcctgaagtgaaggtgggctaatggtgggtgcaggctgttccacctggcagatggagctactatgcctgcctcggcgaccaacgcagcagatgcagccgagaagggccccagggagtggagtcgcagcaccggctgccagctgctctcttaattaaggaatgtggggagtggcccctttgaactcaccagctaatttactcctgtgcactcccctctgtggctgggtaattaatatggtgtgaaccagtgattagcaagtagagagaacctgcctgccacagacttaacccttccctgcatctgggaagaattgctgccttcttagttcgtctttctccagtggtcacatgggcagagagtttttccctttggggaggtgggatatttttcagtctccactcaacctcctcctaccccctttctcagcttccccaaaactcccctcaaggaaaagggcttcgggtgggggaagggctgcaattcattcctttgcttggatggaccactatgggtgaccaactctgcggagtgggaacgtaactgcccactgtcttctccagaggaattcgggacctggctccacattggccccatacctgcatcccacagccctcccagtcctaggctttgacattttagaatcattcaattcaatccaacagatgcatggagggctttgcctcatcgaaagcctgtccttggcaatatacagggtgcagaaatgaaggagatccctcccctcatggagctcccagtctgggagcagagagtcagaacaggggactgcccagcttgaaacatgcctttatctgatttacccaggtttccccacttccctctccctggccatttagtagcaatagttagtatttgagtgctaactgcacccgaccccaagttaaaccttcacatgtgttcattggcagtactaagaggtaggtattgttattgctccccatttcacagatgaggatactgaagcacagggaagttacttggctcaaggtttcacagccaagatttgaactcaagaagtctgaatcatgcttgagttctgaactcctaccctcatctgattgtattcttaagtctcacctcaaacaccaccccctccacagagccctccccagacccccacctgccctggcagggtcaaaggtgtcctccggctctcacagcctccagggcacacatctgacattgttcttgctacactggttataattattggtttatatataccatcttctgtgaactccttaaggtcaggggctgagcctttcatctctgtgtccctaggtcctggcacctaagtagatgctcaataaatgcctgaggaatgaatgacggaattggcaatggagtcgtaaatgagttccctcccttgccctctccacccccatgacaggcagcttcccagttctgccctttcctcagtactctagacatttccttcatatgcagtcccttctccttctcacaggaccatcacaacagacaacagctgttgttcaggttccctggcccctttgttctctccaacctgccctgcctgctgtcctcccactcctacttaaaacatgcaacagcccctctcttcaagcagtgcttccggagcggtcccccagtccaccagccacagactcacgctgagtggggtgcttgttacaaccacagattcctgggccctagctcaccctgatggcatctctgagaatccaagtgctgaacacagttgagagccactagtctccagaagaacttaacccagttttcaaggcctccacaatctgcccccaacctccttttccattcttcccacccagccctaaaggattcctgtctgctgtcccttgtcctctgtggagcctacttggtattttcccacagccacatccctgcacgctctgctctcccctcctgcccagagcccacccccaacctctggctctctcctttcctcatattatctaaaccatgcccatcttcaaggcacagctcaaattccaccttctcaagaagcgtcccctgcccagatccgcgaagccctctttcccacccacttctgaggactgactacctgtttgcacaaagtggtgtctgtctgcagataacccttcactttccttggtgtacctatctctacattttggttgtgagtacctggagggcaaaaaccttatcccaaaatcctcctgctcaccacccacccccaccccatcctatatgcctagttcctggctgagtccaaagctcagtgtccagtttgattgacaggcgagaggctgtgcaggaccagatacgatgagccacactccagactagcaggaattttcctcaggggcaacacgtcctctaaaaaccttcactggcaagaaaccaagaaacttgaagtgagaagagaaacaggatgaggaggggataactgtggcaaaatagaccacacttcaaaggctgaggttcaagttccagctctgcctctctgtgagctctgcaaggggcctaacctcactctggttttcacattttcccatttctaaccaggtaacaagatgatcctctcagaggagagttgcaaggcttacataaagccagatgtgtagccatgtctagaatgtactcactcacttaacaaatactcatgaaacatctgtaatgtgccaagcactgagggcaacacagaagggaacaaaagactggctaaacagtctgtgaaaaccagaaaactgtcatcaacaacacagcaagagtaaagagggaggtgtgggcatgcacaggacacaaggagagggcctctcacctgcctgtggtcaggaagcctggaaggatgtcctcgccgactgcacagccatgttctgtttgcaaggatagagggagcagcatgcctagtcggggtggtggggaaagtacaacacagggaagtgtgaaatcagtagttctgagaaggaggccttctggcttgggatggctggagggcagaatgactgtgggcgaccagcctggagaagaaggcctgactcaggagggcctgcatgcagagcagagttagtcctcatcctcaggtccacgggaggccacagaagcattttaagctagaatgaggatgacagatagtagtgaggcaggctgagatgcaggaaggccagcgagatccagcaaggaggatgtggcttgtgtgggggctgttgtcgccacgtgttagccaaccatgtgcatgtgaaagaggctgacttacaagaatctgctcctgtaagcccagagaggcccagggacaacttccactttattctggatgttttcacttttgggacatcctgttctgagtcaagattcctccttctgaacatgggactttccagaaggaccacagctcctcccgtgcatccactcggcctgggaggttctggattttggctgtcgagggagtttgcctgcctctccagagaaagatggtcatgaggcccctgtggagtctgcttctctgggaaggtaagtggggcaggcagatagcctgtcctcggagagctgaaggcccctccccagctgcctatgccagacgtctgggcagggatccctcgacctgggtgagaacccagaagctgagggtgggtaggaaagactagaacaagctcttgggcaacattttaagctaggcagatacaaagagatgcagggtcctgggagggaggaggtggcagcttgaggggtattcttatctgtgagacatgagctgttttgtggcccagagcagtaaaaacggagccagtgggtgatactgctggtttggagagaaagtcggctgtgagaatggtgaggacccggcagtgttagcatgcagaaactctgcagagtttgaggagagtagcagagggcagggcagagcagggttccccacaatcagcagagtgtgttttcaacagcctgtgggggagctgaggtccctccctacaggcctttataaggggaggcaagtactaagtagggatgagagaggctaaatgtggcccacgtggacttaggggtggccgacggtggtgtgatgttgggatggctgatacacggggtctcctccacaccgggcgatccctctatccatctgatgcctgagttcccttccttggtcaacaagcagccaacatgacatgggtcaacactgccgggccatggatgagggtttatggggtgcagcaaagattaagatgatattgtttacatcagaggctcatagggactttgggttgctttgtttcatctccttgcctgagttcctggccctgagagctccaaagcctgcagatttcttcaatatttctaaacatgtgcaggaaatcacaccttaacctcaaaaaaggccttggtctgtttggtgagacaaaaataatttgccttttttttttttctttgagacggagtcttgctctgtcacccaggctggaatg

SEQ ID NO: 4194 - DNA, 6000 bp, Homo sapiens
ctgggtgcttttacatcctattttctaaattctatacagtgtggttttaacaataaagaggataataaaaatactctggggagagattaaaatgacagaaccagctgggtgtggtggcgcatgccaatggatgcacaactctggaggctgaggcaggatgacggcttgagcccaggaggtcgaggctgcagttgatcatgccgctgtactccagcctgggtgacagagtgagaatctgtcctttttttttaagggagagagaagaagaattgtttttttttgtctgtttattgttttttgtttgttgttgttgttgttgttgttgtttttgagacagggtctcacttcgattgcccaggctggagtacagtggtgcaatcttggctcactgcagcctctcaacctccctgggctcaggtgattctcccacttcagccttatgagtagctaagactacaggtgcatgccaccacgctcagctaattttttcgtatttttattagagacaggtttcaccatgttgcccaggctggtcttgaactcatggactcaggtgatctacccacctcagcctcccaaagtgctgggaaaacaggcatgagccaccgcgcccagccagcagagatttttagaatctactttgagtagactgaaaagaaagaccatgttgaaggaatggtttaacagataaagaaaaaaaataagataaaaataaaagaaagaccaaaaagaaaacggaggagcagatgttaaaggagagatggggagaaaattcaacaccatccttgtagtccagtgaggaaactgacacagcagcaggacttggacagccactctggggctctgagcccaacctttttatttatttatttatttatttatttatttatttatttatttatttttgagacggagtctcgctctgtcgccaggctggagtgcactggcacgatctcggctcactacaacctccgactccctggttcaagcgattcttctgcctcagccccccgagtagctgggattacaggcatgtgccaccactcccagctaatttttatatttttagtagagacggggtttcaccatgttggccaggatggtctcaaactcctgacttcatgatccgcccacctcggcctcctaaagtgctgggattacaggcataagccaccccacctggctgatcccaaccttttaacaggtcactataacctgagggagtgggaggacagagggctggagaggcagggagagtgagaagtcatctttcttggacacttgtcatggccagtccaggccttcccggctcccctcatctcatcccccaaggtgggctccctttggaagcagaaaaactccacccacactcccagaagacctcagaagcctgatagcagtgacaagaccacaggccctaaagaaaaaaagaaaggagagttagagggaatggaagaaggagaagaaggagagatgcccagaggggggttggcagccgagaggaggaccagaggagcagggctggagagctgggcccaaatcaggactgggggagagaagtggggtgccggggcgggaggagggacgatgggggtgatagagcctcccagctcttccttccctcccactctccctcctcctctctctctttcatgatcttgaaacaaccttcaagtctgggctggaggccccaggaggccagtcacttaggaaacaaaactgtttcttggagaccttgaaagcccatctgcagctgagcagcgtccccaccccctccctgtgcacacacacattctcccatggactctcacgtacacccacacccggcttcacatgagctccccaatggcccacatgcacgcacacacggactccacacttgatcttagccaaaaggccgagaagcgatgcgcactcacggactcacacgcacctctgtactcatgcttgcatacagacaaccgattcatagcagattggccacacatccgaatgagtgttgtcctctcccctgaggagctcctcctttggaatgtggtttggtaccaccactccgtctcatacctcacacaggacccaacgctcaggtcctcccagtcattaactagcacacatctgtacacaggcacatgcacactcctgtctctctccaactgtcttggtctctctctctctctctctctctctctgtcacacacacacacacacacacacacacacacacacacacacacttcttaccaaccaaatatttgattcaggaccactccatccccactttgcccttggtggatccccctcctgatctgtgactttctcagcccactccccagcccaggcatcttggccttccatcctcctgctttcaagtctttctttctctctcctttgctcctcttactccaagggccttgatccaaactggtactgctgactgtgtctgaagaaacagtagcccaacccaggcactccagatcaaacgatcaggtgtctacacctgttaatatcctggaggctgaggttcatggtggacaagaaggaggtagaccactccagagcctcagctctcactgggcaaggagggtggtcagtgatgcacggtggaagtataggccctgggtgtcctgcccactctttgatttctctgagccctaaatatgtgagcagcagcgcccctcgggctgtgctctcgcccaaatgcagggcatggcagggagccccagcaggctgtaggggcagaggaagggcacatcctttccggtattgagtttggccacagggaccagagccagggcctttggaaggactgggcagtactgggaggtgccagcaggggtgaggggtgggatgaaaactgttagagtgcttgaggtttgcacaccttcagattcggggactgacgttttctctcctatctcaggttgtgttctggagagggctgggcagaagattacccaggaattccaacccaggaacctacggaacaggcgcttcctaaaccccaatttatcatgttgttcccacagcccccaggcaagcctgccccaatgttgatctccctagctgcctcggggccactctggagtgactttgctttagacagtctctcctggtgtctaaccacaggctttcccgctactcccctctcactctctccttaacacacaggggctgaactggtatctgttcccttcattgtttcctccctctgcccattctctcccaagaccaaatctgagctcggagaggggggccatgagaaggccctgttggccccatcctacccaccctttctgactgtaacccagagagggaaggagcgtggaagtgagatgtgacctaccaggtccctgtaatggaaaatctcaactgcaggcccggagggggccagttatttagggaattcagatgttagccttgtgccctgagagtggatttgctagaggagaggctgataatccctctgcagggagttccctctggggccagagatggacccagcccagccagcaggcaccttaggcctctggccaaagccccccttccctccctcccttcctctctgctttctttgcactcaggacacttagacctgccccactccgctggcttcccctcactccatctctgtgcccagagaaacaggggtactccaggggaatcctgtcctctgactgttcccagtagaaggcgggagcagaattttttcttttctctctgccccttctgggttccccttcctctctgtgcccctcatcctttggattactcatcaaatgagcagcaacaacacccctagaccagctggtcctgtcctgggtcatctcgttgtccccagtttctagctggtataaggttaaagataccctttccagccccaggcaaagccttaggcatttctgggattgctcctgactctgatgggcatcctcactcctcagacatttccaatctcccccacttcactgcagagaggcctgttctccagcctcagtcctgcatgctgcagctttgcttccccttccccactggaagaaggaaacagtcgctctcctttcccgttcacatgtctgatatttgctatgatattgaccttcacacacatcttagaggttctgtattttcctctcttttgacttctccctatcactactctactcaggcatagattcagtctagagctcttcaacagcaatgaaacggtaaacgaggggtaaacaaaacccagagatgtcatcaggtgcctgctaggagtcccacccgttcccctctagccctggcctgcccctccctaccagagtcttgattctccttcaaaactttggagaggttacatctggcagggtttggggacaccctcttgcctccatctccaaacttcccgctgcctcccgagccacctttgactcctcctgggccccccttccaggtgcctcaagtgcagaggtcagccttcggttcaaattctatttctgggcttcagtgtccctgcaacctctataatagaaggaacagagtggtctatgtttctttctttctctgggagattggatgtagactcgggagacctgagttctggctctgtcttatcaattcaaattgtttaatctctctgagcctcagtttacccacttggaaaagaagagttaggccacatggtctctgtcatcctgggattctgagtcaactgctccccttcagccagatccaagggggcatatccccccaacctgggacccaggcccccttcccttgcagcctctctcagttgtgagtgccacaggccagagggggttgagaggagccaagggggggcatgccgtgggacaaacgggctgtctagggccagtggctaaaggggcgggaggggaggagtcctcagggatcctgtttcaacaaacgtttctttcggaggaggggaaggcgggggagagggggagaaggacctatttaaagctaccctgttgctttggctttctctgtctgccagggtctccgactgtcccagacgggctggtgtgggcttgggatcctcctggtgacctctcccgctaaggtccctcagccactctgccccaagatgggccgtggggtgagtatccctaaagagcaggggtcgcagtctagagggtgagggaggctgctgaggaaggatgaagtgggaatgggatgtggaaggagcgggagagaggagctgagtgggatacttggaacttgaaactaacagtctccaaactaccaatgtgtgtacagatcccacggcggtcacataccctagtgctctcctctcctctgcacgccccagccccctgcccacagttagacccacagcccaccacacatgccccctccatctctccctccaccccactcccacatctctagtccttccctgcagcagtccctcctctcactgcatctcccggcctcccagctgaaaggatgtttggcactgtgagtcctcctgtctttgccacctcctgaaaatatccattcctctgggagtcctagcctgagaggctgggggtccattttgaggttagagaggggcagtagagcatccggctcccagagtcaccaagtagttccggacaccagctccaggggccctgagtgccaaggacagctgggcggggtgtggggaggaagaatgatgacccagcccccaccccagcacccctccggatgtcccgagcagcattgtccgtgggttccaagccatgggctttgaggactttcccagaggctggtgacaggtgaccccccccccagtccacccgtccatggcattctgcagcaatggctacaccaagaggaagattaacaacaatggggcgggcagggagagggctttgaattcttggaaatgaaattcccatatggagaagagtggcccaatccttttacatgctgtgcctggctgctttccttttgtggaatactggcaaaagaggacacagagggaaagggcatgctgcggaacaggagggtatgaggaag

SEQ ID NO: 4195 - DNA, 6000 bp, Homo sapiens
ttgtgtttaaaagttctacaaaggccgagcgcggtggctcacgtctgtaatcccagcactttgggaagctgaggtgggcggatctcttgaggtcaggagtttgagaccagcctggccaacatggtgaaaccccgtctctactaaaaatacaaaaaaaaaattagccaggcatggtggcgggtgcctgtaatcccagctacttgagatgctgaggtttgagaatcacttgaatccaggaggcagaggttgcaatgaaccgagatggtgccacagcaccccagcctgggcaacagagactccatctccaaaaaaaaaagttctaaataagccaggtgctatggttcacgtctacaaccccagcactttgggaagctgacgcaggaggattgcttgagcccaggaatttgagaccagcctgggcaacacagtgagacctcatctctattaaaaaaaaaaaaaaaaaaattagcctggggtggtggcccacacctatggtcccagtcacttgggaggctgagggaggaggatcgcttgagtctgagaggttgaagctgcaatgagccatggttggaccactgcactccagcctgggtaacagagcaagactctgtttcaaaaaataaaaataaataaataaaaattctaaataaataaaactttgtttttagcgagcataactccctaaaaatccaagaaattcagccaaaacaaagcaacagcatcaataacaaaaaaaatcctagaagcaataaattcaaagttacagggtatatgggtatcagttttcaaagaagcaaatgtatccctaaatattagggagacagaaaatacagcataaagagcttctatttacaatagaatgaaaacaaattacgctcaaggtttactgtgtgcagcacatagtaactattaaagaaaatttaaaagtacaatgagaaaaataaaaaaacatgaattcatggaaagctaaacttgactgccatttgggaaggcagaacgtagtaaagataaaaataagttactatgaaagagtcaattcaatatcaattaaaatcctcgctgcatttttataaaacatgacatattggttgtgacattcagctgcaagagtaatcaggcaagaatctcagaggttttttctaagtaattatgaagcaaatgaatagatcactgatgctaacatatttaccccaacagattttaaaacacatcagaccactggccgggcgcggtggctcacgcctgtaatcccagcactttgggaggccaaggtcggcagatcaagaggtcgggagttcaagaccagcctggccaacatagtgaaaccctgtctttactaaaaatacaaaaattagccagacatggtggcgcatgtctgtagtcccagctactcaggaggctgaggcaggagaatcgcttgaacccggtaggtggaggttgcagtgagctgagattgcaccactgcactccagtttgggcaacagagtgagacttcgtctcaaaaaaaaaaaaaaaatcagaccaaagtggcaattatcaaaaccttgtagcattaagataaaacctgaaaactcattagtcattcaacatctattcagggactatttgtggaccagctgccctgtgccaagcactatcctaggagccaggtatatagctgtggaaaaaaacagggaaggtccctagggtcatggagaaccagacaagtcaacaagacaagtcaatcagacaagtcaacagttaacaggcaggataatttcagagggagagaagtgttgtgaagatcaaaagtgatagagagagggctggcgccggaggggctgttttggatttaactatgagagaaggcctctccgaagaggtggacttttgagctaagatctctagaacaaaatgaggtttctaaaaataatttcaattgattgtatctccataaagttgcttttgggcaatgcccatctgcaagactgagctaagtgttattgtcacatagatgatgcatagaaaaacatatgaattttaactttaattctaaccttcttcttaagaattttatgttcatctacattaaacacaaagactgggagaaaacatttgtgttatatatgacaagggtttcctacaaatcaatataaaaaagaaaacaatggaaaattgggcaaattgtaagaatgacaatttacaaaataaataaataaagtccaagaccaggcatggtggctcatgcctgtaatcccagcactttgggatgcccaggcaggcggatcacccaaggtcaggagttcaagatcagcctggccaacatggcaaaaccccatctctactaaaaaatacaaaaaaatcagctgggtatggtggcgtgtgcctgtagtctcagctacttagaaggctgaggcacgagaatcgcttgaacacaggtggtggaggttgcagtgagctgagattgcaccgctgcactccagcctgtcaaaagaaagaaagagagaaagaaaggaaggaagaaaggaaagagagaaagaaagaaaagaagaaatgaaagaaagaaagaaaaccagaaagccagtaaacataagagaaaatgctcacattgacaatttaaaaatgcaaattaaaactacaagatatcaaagttcactgattataatagtaaaaatcaaggtcatctagcataatcaaaggtgtggaaggcagacattcttgcatcctgttgttgggatgcagatagataaacacttttaaagaccaattggcagaatcttttaagattgttaatgagtgtactctatgattcagcaacaggaactgattctacagaaatagaagctcaagggcctgatgatatctatgtgcaagaatgacactctagcaattttattaatggttaaaaaaatggaaaatatctcataaatccatcagtaatgggaatgattgaatagagcatggtcaatacagaatatggaagcctcacagcactgaaaaaaagaagctttatgtacatgacaggttggtagagagttgaatgattgtttaaaagttgaaaaatacctccttttagatatctatttgtataaacatagaaaaaagactggaaggacatgcagcacattgttaccagcagtaacttcagcagtggggagaatctgagtttggagggagggaaggtggggctttcaatttttatcttaaacatttttaatagagaagaaaaatccaatctgttaaagaaatagacgatcatttatcccagctgggaagggagcatttctatttctgaatattcaaggaggattgcatcagcaccaagatgaatgtttccagatacagtcatatttttaaaaagcatgcccaaccaaaatgcaattaaataaatatcaggccaggcttggtgtctcacttatgtaatcccaacattttaggaggccaaggccaaggattgcttgagcccaggagtttgagaccagcctgggcaacacaggggcaccccgtctttactaaaataaaataaaaaaaattagccgggcatggtggcacatgcctgtggtcccagctacttgggaggctgaggtgggaggatcacttggacctgggaggttgaggctggagtaagccataatcgcaccattacactccagcctgggcaacaaagtgagatcctgtctcaaaaagtaaataaacaaatatcaaacaacagaatgggaaaatctatgtgacgtgcataattgaaaaatatatataatggttgacagaaaagtatagatgcttcagattattcttggaaggaggtagaatcctatggacatgcaaaacatatatacagttaatatagtcaaagcacttactgagacaccagagaaggtcaatggaagaggtaagtacatcattttaaaatgagaaaatgcaacgctatcacatggaaaagcatatttttaccctcactgagaagagctgcatattaatccacaaataaaactactactgaattcaagctacctattgagcacatactatatatgtcacatagtgctttttgtagagcacctcacttaaggtagaaggtatcctcttttaaaaataagaaaagagaggtacagaggttaggtaacttgctcaaagccacacagctgacaagtggaggagttgggattgaaatccaggactggttccagagcccaagatctgatctattctgctagctgatctcctaaaattaaaagatcaaacccaatgttagtggaaaagtgtgccttgctaaaaaacacacacagagtacctgctttttttttttttttgagatggagtctcaaaaacagacgggagaatattagtccaaactgcaactgcaccattttgtaagctccctgctatggttttttgtttgtttgtttgtttgtttgtttgtttgtttgtttgtctgagatggagtcactctgtcaccgaggctggagtgcagtgatgcaatctcaattcactgcaacctctgccttctggattcagatgtttctcctgcctcagcctcccgagcagctgggattacaggtgcccaccaccacacctggctaaattttgtatttttagtagagatggggtttcaccatactggccacgaaggtctcgatctcagcctcccaaagtgctgggattacaggcatgagccaccgcgcccggccgaatacccgctttatttttgagtcatctatttggcatacctctaagcctccaaagtctgcaggaccacacaagaactttgttctagttctgccctcagactgaaactctttctgtagcagggcctgctccaatcgtcctcaaacccaaagactgagacttctaggttcttggttaaaaccttcatgaggcctttgcgacagcagacctggaccatcgccaaggcaagacttctggattcttggttagaactttcaggaggcctttgtgatgccagacctgggtcattgccccagcaaccacagggcctgggactggggggttcccagatccttgaagctcactccgcctcctcactctcactgcatttcccaccttcctgtgggccttgcggcatcttcatcactgaggcacctggttacgcttcacctcttgtttcctgccctcactgcattccctcacctctacctttttatccttccaccctaggcttctctcctccctcttccctcactcctgactcttcctcttcccagcggacggctggaggaccgctcagtctctcctctctcacttcccttcctctctctcaccttcaccacccaacacctccctccctgcctctttctttctgctccctcattctctccccaccactctcttctcgtggcccccttgcccgcgcgccctcttcccttccccttgcctcactctctcagctttcttcccacagttgagctcgggcagctctttctggggatagctatggggctttgggggaagaaagggacagtggctccccatgaccagagtccaagacgaagacctaaaaaagggcttatcaagaaaaaaatggtgaagagggaaaaacagaagcgcaatatggaggaactgaagaaggaagtggtcatggtgaggccacccaaagtgggcgctgacagctgccctctgaaaacactcctccacctatctttaacatcttaccttgagaatgaaacacacaggccagagccacatctcttctctgttaggctttggagggaaggagagggttaaaaaaaaaaaaaaagatacacacagagagacagggcagctcaacagcaagcacaggtatattgcagacacctgtggaagtgggggatcagcttaattccacagtccactgccacttacaggctgggtacttatagggatggatgggaggagtctgggctgtatggcctgctgcctggcaggatatcgataagatgttctcatgatgaggtgatttttggcccttgtttccacagaatataatcatggtattccctggacctttgcccagcaggatgtgat

SEQ ID NO: 4196 - DNA, 6000 bp, Homo sapiens
gaaaagactttacctttttatgaattaaatttcactggttcggtttgacacatagacttaatgaaaacaactaaaggaagtaaacagaggaaattttgatttatttttataggttgctagtctctggctctaacttttgctattatgatagtcagttgtctttaaagaattgcctatattctgtctgcttcctcatttcacactaaggccttccaaattaagcaattcaaaggttatttctcaatcttgatcttattctgaacactttctccttcccaaaattctcttcttccttggcatccaagaggcttcttctccctcttggttcatctcgaacccctcgaatcactgtttcccatactaactctacttcctctctctcccttaaatgatggtctgtcttcttattcaacgtactccttgagcaatatcttctactgcttctcctttggctcctcccttcatgacgacaaatcacaaatatatttctagcacagacacctcaactagactgtcccttaggtccctcaaaatcaccagagacaagatggaattcattatccattctcttccactccagaaaactatctcctcctgattttcctttcctagttaatgacaccccctttacccagtgacctaaactagaagcctgaaagtcagctcatttatttctccttattggcccttatttctccttattggccatctcatttatttctccttattggccatcacccaacagacacactgattcatttccttaaattctcacatccatctccttctctccatttcaaatgctactacctaagctcaggtttcctaactggtatttttgcctcctgtcttgcccaaatcatccaatcttttctttaattaccaccaagtaatcattttaaaaacatataaatctggtatcactcctgtatttaagttcctcaaatggctcctagttatctgcatgataacatctaaactcctgagcgccacaaacaggtactccatgatctggcccctctcatcttctgccccttctctcaccatttctccaggttttctccatacaaaaccaataacagctgccctgtatctagctgtgtcatgctttttgtctttgcacctatactgctctttcctatttcactgtgaatatctctctattatattgcttaccaaactgtacatgctattacttggatatatgtttatcttctgtattagaataaaagctccttgaaaacagaagccatttcttatttatttttgaattccctaaaaagaaaacagtgtctggtacacagtaagcattcaataaatgtttgctgagtaagttctccggataatgttgtcaaaggcctgagctctgtatgaatgaaatttcctgtctttcagttcctttcatgattcccaaaccttcccacatcctctttcctttattctcagttatgacagaccctctgtaccttaatcttatagtcatctcctccagagacgaacagtggctgctgcttatggaagtcaatgcctcgcactggacctggtggagaaggcaggcaatgtatgttagacagagctatcctttctaatctctaaggtgattcctattcaggatttttcagttctatcatttccacattctttaatcatagaggaatccatgtcaaacaaggcttaaaataccccaggatattataaatacttatactcctttaacttcctcctagaaatatctcaccatcatgttcatcaaacttgtcaatgagagtgcacatccgatagtcccataactggatgaccccattatgtaaactagtcaggatccaaggtcttttggggtgaaagctgagccctgaaaaaaatagaaaatgatacaatgagctaactaagccccatgatgtcaccttctgtcaattctgataagaaaaagaaacatcaaggttaatcctaggttcattcattcgacatgcttgatgattttttactggatgccagacatcgtgaattttatgtttggtactagatttttgtcatattcctttacatattcttgggctttgctctaggatacaattaagttacttggaatcagttgatcctttcaaggcttgcttttaggttttattacagaggggctacagcagccttcattctaggcttaatctggaaccactattaaagcaatagccatctgaggtctctatttgaagccctgtaatattaggaagtctttcctttctggcaagtaggaacacaaactagtcccagttcactagtgtgaactctggggattgctctgccttctcctttccagtggtcctttttcaggttttgaatagttttctcacatgcagatcagtactcaaacaaagacctgagaagacatcctgcagatctctagtgctctctctctgcagccccctcttctccggtattttgcccaacaaaatctagccatctttgcttccccacactctaaatttatgtctcctcagaaagaccaagggattcccctcttcactgaagcctaaaaactctctaggcagtaatctacgacaatcacaggactcaccttgtttatttgccttctctggagaattattttcctgcactgcctgttgcccaacatctgtgagcaatgtatgaacctttgtttcatacattttgttcagttgtatagttaaggtgggaaggtaaatctggctcttgttattctatcatgactggaaatggaagtccccagaggtaacaactactaacagtttgaagtgtatcctttcagatttttaatgcagttacacatagacataggctttagtattttatgaaagtggggatcacgttatgatgttgttctgcaaacttcttcctcacttaactatataatatggatctcatggaagtacatataaacataacctcattctttttaactacaagggacaaatgtactacacttatattattctaacaggcattttgtccgccaatttttggctatcagaagagcctactgaagatacttctacacataatctagcctatttgcattattactgccctaggctaaagacctgtgagattgctcaggaatagaatatgtgcacttaacattttagtacatatagtttaaatgtaaaaacactgtatcaatatacagtctcatgaagtttatggaggtgcccattttgcacacaggctgctatcagctatttgttgttttgttttataaatctaagaccctccccccaaaaaagtaacttaactttttttttcttgcatttctttcattactagtgaggtggaactattttaattatttattgaacatttacaatttttcttctaaattgtctatttttccattaggttcttttttttaattatgatatataagtacactcaacaatggatgtttgccctcaaatattatgacatctttgtttttccttctgtactgcccagcaagaaattaggagcagaaaagaaaactgaaagattatgaagacccatttcacatttcacctatacaggtctcagaaattcttaatggtacccatctttcaaggtcaagtttcccaagagacttagaaactgctcagaatatattcacacattgataacaacctccagtttttgagctactgagtctacaccaggcgctgtaataaatacactccatatactttctcattttaatactctctataaaagacgattttacagatgaggaaatacagacttagagacattaagtaagtcatccaagtcacagcttgttagtggatgtctcaggattccaaggcaagcccatctgacttcaaagaccaagttcctaaccactttgttacgctgcatctcactaaatattctagatactattttttccaggtcttcggagaccttacttctctgactttcacattctaacgttctgaggctaatactgcgatctcagtatttgccctccacccccaacgacccacactcgagctctagagctgccgtacttagcaaataaaaatacgagatttccagataaatttgaacttctggtaagcaacgacagactaaaaaactattcattgtttacctgaaattcaaatttaactgggtatcctgcattttatctggcaactctatcaagttgagactttattggggttataagcctcaagtactatttccgggtagtaaataaagccgaatggaggcactgatgttgagatgctgcagccaaggcctccttaagtgaggttgccactactcgtctccaaaaaggctactgactcgggtgcgagtaacagagatcgagactcagttcccagggccactccatataacacagtcatcaaaaagccaacagatcacagggcctttggagcagaacaacacaaatcgggagcacagccaagagagaaagggggaagaaagaatagggagggggtctaaggaatcccctgcagtgtgggagccactttataggtaaatcgaagcccaaggacacaccaaagaagaggggactggagaaccgctagccaggcccaacctctctcccaccctccgtcttcctccgggtccgtctggtgggcccatttcgaccaacacctctacccattttctcttccccggtgtcagcgccgctcctgacatccaacctccatgttcccccttttattctccactacctttgacccgcgcgctcttggtctcgaatttggttaacatctctcaggtctccgactccgatgtcttaatccgagccccgacacaccctgctgcccttcggacgcctccacgtcagcgaccctctcccgcggtttccggaagcgcctggaaacacgaacttccggtctcttaggctccgggccacagagacggtgtcagtggtagcctagagaggccgctaacagacaggagccgaacgggggcttccgctcagcagagaggcaagatggctacggcagggggtggctctggggctgacccgggaagtcggggtctccttcgccttctgtctttctgcgtcctactagcaggtgaggcctccccgcccgtgagctccgttctctaaggggaactctcggatcggccccgccgcgaccgccactgtctcccttctggttcctgctgcccctctgtccccccaccctgtaaatcctctttctttttcgttcccacgacagaagttccccctttgcctggacctgaaggtcccttctcccccgcagcacgtcgtgtcgcttcactcccttctctaggcctcttcctggacttcgagcctgaccctctcccactttgtccagatgtctcgtttttcccacaaccccagccacccaccccacagtcgaaaggaacaggtgtgaaagttagctttcttcctcgcgtttagactttttgagacgaaagcaatcttgttctgtgggtgctgtgcggcgcttaaaaggtggatttcttatttcttcctctgttgattacatcctaagtctgtgtccccctgccttgcctcaggttttttttttttttttttttttaatcagtaaagcaagaataaggtaggatatgggtactcttaactgtgaagaccctgaagtaacaattcaaggaacttttggcatttataatgtacttaagtgtttgctgatacgcgttcatttactgatacatggctttttagttggtcaagccctaaaatgcaaatgcctgtatataactatgactgtgccttcccccaattcacattgtttttaaggatcctcaaaggagaaactacagctgccccacactgtgggcacacaaatgacctgctgatgttaaattaactgacccgtgtatgtcataaggtttctctcaattctgttcacactcttggaaaaatgcctcagaaagttttcttagcccagcacctgtgtattaaccaattagtaatatacatacaggatatacaagcagaagtgtgatcacctgtgcaaccagaatctggcaaatctaaggtcaaac

SEQ ID NO: 4197 - DNA, 6000 bp, Homo sapiens
ggaagccatggattgttttaggtaagagagtgacaggctgatttccctttcataaaaatcacattggcaacatgggaggaagacggattggaagggaatgagacatgtttggaaatgataaaggtctgaataagccaaggggatagaggtggaaggaagataatgttgttccttttaaacctattacatttaagatacccaaggaatatccaagttaaaatgtatggtaggaagttgaaaatttgagtcttatgctcacaagatagacctggatttagcagcactcataagtgagtactgactgaagccacaggagtgaatgacattgctttggaaaagcatgtggagtggggagtaagggggccaaaggctgaattctgggaaataatagtatttgaagtcaggagtagaaaacacattggaaggatggctggggtgcaaggagctgaggagtgaagggaggaagagagatagtaaagaatctatccattttttttttttttttttttttttgagatggagtttcactcttgttgcccaggctggcgtgcaatggcacgaactcggctcaccgcaacctcctcctcctgggttcaagcgattctcctgcctcagcctcccgagtagctgggattacaagcacctgccaccatgaccggctaattttgtattttcagtagagacggggtttctccatgttggtcaggctggtctctaattctcgacctcaggtgatccacccgcctcagcctcccaaagtgctgggattacaggtgtgagccaccaggcctggcctaagaatctactcttttaagaaggttggatgagaaagaaataaaagcgaaggctaaagcaagaggaggctgctgagtggaggaaggtatttcattttattatgtctgctgggcaaagatcagtgaagaggccgaagttggttacaggagagattgtgaataatggatggaggtgggaaaggacaggatataacgcacacctgcagggcctagtcccagccaagggagctggagagtgtctattcttcccaagaaggaggaaggaaatcagaaagtttcattcagtggttctcacattaaaatcactgaggtatcttaaaaaaaatgccaatagctgggtcacacctcagaagtttctggtttaattagtctgggatggtcctgggcattgatgtgttttcaaagcttcccaggtgattaaaatctgcagtcaaagttcacaaccactggtttaattgcaggtaacattttagattaatgataatgggattggatttgaggaaactcacacttaataaaggttggatgaatagggagtggtcaaggtttcatagatgaggaagggagaaagagaaggaagctagaagggaaggcagctaatgctaacttattgaattttatgtgccagagatatagaaatgaatgaggcatggtccttcttcttagagatcaggatctcacatgacagacacttcaccacaagcctatgacataatacagttcttgaccagttaagtttttttgtgtgtgagctacttttattcttttttttttttttttttaactaaaagtgaagggggaaacccctcacacccagaacccaggtatttcccaatatagactgggtctggaaatccttttgtgagcattgagagtagcctttctgggaaggtgggtgctggggaaagatctgtaactattccgggagatcaacttgtacccaggctcatcagcagggctggaagtagatggtgattgtggccctgcatgtgggtacattactgcagtcacctgtacctgggaggtggctaaaattgctaattgcttacatggaaacactttgatggccattctgctatagtgtgaagcttctatgagtaaggtaccaaggattccctttctctgagcagcattgtaaaaaggccctacttttcatcagagcagaaaacctaacttttgctactgtggtctgggcctgacctccagggacagcttcatccacacaggaagtaggtaggtgcttctctatagtctggaccttccctcagagagagtctactgtcacttcttgagttccttgaatcttccccaggagggtccaactcccagggctcctgggaagcctctgatctgaccccaccagccccacctccacctagtgagctggtgaggtgttgaaagggctttaatggagggccctggcttttagctaggggcctccttccccgaggaagagtactgaaagaagtgtcctagagaagtgttctctcctaagagaagtatcctaggcacagaacagagaggggaaactcgactgggaattgactgtggcactatgagtatatggagggtgttccttctgttacctcattagaccctttttatataagcagaaattgaggcttgaagaaattaagaaattcgactatgtcctcaaggacaggagctgtacaaaatccaatctgttccattctattgtccctcaggctcttggcctccctctgttattgtaggttggcccctttaggaaaatctcagttgaatgtcatttcagtgctctccttccttctaaagaattaagctaggtcccttagaccatagggcacatgggccttctagctgggtctctgtttgcttactcagtgacttggggacgtgtgaaatccagatgggattctatcctgaggtgaaggtagaaggtaatacagagaattgctgaatgggacagaccacaccaataaaattttttgttggactctgtaatccagtgttttcattgcagagatgtaattgaaagcccccaacctcaccgtcagagaaaggagggactaagcttattctagcctgatgcctgatacctgttaattgggaagccttgtctgttaacatcctgacttaggtttcaagctttcagtggggccagactatggaattatctgtaattctggcatcagaagccctttttccagttctttgggccattttggggtctgtgaaacaggctagcagcatgtgaagataattcacactaaatctgcctgagagtcaagacagtgccacggcagccccgactctgtgtcaaattacacactagctgcctagcactggggtgtgctttggggcagggctggggacacccatgtcctccctacttcccttaacccttccccagctctcctgccactccctcatacacctggtcgtggtcactgccaggagccccagtgcggcccagtgcctgcacatgataggcacaaggtgaatgagtgcctggacgcatgcagggacttgggtacctgaaatgatgattctgcatatttcatgtagtcttgatgctgagtcacctgcttacccatactactggaggaggggatgaggaaagacagagtttgggcaaaggagaaaggaagtgtgttttactgttctgcatctttgaacaatgcagcatagttggttctgtcctcatctttggacaggttagaatgaaccatcaaaaggggtgagattaggtctcaggaaatagttttcatcagggaggagcaaaaattcccaaacaagtgaggaacagaggctgggagtctctttctctgggattccttaatcacagggttgttcaagcaggtgccaggattggaaactgaaggaggctgagatattgaaaaggccttggcctgcttagggagaagtatgtgaagatgcttttgaaatgatactactctaagtggcgggttgcacggcaataacattaatgataattgaatactgctttcacttactccaaggggaacatggacttcccacagcccaggcttttacggtgtgggttcactcttgtagggtcacatgtaaaagaaccctaactggtttcttggcatactgggaggcacaaatgccccaaacgtgtaggatattttgtgagatcctacaatccctgtgtggcaccttcaactctaaagtatctgaaactcctgggatggacaatctgcctgcttggggttggggacccaactggccaaggcatttttcctcttggaggtttcctgggagaaggccccctctcctctgccattcaaactcccaggcgcccgcgtcttttcctcctccccttcttccctaaggcagggttccctttgtaattaatcccaacactcaaaccagaggggaggaaaaatgtgttaatgagggagcgtcccagactgactggggcggtcgctgctcgcagctagaactccaagtaattaaattatttttggaaggaggggatatggtggtgatggtgtcagggaaatccccgtatgcatgggaagaggcgtgcgcctctcgccactaattaaaatcagggatgaccctcccttctcggacccctagggggaaaaaaaaaatcaatcttcccacgtcccagattccattggattttgtgtagtcgggtccgtggccctaaagagaatatggccagccccagggatctgggggctccttctccgacaggaggggtccaggaagacagccccaggagggactgcgggctgggccaagtccaagaatcgaggcattcccctgcccaccgttcgggacccgagtgtcagccccaccgcggattcccaggatcggggagggccgctgggcatctgaaggcgcagggctgggggagcggcgactccgggaagagcggggccgcagacaatggacgcggcggtaggaggggcggcggctgtgggaacagccgggaggcggcacccgggagctcgcgctcccccgccccctgcaccccccaccctcatcccctccccctccgccccctcccccctgcgccgccggctcccgatctgattcctgatccttgattccttgatccttggtcccgccatgggagcctgagcgccccctattcccccctggcccccagcccccggggccttgagggggaagaggcagcggtctgggacggagcagggggtgaccagactcaagaacccccccctcaacatcccccatcgcgcgcgctgcctgtccaggagcgccgagttcggagcgacccggagcgctgcggatacaaaggcgacgggccgagcggggcgcccgcggagcccacccggcagttcgcagcggcgggtgagtgccgggccgcgggggcgcgggcaaagtttgaaaaaaaaagaagaaagaaagagagagaaaaaaagaaatggaaaaggaggaaaatcatgcaaggggccagggggtgcccgaccccagagcgagcggggtggcttatgggggaaggggggctggactccgggcaacccccttccggtccgcttccccactgcacagcggagtaccccccccaactttggggaggggaaggggctcgtggggagggggcggagcccaggcctggagagccggggactttcctgggcccgggcgggggccttaatgatcccaggggagccggttgaagccggagacggggagcttgtgttggaggtggggggagaggcgtggaaggatcggagtctggaggtattggaagccaagggtgttttggggtgcatacacccctcaggagcgtggggagggacggaggcaggtatgcgttaagggtgtagagtggagtcaggggggcgggttgggcagagtagatagggtgtatgtacagaccgaggatggggctggaggcggtagactgtgtataggggccgaggggacaggcgctggcatccctctccccactcatatttacccatctgggggactgtgggctctgcgttagtgagttttgaagggttggtggaggatccgtgtgcatgattctttgttttggtgtgtgtgcacgccttgacgtgctgcatgttcctgcaggtgggcccctggtttggatgtgtaggtgtttttctgtgcttgagtgtgtgtgcacccagggagcggctgaccatgcatctgctgtgtgtttggatatgtgtttatatgtatacttaggggagggcgtgtatgtctatgtgtg

SEQ ID NO: 4198 - DNA, 6000 bp, Homo sapiens
aatgaaatatctgctccaaaatcacctctaggtcaatttatacaggatatctcatctccatcctcattctgtttgccaagattttcaggattcataatcatggcactttaaaactactatttctgccattgccacatttgtactagtatggtgcacaaatgggtgatacctcataatggaaacattactgggtttgaggtcatcacaatattttagtttctggcttggctgtgctaataaaatgctgtgtaactttggggaaaatacctctctggctcttaagaaaataaggtcaatattagtaaacaagttgtcaacctgtgacccaagttagaaaaatgtcttgtttacaattatggtcagacattatgctcagtctcttattagttctcactgtttgcagattcctttggattttctacatccacagtgatagggtctgaaaataacaattatttgtctctctttctaatccagttacatcttctttacttttcttgtctcattgctttggccaagacaccaggtaattaataaatactatcagtgactagagaaatccttgtcttagtcttgactttgatactacttcttctaaaggttcagcattaagtatgatgtttgccaaagtttactaaacatttttgaaattatgaatccatatttttatcaaagtttttactatgtcttctgagatgatcatatgttgttttacatttaatcaatgtgatggactatgctgataaatttttgaaatattggcccattctcacattcatgggataaatgctatttagtcatggtgtgtttttatatgccaacggctttgatttgctaaagtgtcatttaggatctttgcaactatcttcataagtgatgctggcgtgtaattttcttttcctgtatttgcaggatttgtgtatcaaggctccttttagcacatatgccctccctttccatgtgctgtggatttctgcactgtttctcattcacagaaatttttcccttagttttgagcaaggccatacattttaatacatttgaaaatgctttatctatcattactgtgtttttcaagtccacatggattcgttttgccacttgacaggaagtcttttttaaaagatttgaccattatttcaatcaagtcagtggagagaatggatataaaaacatgtgatcagacatgagaaattacagacaagatggagtgagtgaatttatctctattcttgccactaattacaaattttaaaaaaaaaatcctggacataatatataaaacacaaacacaagaagattctaaacagttgagagatgaaggggggcaaggagcctctggacatgaggaatgacatgacaatgagttacccgtgttttctttttgtcccctgtgtattgtaggccatgtgctagataagaatataatctagaaacgccaatcccaaggattttctgttctctcctgccaaaagactggaaaggggactgctggaatagaagcctttaaacaataatcaccatattctagccaaacatcatgtggaaatatgggacaccacccccccgccaacagcaaaggccaagtggaaaacctatatttaaaccccccaccccaccccttggcagtaaggaatcatccctccccactccccactccccactggggtggcatcagaagaggctaagtaggaagactgaacatgcactccctccctgaagcaatgaggcactcctcccaattcttgctttgggtggtgtcagaaaaggccaaatggagggtctggatttttaccactgctcagcagtaatgtggtcccctaccttatcatcactgtgtcaaaaatcactcatcataacaagaaccaggacaatcttgacttgaatgaacaaaaggcaatcaacagacaccaaaaccaagacaacacagacgttagaattatcttacaaggattttaaagaaaccatagtaaaaatgcttcaactagcagctatgaacacatttaaaacaaataaacaaaaaaactagaaagtctttaaaaaaagagtagaagatataaagaagaaccaaagggaaattttagaattgaataatacaatgactgaaaggtaaaactaattgaatgagtttaatgagcttaatagcaaaatggaggccagggccagtggctcatactggcaatcccagcacttggggaggccaaggtgggcggatcacctgaggtcaagagtacaagaccagcctggccaacatggcaaaactctgtcgctaccaaaatataaaaattagccaggtgtggtggcgggtgccagtaatcccagctacttaggaggctgaggcaggagaatcgcttgagcccaggagacagaggttgcagtgagctgagatcgtgcactccagcctgggcaacagagtgagactctgtctcagaaaaaataaaaaaataaaaaattgcaaaatggagatgaaaaaggaaagaatcagtgtacttgaagataaacaatagaaaatacccaatctgaaaacagagtgaaaataggccaaaaaaaaaaaaaaaaaaaaaaaaaaatggagcctcagagccctgtgggagaaaaacaaaagatttataacattcatgtcatcagaattttaggagagaagcgagaatgtgaggctgaaaaaaaagtattcaaaaaataatgaaatttccccaaacttagcaaaaggtaaaaacctacagattcaagagactcaatgaatcacaaataagagaaacccaaagaaattcacaccaagacacattataatcacacttctgaaaactaaagacaaacaaaaaacttttaaaacagctagagaaaaatgacacattacctacagggaaaacaacttaaatgacggctgatttctcactggaaaccatggaggggaggagtgtcatgacacttttcaagtgttgaaagaaaaaaaactgtcaacctagaattttatacccaggaatgagggttaaatcaagacattctcaggtgaaggaaaactaagataatttgttatcagcaggcttatcataaaagaattcctaaagaatatcttgaaacagaaagaaatgattaaagaagaaaacttgaaggctgggtgtggtggctcatacctgtaatcccagcactttgggaggccaaagttggtggatcacctgaggtcaggagtttgagactagcctggccaacatggcgaaacctgatctctactaaaagtacaaaaagtaggtgggcatggtggcatgagcctgtagtcccagctactcaggaggctgaggcaggagaatcgcttgaacccaggaggcggagattgcagtgagccaagatcatgccactacactccagcctgtatgacagagcaagacttcgtccaaaaaaaaataaaaagaaggaaacttgaaacattagaaataaagaaataacaatgaaaagagttaaaatatgggtaaatgtaatggattgtccttctcctcttgagtgttctgaattatgttcaacaattgaagcaaaacttataatcttaccgatatggttctcaatgaatatagacaatatatttaagacaagtataaagatagactaataaagaaacctaatataggtaagttttctatacctagttcaactggtaaaatgtcaacactgataggtagatcaaaagttatgtatgtaaaatgcaatatgtacagcaaccagtaaaaaaactcttcaaaaagatacattatagataaatcaaaatggaattataaaaaatattccagtaacacacaggatggccaggaaagtgaaacagaggaacaaaataaacaaacaaaagcccagaagaacaaagagaaaataataacatggcaaacttaagctctgatatataaataattacattatgtaagtcagttaaatagaatagatagctccagaatatacccacacaagtataagtgctgatttttgataaagatacaaaagtaattcaatgtaggaaagatcatcttttccatcacatggtagtagaacaattgaacacccacaggcagaagaaaaaaaaacacgcacattgtaatcatacttctgaaaaccaaaggcaaacaaaaaacttttaaaacagctagagaaaaatgacacattacctatagggaaaacaatttaaatgatggctgatttctcactggaaaccatggaggggaggagtgtcatgacacttttcaagtgtcgaaagcaaaaaaaaactgtcaaccatattacctgatatggttctcaatgaatatagacaatatatttaggtgaatctcaacctaaacttcacaccttacattaaaacaggatcatacatttaaatgtaaaacataaaactataaaactttcaggagaaaacctttggaccctagtgtgggtagaaaaaaaactgataagttgaatttcatcaaaattaaaatttttgctctgccaaagaccccgttaagaagatgaaaagacaggctacagaccaagagaaaatatttgtaaaccacatatctgacaaatgactcttatacttggaacatataaggaattgtcaaagctcaacagtaaaaaaaataaagaatctgattataaaatggacaaaagacataaatagacatttcaccaaggaggatatggatatatagatggcaaataagcacatgaaaagatgttcaacattattaggctttagggaaatgcaaattaaagccacaatgaggtatcactacagcacctattaaaacagctaaaatataaaatgggaatataccaaatgctgatgaagatggggagcaaatagatctctcatagattgctggtggcaaggtaaaatgctctattcactctgaaaataatttagcaattactcaatctcacatgtctgcggcgtgacccctcctgcttctttaaatatcagctggggaagaggtctgagtaatacctaagagggaagtggcttcatttcagtggctgacttccagagagcaatatggctggttccccaacatgcctcaccctcatctatatcctttggcagctcacaggtgagtccggccggattctcttccactctcctgtctaccccatcctgaatagttccaggtttcttgttccactctgggcctctggctcaactcgggaggctctgtgttctcatctaacatttgctttttatcaatctctgatctctgattctcaggtcaggaagagactagagagagggggaaaaatggctctgggaactgactcccctgttgactgtcccagggatgaaggagctgaaagaagtggtgctgggtatcagagaccatttttctaatccaggttctgccatgagttagataaggaatgttaaagttttcctgggcctcagaaactttatcttctagccttctctccttttgagggcaactttaagaacaagatgatactatacaggtatgtatttatttacttataaatgtatttataaaattggttatgcataacagtaatataaatggaaagaatcacttgaattttctttccttactcaagcaatgtaatcagtctctacttagagaaccaactcataccataggcactttatgtttaatcccatggaggacagaggacagttctccacctgtcactggtattctagtctttgaagatttttctatcctaagggctctcagaaaggatcaggagccctataagtgagaaatatctcttctgtcatcaatctcatggagtactaccatgaggtccccctataaggacttcacataactgcttcattatgtgtatctgagcctgcctggagtgatctgcccaagaccacgcaggcagctggtgcccccaatattttcccctgcatcgctaagtggtcagcatcagcagactcttacccactttgaattcatcagaagtttgtatttttgagaggtacctgggtctaaccaggtggttctggaataggccctcactttaaaaaaa

SEQ ID NO: 4199 - DNA, 6000 bp, Homo sapiens
gactattaataagatttaactcatggccaggcatggtggctcacacctggaatcctagcactttgggaggccgaggcaagtggatcacttcgagctcaggagttcgagaccagcctgagcaacatggcgaaaccccatctctacaagaaatacaaaaatgagccgggcatggtggctcatgactgtggtcccagctactcaggaggctgaggctggaggatcgcttgagcagggaagtaaaggttgtagtgagccgagatcgtaccactgcacttcagccttggtcacagagcaacatcctgtctcaaaagtaaaataataataataataataatttgactcattttacaaatttataagttgattcccttattattctaacttataaatgtaatatatttagttttgttttaaagtattttaatcagcaaataaacttcccaaatacttaaaggcttgtaaacctaatacattaaacttctaagtgtggtcattcttaagttgtcttaaattattcaattcttcatgtaaattaagatttccaactaaaatcacaaatgcacaaatgtaaatcaattgcatagtttaaatcagaaacacaaatatctcagttcattctggctgctataacaaaaatatcttaaactgggcaatttataagtagtggaaatttatttcttatggttctgcaagctgggaagtccaagatcaaggtgccagcagactctcggtctggttagggctcactctgtgcttccaaggtggggccttgttgctgcatcctccagaggagatgaacactgtcttcacatggcagaatagtggaagggcaagaaagggccagataactctttgaagtctcttttataagggcattaatcccatatatgaaagcagagtgctcatgacttaatcatttcccaaaaggccccacctctcaatactatcgctttggggtttaagttccaacatataggacaggcacagtggctcacacctgtaatcccagcactttgggaggccgaggcaggtggattacctgtggttgggagttcgagaccagcctggccaacatagtgaaaccctgtctctactaaaaatacaaaattagtcaggtgtggtggcacgtgcctgtagtcccagctactcgggagtctgaggcaggagaatcacttgaacccaagaggcaaaggttgcagtgagctgagattgcaccactacactccaacctgggtgatagagtgagactccatctcattaaaaaaaaaaaagtttccaacatatgaattttggagggacaaatacattcaaaccgtggcaacaaagtttactacaattttaatgaactaaatttcctcaaacaatacatatacttaaaaaatactaactgattaccttgaacatgtctattttgtattccttattttcccaggattgaaagattcataaccacaaaagaaacaattatgtcatcccatttacagccatttcctggggtaccttctcaattagctaaagttgcttaatgaccagaaatatcactgacatgttaactaatggtattaccagcacccctttttttttgaggtggagtttcgctcttgttgcccaggctgcagtgcaatggcacaatctcggctcaccgcaacctccgcctcccaggttcaagcgattctccttcctcagcctccccagtagctgggattacaggcgcgtgccaccacacccggctaattttgtttttttgttttttgttttttttttttagtagagacggggtttcaccatgttagccaggatggtctcgatctcctgacatcgtgatccgcccgcctccgcctcccaataattttgtatttttaatagagacagggtttctccatattggtcaggctggtcctgagctcctgacctcacgtgatctgcccacctcggcctcccaaagtgctgagattacaggcgtgagccaatgtgcccagctggcagcaccactttttgcttgttttgttgctaccctctaaaaggctggtctcatagcctatatccctagattccacttgaacactgtgacattccctaattcttccctctactgtggctgcagcagttgatttgatgttgaatttctttagctcctaacatatatttgtctttccatctaagtgtaaaaagctttgagcttgtcaaaattctacagtctttcatattcttccaatctgtagtagcatatatatactgcaagtcaagacaacattagaaataaagtccaaaaaatgcaattgtgtaaaatgcagggtcgtcttaattgcacagtgaatgaagtgttggttgggggctggtggtgaagcaacacagctgagtatgtggttgtggctgccagacccaaatctcaacccaggctggagtctgatgctacctggaggcaatgcccagttgacaggggtgattctgggcctgtagctggcgggactccaaggacagtagcagggatttcaaaaattttccagtcagtcacacccacttgctggggtggttgaagtatactgagaaggacaacactggagacgccggggccagcatcactggatgttgctccctgattcccaatgctagtgcctttgcctccctgtcctgatgagaatattagccctccccatgtgaggacagggcacacttaacaaatgcatcataccaaaatttatattaatttaggttttactatacttaaatgataatacttaaattggattttgtgtattataaggctgtgtcctcctatggtcacaacttcaaaggaggtcatttcagtgatgttactttcctaaatctcagttttctcatctctaaaatggggataattggagtatcatccaaatagggtctatcttaggattaaaggagaaaacatatgtaaagttctaaacacagaggctcactcatagtaattacccaataaatgttagtaatgatttttattattaccaatctctctgaattcccttctgcctttgccctcgcctcccatgcagactgttcctgctctcatgttctgtacccagactccttcaatagcttccgcacctgtcttctcatccccaggctcatcccttccacccattctccctccactctgcagctccaggaagcttcctactcctactggattcttgttgcctttagcttggtaacaggatgctttatctgggctctggtaacctctcctgaccgtatgtcctgcaatcccctctagacagcccatgttctagtcacaggaccaaggctagagtgaaacaagacacgctcctagtgcacaaaatttaaagattttcgagattctgtcactttcaatattgtgcaacatcagatcatgaccagcctctaaagatgctttccatggacataagcctgttatcttaatggtttctctctctctctcccttcttcctttgaacccagacttcctgggttcaagtccttactaactataaaacttatagtaagctatttaacccctctccacctcagttttctcatttatagaatggggatgataaaagatatctcataaaactattgtaagatcaaatgagtgaatatgttaaagtgtcagaagatggactagcactctgtaagctttcatcgaatattagctaaaactacacattctgccagcctcaagttttcctgccaagtccccttaatgttacagcctaagtaaacaaatgacctgaagcccgaaacacaaaccatagcatggccagctattacgctactgacaagaagaaggaggagaaaaagacagtttcccaagtcaggatatagggaatcatgccattctccagcctaccttttcaactcagtcacctctacgctgtcacatacgatgtccacccccattgcagtctccctgatgcctttgtccatattaaaagtccttcattgcatgtgacagaaagctagcacaaactgccttgagcaaaatagaaaatgtattgggtcactgtattagttatctgttgctgtgtaacaaattgccccaaacttcacagctaaaaacaataagcatttttgatgaaaaataaaaaattgaaaaaaaatttaaaaaccaaacatttattatctcacagtttctcttgataaggaatctgggcatggcttagctgggtgcctctggcttaaggtactcacacaactaacatcacggtgtcagccagggctgcagtcatttcaaggacctcctggggaggatccacttccagtctcactcatgtgattcttggctagcctcagtcctcatggacagttggccagaggaatcagctcctcgccgattgttggctgggggcctccctctgttctttgttttggaaccctctccctaaagtatctcacaaaacaatacctggctcccctcagtgtaaggtagggagacagagatagtgggaaagacagagagggagagagggcaagagaaagagagagcgcatatgcacacacatgctaacccaagatggaagtcacagcttttttgtaacctaatctcagaagtgacccatcccacatctctgccacattctattcacttgaagcaagtcactaaatccaggccacactaaagaagaggtgattacacagaggcatgaatgccaggaggtacagatctttagcagtcacctttaggagccaaatttagaacccaagtcccttgatgtcaaagcaagtgatgctccacatcagtcacaaatgaggccctgaatagacttgggacctctacctgcctgcgcagatgggaggagtctgtggtgttttgtataaacaaccctccctctgagacacacacacatacacatacacatgcacacacacactcatatacacatgcagaagctgtgacacgtgcggaagctgtggtaagtgcatcctccttcagtctcagttctgaaaatagatcatcatggtggcaccaaagagtcacacagatgactgggctcctgggcctttctccagtaagccacagaggagtcagctgcaaatattctcttctgttctacagacctctctcctcttcctgctcatgggtaagtccactttatggccaccacttcttgctactgcggttcttctgaggccagttgcattccctgcctgggagattcttttttttgttttttgttttttttaacggagtctcactctgttgccaggctggagtgaagtggcgcaatctcggctcactgcaacctccacctcctgggttcaagcgattctcctacctcagcctcttgagtagctgggattacaggtgcatgccaacacacccagctaatctttgtatttttagtaggggcagggtttcactatgttggccacggtggtctcgatctcttgacctcgtgatctgcccagctcagccacctgaagtgctgggattacaggcgtgagcccagttcttgttggtaaaatcgggaaactcatctccttgccagaaattactttgcatgtgtgcatattcgtgcactatgaagggggtaacattctagccccggtctcaaatagctctgggctcaaactacatttctcttgccctcacattttcctaagaaatgccaagtatataatgagtttgttccctgtatggtgtggataaaacccacagagggatccaggaaaatcccctgatgagaagccacctagcaatttcctagggatggagagaacttctggagcttctttctatgtatcctgccttggttatcatatatgctggctttattactgaggtttcactggggacctggacgcggttaggtgaccatgggcaaggtggcgtttatctggatatccttttctcctcaaccttattcctccctatcaaggcccaactcctgggaaacatctctccgctgcatggcccggaaccccactgtccagcagatagagccaatccagtaccccagagaggatctcagccacctgggactgtggcagctactgtccttc

SEQ ID NO: 4200 - DNA, 6000 bp, Homo sapiens
gttgctgaccaacaataggatctggcgaaatcggacaattgacattggggttgtaacagcagaagaagcacttaactatggttttaggtgaggggaatacaacttctctccgtaggagtgggggtgggagtgggggagttccagcctaatatcttgtctttgaagacttgttggcatcctcctagtcataccctgaatgtgaaggatcaacaagggaggctaaggaagaaggagcctccttacttagtttgtggagagtggcccttattcccattatgctctccacagtggagtgatgcttcggggctcaggcatccagtgggacctgcggaagacccagccctatgatgtttacgaccaggttgagtttgatgttcctgttggttctcgaggggactgctatgataggtaaggccccaatcctttcttggctgatattccagctagtttcccctgcctcactcttctctttgccacttccttctttaccctacttctcagtgtctgtgggagctcttgtgtgtgttagacgaggttgctctcaaaacactttcacatatatggaatcttacttatttttttcttttttgagacggagttttgctcttgttgcccaggttggaatgcaatggtgcaatctcggctcactgcaacctccgcctcctgggttcaagtgattctcctgcctcagcctcctgagtagctgggattacaggcatgagccaccacgctcagctaatttatgtatttttagtagagacgggatttctccatgttggtcaggctggtctcaagctcctgacctcaggtgatctacccgcctcggcctccaaaattgttgggattataggcgtgagccaccacacccggcctatggcattctttttatctttacattatccttgtcttagatggagctagctttggctgcattttatagctgagaaagctgaggcataaaagttagggattagctgggattattcttcaggagtggtcgagactagaatcctcctgatccagtgttctttctagtagatcctaagcttcagattctcctcctgggccaggcacagtggctcatgtgtgtaatcccagcattttgggagtccaaggtgggtggatcacttgaggtcaggaattcaagaccagcctggccaacatggtgaaaccccatctctactaaaaatacaaaaaattagctgggtgtggtggtacatgcctgtaagtccagctacttgggaggctgaggaaggagagttgcttgaatctaggaggtgaaggatgcagtgagctgagatggagccactgcattccagcctgggcgacagagcgagactctgtctcaaaaaaacaaaaaacgaaaaccaaaaacaaattctcctcctgttttctcaccctgagtcagatttgttactgtgtattgttttttttatttttgtttgttttattttttgaacctggtagctactgctgttatttttgtttgtccatttgactctcacccatcctgtggtccaaaaagtgcttaaggaggtaattaaagaaataaatactacaggccatgttctgagaaaataaggagagggtttggggaagcacccaagagtagaagcaaacgattacagggggctggggttggtggctcatgcctataatcctagcactttgggagaccaaagcaggcagtcgcttgagctcaggagttggagatcagcctgggcagcaaagtgaaacctcgtctctacaaaaaatattcggatgtggtggtgcacgcctgtaatccaagctactttggagaccgagatgggaggatcacttgagccccagagttcgaggctgcagtgagctgtgaaaccctgtttcagaaaaaaaaaaaaagactacagggtttatatgggtggccaagccaagcagagatgctgtacttggagaaaagagtggggagagttgacctaacccttttgaggttggccaaagggcatccttcctagccccatacctgctcctctgactgttcttctcttgctctgtctcatcttcttgaggtacctgtgccgggtggaggagatgcgccagtccctgagaattatcgcacagtgtctaaacaagatgcctcctggggagatcaaggttgatgatgccaaagtgtctccacctaagcgagcagagatgaaggttggctgcagggagggggaaagtgtggggtgttggaaaggggccagtggctggggaggagtatccttggattaaatcctatcttttggttttcttttttttttgagacagagttttactcttattgcccagactggagtgcaatctcggctaactgcaacctccgcctcccaggttcaagcaattcttctgcctcagcctcccaagtagctgagattacaggcgtgtgccactacgcccagctaattttttgtattcagtagagacagggtttcaccatattggtcagggtggtctcgaactcctgacctcaggtgatccttggcctcccaaagtgctgggattacaaagcgtgagccaccacacccaacccagttttcttttaatagagaatttactgtgtagtaagagattcgggttttttttatttttttattttttttgagacggtgtcacgctctttcaccaggctggagtacagtggcatgatcttggctctctgcaaccactgtctcctgggttcaagcgattctcctgccttagtctcccgagtagctgggattacaggcacccaccaccacgcccagctaatttttgtatttttagtagagacggggtttcactctgttggccaggctggtcttgaacacctgacctcttgatctgcccacctcagcctcccaaagtgctggaattacaagcgtgagtcaccgcacccggccatataagagattcttaatctcccatagctctcctgttttattctgtatcctctctgcttactgactgacatgtggctttagtctccctgagggtagagattattttctgtgctgggggaggcctaggagacagagtttggatatggtttattgatgctccctgtttcctctcttcagacttccatggagtcactgattcatcactttaagttgtatactgagggctaccaagttcctccaggagccacatatactgccattgaggctcccaaggtaaggagaggaggggaaggaaaagaccatatgtagagtaggtagctaaagatagatgtttaacaaatagctcattcatcaatgagagagaaaacagaatgaatagaggttttgttggcagagaaaaatactcttcatgttaatacagacacccaaccttcttccttgaacagggagagtttggggtgtacctggtgtctgatggcagcagccgcccttatcgatgcaagatcaaggctcctggttttgcccatctggtaagaatcaatcccagtaactataactccaatgaattaaacctgaccttggttgaggtttttatgaactcttctttctcctcccaccttgcaagtcttaactaacattgttgccatctcaatctccctaggctggtttggacaagatgtctaagggacacatgttggcagatgtcgttgccatcataggtacgaggcctattgtgtagtagaggtatcctagacaaaggagttcgggacgcccactggggacagaaggagaacacttcctgttcaccataggccatggcatggactcgggtcctcaatcttttgagcacagtaatgggttctggatcttgggtaacaccactttttttgtttgttttgcctcacaacaggaagataagtaacatcacttttttcctccatcctctcacctaggtacccaagatattgtatttggagaagtagatcggtgagcaggggagcagcgtttgatcccccctgcctatcagcttcttctgtggagcctgttcctcactggaaattggcctctgtgtgtgtgtgtgtgtgtgtgtgtgtgtgtatgttcatgtacacttggctgtcaggctttctgtgcatgtactaaaaaaggagaaattataataaattagccgtcttgcggcccctaggcctaaacttctggtatcttagtgtctcagtatcttagtgtccttcactcggactgtaaacctaagaatgttcattaaccctccattcctgttagattcagtcaggtcttagcaatttttcctgctcgtctccacccccttctctgactcttgtcctttccacttctctattccccatttcctctttcgcctcagttccctccttgcccaaaccttctcagtgcccacataacttggtaaaccactcaaatcaagacctggggtaaagttgggagggaaagggctatagtggggtctgagggaatgttgacgggcagtttcacacagataaatctctgaaccagccgggcgcagtgcctcacgcctgtaatcccagcactttgggaggccgaggcggatggatcacctgagatcaggagttcaagaccagcctgatcaacatggagaaaccccatctctactaaaaatacaaaattagccgggcgtggtggtgcatgcctgtaatgccagctactcgggaggctgagagaatcgcttgaacctgggaggcggaggttgcggtgagccgagatggcgccattgcactccagcctgggcaacaaagcaagagtccgtctcaaaaaaaaaaaaaaaaaaaaaaatctgaaccaggtggagtggaaaatggcagatgtagacagcctttcctgagcgtgaaagtctcctcattctgtgggttaggagttggtcattgaagggctgacgcttaagagcccagatctcccaactcccttagttggcccttccgggagccgcccggtctcttgtgcaggaaggggaaggggccaaagcatgggggaaggcgtggcaggaagagggggactctgtggtcagggaactgctcgctgagcacagctgcacagtgctgtcagaacggccgatctccagcccaagatgattccagcagtggtcttgctcttactccttttggttgaacaagcaggtaagagggtttggtgagggatagcgtgagctggctccagggtggaagtccagagcttgggtctgagggccaagtcaaacacaggtgaaggaaggctgacagtgggtaggtgggcatagggagaccctgaggctagtcctctccagccccgacccagggcactagactcatagttccctcctttcttgttgccttcttacttcattccagacttttctccgtattattattattattttggagatggagtcttgctctgtcacccaggctggagtgcagtggcgcaatctctactcactgcaacctctgcctcctgggttcaagcgattctcctgcctcaggctcccgagtagctgggactacaggtgcccgccaccacgcccggctaagttaagtatttttggtagaaaccgggtttcgtcatgttgaccagggtagtcttgaactcctgactcaagtgatccacccacctcgacctcccaaagtgctgggattactggtgtgagccactgcacccagctattattattattaaaaaaagacagggtcttactatgttggccacatcggtcttgaactcctggcctcaagcaattctcccacctcggcctcccaaagtgctactgtgcctggctgacttttctcttttcagggttgatagaaagtggcaggggaagggtctggttgtatggcatgaagagctggtctggtgaaaagcctcatttctcatgatgagcatttcccatggggtgcctttggtcttgtctgctgggagctgatctctagctggtttaatatacaaagcacccttggtgcctataattccagctactcagaaggctgaggcaggagaatcacttgaacccaggaggtggaggttgcagtgagccaagatcgcaccactgcactctagcctgggggacagagtgaga

SEQ ID NO: 4201 - DNA, 6000 bp, Homo sapiens
ccttccgggttcaagcgattctcctgcctcagtctcttgagtagctgggattataggcatgtgccaacactcccagctaatttttgtatttttagtagagacagggtttcaccatgttacccaggctggtctcgaactcctgacctcaggtgatctgcctgcctcggcctcccaaagtgctgggattacagaggtgagccactgcacccagctggtcttttgtttttaattaaaaaaatatatatattaggggggctcactgtgtttctcagtctggtctcgaactcctggcctcaagtgagtctcccacctcagccttccaaagtgctggggttacaggtgtgagccttgatgcctggtctagataagaggttttaaatggagaaattagagcacttctagggagaggagcaaactcaagtcttttattgtgggaaagggggaaacacagtgttcccctggctcagaagggaaaggagggccacgggtgacaccttgggaagctttcttttcttcatagaatgactaacaggaaattatgaggggtaccctcattttctttttttctttactttcttttttttttttttttttttttttttttgagacggagtcttgctctgtcacctaggctggagtgcagtggcacgatgtcagctcactgcaacctccgcctccccggttcaaaagattctcatgcctcagtctcccgagtagctgggattacaggcacgtgccacaacacctggctaatttttgtatttttagtagagacggggttttaccatgttggctaggctggtctggaactcctgatctcaagtgatccacctaccttggcctcccaaagtgcagggattacaggtgtgagccactgcaccccaccagggtaccctcattttctatgacctccagaaatcgagggattcagtttgtgaatccttccttcctctcctagttccttgtgcaatgcaaagcctctttagtgttcacctgcagagtcgtgcccaggctgtaggagactctgggtttggagaatcatggcaccctcatcctgtcattttcatcagttgtgtcttcaatcctttcttcacccctccacactcaaacctctctccttctagaagcagatttttccttttccttcctcttctcctcccttactcccctacttttcccagtcccccaaacataccaggctcagagctggattcattcagcatttattgtagcaaagagtgggtagggacaggagctctaggactggccagtgggtgttctagaggccagctggggttggaagacaatggtctggacacttcactgggtggcaggctgtgttccaagttccacgaaatagctcaagaagttaaccagttccgttccagccttcttgatcaggggtgtcagctgctcctttgacttttcaaagtaagacctggataggtgaggggattagagtttaatctgagggaccctaggcactggcaggggccttggtggtggtgggaggtcagagcagactgactcaggtccccaaactctagtgcctggtccatcgcatggcaaagcccctaggtaggaatagagtcaagacctttgctaggtagagggacagactctagagactgaaattcaaggcccagttcttgctgttcctctctatctaagagacgtgtgggatctttgggtgatgaaatactttttctctgcaatttaagcctaatctgccctaatccccacccctgggttcagacttctgtgggacctctcatcttcccttctttctctccacagttccacagcccctgaaccccttgccctgagacttacttggcctcggcctgaagctctgggctcttgaccttctccatcaggtccttgccatagtcagtcacggtctggaagtactgagaaaccaggctctccacacatggctcctttgcctgtctccgaaccaaagctcctgcccacacacacacacacacacacacacacacacacacacactcttttcagctgggtccacagcagtgaatcctggcctcctgccatacctctgccagtacccaccccagctctctgccccctccccaaaaaggtatccagccagatctttggatgggctttctgggctttagagagggaatgatcttccttttgagccctttggttgccagacctggatataagagcacaggcagataggtagctataaccaccagcacattctcccttttggccccctctccatatcacacccaccttcaaggctgcagatggtgaggagtagcacagttgctgcgagcagcttcatgttggtaacagtggggagggcggcctaggaagagggtggtgggggtttgggggacactgaagccaaatgggcttcagctcctccccagggatctccctacctgctgcccattccaacctggctctctccctctccacaactgaagcccaggcctctttggatgctgctcacacatcttgcctccttatcttacctagccagcgtctctgtccttggtgtctgtgcctgccctggctggagaggaaggggctatatacctgtctgtttacccaccccctgtcaggtgacagggactatggatgggcccagtggggcagggattatgtgaggataaacaagttggagaaatgggggaggagaggacaagcacatggaagactcatggtgatggggtgagaggcagggggtacagctcttagtggaggctaagggggtacacttcaggtatatttgaggttcattcttttgagatctgaggtccttggacttgagtgcaacaggaagcaggattccaagttatttctctggaaagctctgacatatcaacccatggaataccatcaacccatcataccatggaaagctcatggtgtctttattccattatgggtagatctcatctctcaaccttatcccactttactgcaacttggcagagagatattggggagcagaagaaaggagaaaggaattgaaatcagggacagggttgagggctatgggggttaggggaatgagggtcgggtaagagggcaagtgtaaatgatcttgtccgtttttgagttaatgtgtaatgagacggggagaaaacaggagagcccagaatgacctggatgctgatcactgaacataccctacccccagtaaaacaaattcagaaaacagcttccgcccgtcccctcccaatggagggctctggcaggaaaagaggtgaataagaggcttctaccagggtaaaggttgaaggcacctggtcatttgatcaccttatcagttctaggcagtgattagccaatattgagtcagcaggggcaatagccctggcccttgtctcactcctgttgggggtgggggagggggagaggtacattcccaggttcaaagcatttgggtgaaatcagttaaatagatatcagaagcttttgtatctttcacccttttgccccccaagcatactcgctgagtatgtggaacattcctgagggtgacagtggaggcgcaaagctgatgagggaggtagtgaccagagaccaagaaatctttgttttttaacttttgttttaaattcagaagtatatgtgcaggtttttttgtttgttttcctgagacggagttttgctcttgttgctcaggctggagcgtaatggcatgatctcggctcactgcaacctccacctcccgggttcaaggattctcctgcctcagcatcccaagtagctgggattacagacatgcgccaccacgcccgggtaattttgtacttttagtagagacggggtttccccatgttggtcaggctggtcttgaactcccgacctcaggtgatctgcccgcctcggcctcccaaagtgctaggattacaggcatcagccaccgcccctggcctatatatgcaagtttgttacacacgtaaacttgtgtcatggggatttgttgtacagattatttcatcacccaggtattaagcctaatatccattagttatttttcctgatcttctccctcctcccacccttcaccctccaagaccaagaactcttactccattttcaattattcccctgtggagcgcttagtgcttgaggtcagccctttggcttgtccctggtcctgggatggagtgcctttgggggccaggctccatattcctagattttatttgccaactctgccttgggactcagggaaggaagggttaaatacagaaagcagctgtttcagcgaatagttctgctagaacttactcctctgcgccaaactctcacacccgtttccattccaccaagtggtcaagagcggggacttcgagagatgtagacctccagaagagaagggtgggtccctgttctagggagtgctgcgcttaatgagtagtactcatttggaggtgtgctgtggagggctgtgaggaggatttcccatgggttctttggagagaagggagcgatagaaatgaaccagggttccaaagaagtcttcataatcgttctttctgccacccttcacactatgccagtctacaagctgtagttccacttttctcatggatgaaactacatgggtggaaggagcttcagtggcccaagctacaagatgctccctctagtgtcttgtacgctcacaagtttttttccgaccttggagaggcctagtgatctaaagccttccacttaagtctaaggggccaccaatcaagtcctgcccgcctctgcagctccagggttgaagctcttgggccgtcagacctgccactcattttcttcctcccttcccattggcccatggtaaatagcgaggcttttttttttttttttttttttcattgattgggcggggcccaatcagggttgggttgggtctttgacagctttctttgccagattcaaagatggcgcttacggccacgctaagaatgcagcgtgaagctgcagttctgccatcactcaagatggctgcccccatcaagatgaccggggtgtgccggggggaaaggggcagcatgatggtctgagatggtaagggatactgcaccattgcgggcctggtcttggggcctgggaatgaagaatagagaggctagggagctaggtgaagtctgtggtgggggctaggatcagagaaagggagagaggacaagggtgacaagtgggggtgagagatcaaagatggggcgggagtgtgcctagggttgtctctccatgagtgctctccttccctactcttcctgttccaggtgtagcgtcggaccatgtggaagtttctgaggctggggagccggataatggggggtggggcccgttggggggtaaaggggcaatagcgtcctttcacaggctaacctcggctcttcccagtcctctggactaaaatggggaacacattgggcctggcaccaatggggactttgccccgccggagcccccgccgagaggaacccctgcccaaccctgggagcttcgatgagctgcaccgtctatgcaaaggtgagaacttggcacttgggtgtctcaggatgaaggggcagaggagtggagggtcttgaatgccggatgtccggcgatgggagcaggaaaggggagatcatagctgggtcatgcagcctcagggaggatcaggtgcccaaatgaagtggagcatttcattgcaggacttgaaaggaggttaattcctccaaagtgttccctatgggattgaaaggggagactatcttttggggtaggggttctttgtctgtgcttattccttcccttcccctacccccttcagatgtattcccagcacagatggagggagtgaagctcgttgtcaacaaggttctgagcagccatttccaggtgctcccacttctctggcccctccttactattccccctttcctgtccctggatcatcttctcctttcctttgtactccagccctagccagtctatgtgggacaaatgagggaggatgtggggttctct

SEQ ID NO: 4202 - DNA, 6000 bp, Homo sapiens
gggcatgctactatttccaacctgggtccagccatggccaccactcagggaagcttgctacactctcttttaccctttcttttaaaataaaacctctacttcctccctctaaatgcatatttttttcttttcatatatatatatatatattttttttttttttgaattttacagatggagtctggttatgttgtccaggctggtctccaactcctggggctcaaataattatcccaccttggcctcccaaagtgctgggattacaggcatgagccaccatgcccagccgcatattttttctttctgaatataatgtcaccttcctgctcctgcttgttctttctttggttgcagtggggagtgcagcaaaggctgtggggattgctgagagacacctgagtcccaagactcccagagtagagtggctccacttacccaaagaagagaagagcagcacagccaggatagggctggggctggatgagggagccccaggagccatagctggggcaggggcaggggcccggagcatctgtggggttgagaaagtgggggaccaggaactgaacggggggttcctggaacctgcttaaaatcccctagggccccagcatgagggggctgtcctcagccagtaaccaattgcagcctggcatgtgcagttgagaggtggtggggaggggggcagagtgcagggagcagaaggggcattgtatagtctgggtggaggggtggggggacacataccaccccatacacagagggctttgtgtccactggcctccccctgccccaggctggaatgttgtggggggtggtgagggagagggacaaaaacagggacacagacacacttctctgagggatagatatggaacctcaatttaaaggccataaaaagggatttctcctcagcctccttgcctgagagaggctgcctcacagccctaggaactagagggaggtttcccccagagaactctgaaaataggatatcccctgttatctcctctaatgtgggctgcattacagacttcttgagatgaccaagtcctatgggagtttttttccccgcacctcccttcatcctgtgcgattcttcccagacagaagtttttctccactggactatttccaggcaagaagcccctgacctttccgtttgtcaagaagtccttcagtgcttcatgctgctgtttaagtccatttcaatttatttcaaggctacaaaattgtattaagtgccagcaatatgtaaagtatgagaatgcaggtaatagagagaggaataaaaattaagtccttccagcaaggagttgaaaatttggtttggggaggtggagatgggaagatcagaggacaaacccatcaacaatcaagtataataagccatgacacttcctttagtaatgaacaaaatgctgggagtacaaaagaggggcacacacagctgcaatatcaggaagactaagttatatgagagattaaagacaaaataaactttaataaatgaagtttatgccaggcatagtggctgacacctgtaatctcagcactttggtaggcttatgcaggaggattgcttgagtttaggagtttgagacctgtctgggcaacatagcaagacctcgcctctaccaaaattttttaaaaaatcagctgggcatgttatcacatgcttgtagtcccagctacttgggaggctgaggcaggaagatcgcttgaacctgggaaatcaaggctgcagcgagctatgattgtgccactgctttccaccctgggctacagaatgaaactctgtctcaaaaataaataaataaataaataatcaaacaaataaatagttcagagggaagaatagttgtgtctaggaggcaatgttagatatgaatcagccttgaaggatgactgtcattttggaaagggagatagggagggttaccagaagatagaacagcaaaagcaaggacaaagaggtgagacggagagacagaatgtgtgtgtgtgtgtgtgtgtgtgtgtgtgtgtgtgtgtgtgtgtgtgtgtgtatgtatatgagatgtaggtttctgaagtgttggatatattcagggccgatcttgtgccatccactttgacttgatttggggaaacttgaagtggcatagtcagaaatgagactggacaggaaagtcgaaaccagtttgtgaaaggccttaaatgacaggtgaaagaaggtgaattcaatttggtacatcatgagaacctgaaggtgttggggtggagttagccatggggatgtctacataaccagagctgaggtttttttgtttgttgaggcagtctcgctctgttgcccaggctggaatgcagtggcatgatcatggctcactgcagccttgacctctgaggctcaagcaattgtcctacctcagctttccaagtagctgggaactacaggcgcatgccagcatgctgggctagtttaaaattttttttttttttttttcagagataaggtcttgctctgtggcccaggctgtagtgcagtggtgcaatgatagctcactgcagcctcaacctcccaggctcaagcgatcctcccacttcagcctccagattagctgagccacaggcagccaccaccatacccagctaatttttcaattttttgtagagatgaggatctcactgtgttgctcaggttgatcttgaactcctatactcaagtgatccttctgccttggcttccctaagtactgggattacaggtgtgagtcaccgtgcctgacctctagaagttaatgtaagtggggtggtcattgttattcctgctatgagaccactgcaggctcacccaggtgaaggacagtgtcctggtaccttcctggcatctcattagaccacagccctggtgggtatggtcattagtattagatttgggttgtggaattctaaatatgggattgcttatgaagtccataggcaaaaccatcatcattgacaaatgtttacaggatgttgtagtcaacatttctataaaacagcaattcaaagtacaaaaaaaaaaaaacccccaaaactctcccctccaaaatttccacctaactccacctcccaactgtaagcaatcatttcctctttatctaaccaccccttttatcaacaccctcttcaatgggttgttgctactttctttgttgcatgtctttattgatcctgctaaggctataaccttcttggggacagtacaaacatctgtatctttgaatcccctacagaacttttcacggactgacaaaaagtccataactacatgctaaatgaaattattaatatttaaagagctgagtgggctgggagtggtagctcgcacctataatcccaggactttgggaggccgaggccggtggatcacttgaggtcaggagttctagaccagcctagccaacatggtgaaattccatctctactaaaaatacagaaaattagccgggcatggtggtgcaggcctgtaatcccagctacttggggggaggctgaggcaggagaatcgcttgaacctgggaggcagaggctgcagtgagctgagatagcgccactgcactccaacctgggcgacagagtgagactacgtctcaaaataaaagaaaaagaaaaagaaaaagaaaaaccaaaaaagatctgagtgaaaaaggcattccttgggtttgttaacgtgaagctccagagagccaagtcaatgactggaatttcgatagcacaaaactgtatttaaatataataactaacgaataagttgttcattaaataaaacttgttgtttgaggtacccatcattgaatatgggggggtagagtcttgaagatcagctgttatgggtgttgcagaggagatccctgcatagatagtagattggattagagagcctctttcaatcctaaagtgtacgaatgtgctttgtcaagcattatagaaatgcaaagtagtattattcatctgatgcagaaataagtgaatttgtgctatttaaatcctgaagtgcagggatgctaaatatacataagatctgaatattaatataattgagtattttttttgtagaaataggagttgctctagcctgtcccttttactcctctccaccctactccccacaagagtcaagaacttttgtgctctgttcccttcctttatcatttgctcttcttctttcttcagtcttgagtgctcggcagttgattcctgtgcttgggttccctaaaactgtatatatatatatacacatatataaatcaaagcgtgttcttcccctcactccgggttcttctagctgtgggtgtcacccacatagcgctgaaacaacgaacaagggagcattgtcctcggctagtgggcgcctggtccatgtggcagctcaaacccaggaattgtggggtctaatcgaggtggttagatgaggctcctcgttttcgggaatggtggtccgcaaggtcttctcgaggcccctctacacactccccaacttaggtcacaatttatgtatctgtctggttaaagcttcgtattagaaagggagggaacccaaagtatcttttctcttcggggtctcaaccggccaaccaccacgtttttaggccgacctgggaggcagggggaacgcaacagactgcgaagtccttaaggaagaatctaaacaagtccgccgtttgctgtttgggagtgcgatacaaaatgaatatgtacgcaggtggaacgtagactgcagattttgagccagcggcgtttctgccgaaatcctggcaaattccggtagaagtcggctgcaggaggcggaggaggagactaaaaaaccagaaaacaaccagcaaaccagctaggcagagctgagcggagaagctccagagccttttaaagagactctcgtcacatgacacccccaaccccgacccccagccggcgcgcctccgccctcgggtggcggggccgcctggcgtcacttccgtccagaccggaacccaagatggctgcgctgttgctgaggtgacttcagtgggactgggagttggtgcctgcggccctccggagatctgaactggcccctcacgttttgctgataactgtttatcctgtgcctgggcagggaaaggacccatgggtgtggaggccaagcgctcggggatcctagagaccccttttcccgtcccccccagccgctccggtgcgctccgtagggcttcggggtcactgacttcgtatcgaggggccctcggctctcgccccttctgttttccccacctcctctagtacttctaacgcaaattgctctcgggcctgcacccagagccgagctctgagaaaataacttcaaggtcagccacccatgggtcctacgatttcgagagcgtatttagacatttagcttcggagagagagatcttcgtgtattttgcctttgcttcgaatgccttcagacactagctgctcccaccgtgagtgggcgctgtctgggttcccagcgggctgctggcaaagggtggatccctactggggtggcgattagcattagcacccagggcggacctctgctgccccagagcaacccggggaattcatttttagttaatcattttacttgggagggagagtgagtgtcccagtttttctctaaaatgtgaattagttgtccagagaaataccctagattttctttcattctgaactttccgctgtctaggtctcattctctgctcagcctctctagtcacagcgactagcgcctttagacacgcctggtacaaatcccagcatagttttgtgccagccttatttttggaaattgtttgttatggaaagttagcttcaatgctgttgagatttcaatccctgatttccccaaatgtgttctcatttctctttccacttcagtcacccagtttaaaaatagagggactttgtttagtttttctgtgacaaaatgattcctcttggagttgaaatcagggttatcttaatccttca

SEQ ID NO: 4203 - DNA, 6000 bp, Homo sapiens
tcctgcctcagggagcatttcctatatatgaacttcttccacagaaaggggaagactttgtatctttgtttttgtgggccatactgtttctattcctgatcttgttcacaggttatcataatccttaaactcttttaggtcttttgcactaagtttgaaatcctcttcaacaccacaggaatgctgctcctgagatctggatgctgaatagaatttctataagttctggaaaacgtgttggggtaggtggttaggaaatcttacagcaggattgttaaaaatccaagcctcgtaggatttcctcctacaaaggaactgctacagttctgaccactaacctgaaataacagaacaagtcaccaggagatgtgtgtacacaagggccctgaatcttcttggagtgaactcctcttcccctgcctatcatacatttaaatattaaatccaaatacatatttcttctctcaagaactgttcctttacaaaacctgtctataaagcctgcaaaaacaactaatcttcttaggttctttgtaaattctattgcctgcctttctcaatatcaaaacagacaaaaaaacaaaaataaaaccttgggcccccctagaatatgggatgactcatggtactctgctaggtcacatttacacacacacacagagatacatacacacacaaacacatacagatacatacacatacacacacacatgcacacatatacacatatatacacacacacatttttctctagaaaaatataccctttcctaattttccctagaaggggaaaagtatacatctattggcttttgatatgtcatttaaatttttagtaggttcccttttatatttcttcctcaaaaatgcctttttcttctattcttgtagtctgaattccaatttctgttcggtctctacttgcagtgtggtaagactatagtgcactctcagcacattgtgagtagtaacaagccaaaaaccaggggtcatgtccaggttcagatgctcatgtgggagaggtaaaatattgatatatagaggcaaaagtggagtaagggggaaggcaaaggctggagctgaagttttgaaagaaacataccttatttaatgctactgactgctcagaagtcctagcatgtttaatttgccagaacttcttaatatcaaattgctcttgtgtctgaaatcctggttctcttgaattctctttttttttgagacggagtctcgctctgtcacccaggctggagtccagtggcacgatctcggctcactgcaagctccgcctcccgggttcacgccattctcctgcctcagcctcccgagtagctgggactacaggcgcccgccaccacgcccggctaatttttttgtatttttagtagagacggggtttcaccgtgttagccaggatggtcttgatctcctgacctcgtgatccgcccgcctcccaaagtgctgggattacaggcttgagccaccgcacctggccggttctcttgaatcctttgttgtgtagtaatgaatagttttctatcttctttagtattaagaaatggcttttctgatcttctgagaaactaaaacattatttctaattttagatttcccctcacttctcaaggcctcaaacacaatatcctctaatgacattgtctttggggtgacccaaaattatcatttatttcttacttatgagcagagagtttgcagcttttacttgccttgtctcttttaatacctacagccaccccctgggagcagaggagggagtgtgtataaagtatcacatttccacagtttgccatttatttccacttaagctgattacaggttgtgtttacttttcgttattccacagcatctctttagctctgtttcaatagtaaatccctccaacgtgccagtctttctccctcaactggattcgatctgaaaagtaacttaataaaatcctaactgtagactccctctcccttggggtcaaactagaaccccactgaggaaggaactcctacaaacaaaaaagcaggagtagcccttcttgagctggcttgacattattgattctgcgtgggtgccaacatcccagtcatctcaaagaggagattttgtgaatgaaacaacatgaagaggtgaactgtcttttgagaacataagccagaggtagatgtcctgggaatgtgagtgctacagcactgggtaggtgaaaggagatgcctacttccacactcaaacagaacactgcacctcatgatttgctgtgcagtgggagtgggtggttgacctagaggctttgattcagacccacatcacaatttccctctagaatcttcttatttaataactgctgaccctgctataataggtctctgggggatacaccaattctctttcaatgttctggccaaagagtggacaaaaatcccttcccttgatttcccaagacttgggactctcaagatattttactaaatgacaatgaaaaacaaataaatttaaaaaattataaaaacaataatatccattgcagagggtacaacagttacttaggaatgaggaatacaaagtattgtgaaaagtctgaagaattgacaaatatttgtggctggtttctaggaaatttctccttgctgagaatagctttatctggctacccagaaggtttaagtcccttccacagagtcagttcctaggagtcactcaggatgtggtcttggtgattgggcagaatatattgctataaagtctgagaaaagttttaggaaaagtgctgggctcagtgactcatgcctgtaatcccagctcttaaggaggcagaggtgagaggatagcttgagtccaggagttcgagacctgcctgggcaatatagtgagcactcattctcaaagaaaaaaaaacattttaagaaaagtttaaacatatttgtgttttttaaaggctaccttagatacaaaatcattgtcctgaaattttacagttggactgaggtggggtatagtatatctcttgggtaagcagagtatagatggcctgagaacaatttgttgctccttcctttgccacctgcatatgtgaggataacattcttttgcctgtatagaaatgaagtgtgcatttaattttcagtgtatgggtattcccctaggaatctctctagtcctagccatgatcacaatgtctgaatctaccataaccagccccctctcagacccatataccctgtcacattctctgtaagatactctccacagaatatgtctctagctctgctggcacctccctgggggtctttactagcttactcccaacttgccactccatggagcatacgttgctatacttcccaccctggactgcatcctgtatgccttgactctcaggaggtccagactatgggcatgataactagcaaccactatggcgagcaagattcccactgcaccaacagtggctctccacctgctctgggaaacattcttccttaggcactgggaatgagcacccttttcaggtaaaataccacccactaaatacaggggtgtcactatcttctcacaggcccatccataaaagagtagcataaagatagtaattaaattatttaacattttctgatatttttgttattattctaagtactttatacaattaatttatctgacattatttaaccttcaaaacaactctataaggcagttactattttattttattaaatttacaaaaataataatttttttatttaataaaatcccccattttatttactttttaattaattttatagagatgagatttcactctgttgcccaggatggtcttgaactgtctctattatcttctaatcttgacttttttccttatacgctacaatactccaatgaatattcttgttgattttttttttcacacctaagtgtttctattggatgtattttttgaaatggaatttttaggtgataaggcttacaaatttcaaatgtttaatagatagtgcctaaatccccttcaaaaatgtttgccaatttataaccccattatttgtgttccatttttgaaagatataaatatgtgtgcaaatcaactgctccgcatgggtagttccttacaatttctgtaatggaaaacatagagggaaaactacttgcagtttcagtgggagaaaaggttcccgtttcaagaaaagaaaatttcagtaggagaaaatattgtgaaaaacaaggtaattttctactttaagtttctgtcctatgggtataaaaaatagctggacattatcttcttcccaggctcttctcccctcttctccgtcaggctgcattgctggtcatttttggctcctgttggaagcaaactgctctaatgcctttggataagattttaaccaggaattatctttttttttttttttttttttttttttttgagacggagtctcgctctttcgcccaagctggagtacagtggcgctatctgggctcactgcaagctctgcctcccgggttcacgccattctcctgcctcagcctcccgagtagctgggactatctgccaccgcgcccggctaaattttttttgtattattagtagagacggggtttcaccgtgttagccaggatggtctcgatctcctgacctcgtgatccacccgccttggcctcccaaagtgctgagattacaggcgtgagccaccgcgcccggccgaccaggaattatcttaaacagaaaaagaatactctaaggaggggtataccggccagcagaacagtaacccctccccggggttttcacaaggacacaagctggtgtgtaatagacttatctataaagcagactcaactcctaactggaattgttcctgattggttagcagaaacagaattgaggactgacgacagctgcacaagaagatgaaaccatttccttcctcttttctaagcttgtctcttaaaacccactggacgttggcacagtgctgggatgactatggagacccaaatgtctcagaatgtatgtcccagaaacctgtggctgcttcaaccattgacagttttgctgctgctgggtgagtgagggtcattctgaaatggggcaatttcagacactcctactgcctggactccaggtaccagtgtggtaaggagcaggcctgggccctggaagcaggggatagattgaaagaggagagaggaccctgaattcttaagtgttccaatggttcctaaggtcagaactcagaggtagtttcatagtccctggaaagtccattctgcaccaaacattcatgtgtactttgtagtcatgaggaggaacaggaaatgagataaaggggacatatgaagtgaatacttttataaaagatcaactggaaacaggatcttgagatgggtcctggagaaggaagagcccaagctcacctccccagcatttcacatacgcagctaaatttgaagccgtgttctcctgctcgacgttgatccactctcttctcttttacagcttctgcagacagtcaagctggtgagtatgccctttgcttccttgtattgacagtgttgtatcctcataatatgatgctgtgtttgctggggcggcgggggggtatgtctattccactgaaaatcaagcttgggttcagcatgggcagttcccccattttagtggggtctgggatttgcttcttagatccactgaagacccaagggaatgaggccgctgcaagtacagatcttgaactacatctacaataggactcttgggtgcctgacctcccttgggagctcctttggcatccacagtcccttcagggttatttattccacacccctttccactctgcccctcagcagctcccccaaaggctgtgctgaaacttgagcccccgtggatcaacgtgctccaggaggactctgtgactctgacatgccagggggctcgcagccctgagagcgactccattcagtggttccacaatgggaatctcattcccaccc

SEQ ID NO: 4204 - DNA, 6000 bp, Homo sapiens
ggtctctctgacattctcttgcccttctgtcctttacccttccttctcccctgaagcaagtcatagaaaccaaaatccctcttccccaaagcaagccgtaaaacttagaaatgttactctctccctcctccctggctgaagtgatccacccactttggcctcccaaagtgctcggattacaggtgtgagccaccactcttggccgggtatttgcatttctaatgggttgttagagatgatgatgctttaacacaaagacctgaattccctgaggaggtgtggctgatgcttagacctggctgaggcctctccaaccagagcctccatcagtcaatcatcctttttgtttgttttcctggtgcttgccttctctgccaggcttccctctcctttggggttggcagctgactgtagtgcctggctgtctcagcttgtggggaagtggctataaggaggaaactgtagagaggattgataaaaacaaccacagggattcactgagcctgtggtcaggatattaagaggaagagaaacaaaattcaaccaagcagaacaaaaagaaaggagtacattctgaatcaagaggctggaaactgagagtatgtaaaattggaaccatttgagtttataacattaatctgccttcccaaagtgggtctataaacactagtcccaactggaagcagagactagattcttctagccttttaatgataataatgattaagactaaatttatatggcaggttctgtgtttagcattatttatggattttctcatttaatcttcatgttataaggtgagtactaatgtaatctccatttcacagatgagacaacagagcttacaaagcatgaataggccaggcacggtggctcacacctgtaatcccagcgctctgggaggccgaggtgggcagatcacttgaggtcaggagttcaaggccagcctggccaacatggtgaaaccccgtttctactaaaaatacaaaattagctgggcgtggtggcacatgcctgtaatcccagctactcgggaggcagaggctggagaatcgcttgaacccaggaggtggaggttgcagtgagctgagatcgtgccactgcactccatcctgggtgacagagcaagactctgtcaaaagaaaaaaaaaaggataaataagatatccaagactgcacagctgataagagacaagatgaggctcttgatctgggtctgtctccaagcatcttcattatgggttctcatgatttttgagttattcatacttttccccttaccagaatacacattttatataaaatcgtccctttcaaagaattctcctttcttttcttccttagagaaaagtcttgctctgttgcccaggctagagtgcagtgacatgatctcagctcactgcgacttctgcctcccgggttcaagcgattctcgtgcctcagcctcccaattagctgggactaaaggcatgcgccaccacgcccagctaatttttattttttatagagacagggtttcaccatgttggccaggctgctcttgaactcctgacttcaagtgatctgcccacctaggcctcccacagtgctgggattacaggtgtgagccactgggccccgcccaagaattttcctttctgactgacatatttcagttttaataaatagtgtgcccctctattttaaccattttgttttagaaatatctccttgtattttgtgctttccctttcccagccgtgatgggaaaaagagactcatttctgttttgatttagtgtccttggaaatgccctacctgactctgtgtctatctcctttaataagtcatctaaaagatattgtctggttcttttgtctcagtcaaatgtctagtagtggaatttggatcctgagacaattcagggaagtagcatgtgcactgtgtaggacttcctgatcatttttaaatcgtggcacagagaaaaccacacaagtaaagttgtaaacaaatgaggctgcttacagccaggggcaactggccctacctggctattcctaggcctgagagccactcattagttctgtgtgctggttactcatacaaggcatgtaggtggtccctgcatactgtttgtgaagctcatttagtgttgtagaaaacctaagtctttagcgtcaggcagacttggtttcatattctgactccaccacttattaaccatgtagctttggacaaatcattttaacttctctgaatctaagttcttcatgtgcaaatgagggtgataatacttatcttctgggattgttgaaaattagaaataatgtgagtctagtgcctcctccatagtaataatgtgaaaggaaaataaaaactcaggattccaatacactgtgccaaaagaaaaaacaaattaaactgaaagctgagtcgtgcaagatactgactttccgttggatcctaagcagatagctacagagaaaagattaaaaatctccgtagatggccaggtgtgttggctcatgcctgtaatcccagcgctttgtgaggccaaggtgggtggatcacttgaggtcaggagttcaagaccaggctgtccaacatggcaaaacctcagttctactaaaaatacaaaaaaaaaaaaaaaaaaaagaaagaaagaaattagcagggcgtggtggcagatgcttgtaattccagctgcttgggaggaggaagcaggagaatcgcttgaacccgggaggcggaggttgcagtgaaccgaggtcacacctctgcactcccgcctgggcgacagagtgagactctggcaagaaagaaagtaaagtaaagtaaagtaaaaagaaagagagactctggcaagtaagaaagaaagaaaaagaaagagaaagaaagaaaggaagaaagaaagaaagaaggaaggaaggaagaaaggaaagaaagaaagaaagaaagaaagaaagaaagaaagaaagaaagaaagaaagaaagaaagaaaggaaggaagcaagaaaggaagaaagagagagaaagaaagaaaggaaaaactccacaggttactcgtttctaccttatcttacatgaagtgccaatttaccgagagcaagacagtacataatcgactattcccctacctgctacttttcccttacaacacgtggattaccatactcttcctctttcccctccagcctgcttttcctctaaatattgaaaccctcaaattcatctttggagaaagtcacagaccacatactgtttctgtgattctgtgttgttttcttccaggcatgtccttaaccttggcaaaataaacttctaaattaattgccacctgtctcagatacccttggttttacagtaagaattcacatgcttacatagtaactattaattttggtttcttagtgtgttacctatatattgtatgcctttgtttctaatgatatttataaagtattgatgccagctcattgttatcacattgccagttaaaaaaaaaactaatttttaacctaaaaattagataagagctggagatggatctgggggtagaacgggggcagtagtaaaagcacgcgtcagagtgggtggggctgtcgaaggtttctgaagaccacagagtgtgataacaaggttttacagtgtcatttccttaagtattaaagtattacagcctgcttcctgagaaggcatttgggaaagagtccccagaaaggggccccaggagagattccagagaaactcgtgttttgcagatgttgagggtgaacaaatggtaatgaggatgatgacagaacgcaagaaaagagaactagcattcaccggacacccacgatgtaccaagcactttgctaaccctcatattctcttttactttccaaaaacctgtagtactgtggttctcagccaggggcaattcatcccctggggaacacttgctaatatctgggggcatatttgttttcacaactgggagtgccactggcatctaacaggtagagcccaggagtgctgcggaacatcctacaatgctcagggaaggtcctcacaagaataatttggcccacaatgtccatagtgctcaggctgagaaaccgtgcttaaatggtaggcacaataatcttcacttttacagattggaacctgacactctgagaagccacctggcattcaacccgaaacctaacacagctccaaagcccatgctctttcaccatgccgttgcagtgagaacagggatggaaatgagggtggcaaaaatgaccaagatacaaaaccagggcacagattggtgctcaatagatacttattgggatattcattaaatagaagaatgaataagaaaaagaatgaatgagggcaggggaataatgaggatgagtgtggtcattctattgccatcctgacatacctccttgtccttgttccacaactcagcagtgagtctgggattatgacaatagagaaaattaaatgatggtaggtggcctggagtccccatgctcaatttcaagaagcatccagattccagggcctgggtctccaaatggaagtagaagtactagaagattgctggtgcacgctgtcctgcatcaccctttctcaggaggatagagactgaaacaggaggttctgagctgagttttggtgaccatttccctctttctcccagaggcccaggccagctgtggcctcagaggaagaagaagggagttgtttccctagtttctaaaatttctgtgaatttgaacatgggctacaccagatttattctgggaagctctgaatcttctaggagggaaagactgagaggaaagagggtggaaagggaggagcctgtgataaaacagaacatttctttttcacttcccctttcagactccagaatttgtttgccctctagggtagaatccgccaagctttgagagaaggctgtgactgctgtgctctgggcgccagctcgctccagggagtgatgggaatcctgtcattcttacctgtccttgccactgagagtgactgggctgactgcaagtccccccagccttggggtcatatgcttctgtggacagctgtgctattcctgggtgagtcagggcccccaggagggagagaggaacgggaacctcagttggggataaccctgggcaaggatgaggggtggcatgggaagaccgtcaggacacccaggggagggaaggcaggctggtgaagatgaaaacctgatgactctgctggctttggaaagtcatccaatgtggcagagttcagggttttttcagtgtctttcacccaatcttactgaacacccagactcttgatgttctgttgctttccacatcagaacccgctctgagaaaagtctagtaacctatacttgaatgataaatgaatggccagagtgtttgccttctttgaaatttatgcttcacaaaagaccaaatcttaggcaggagggccagtgctgcctcgggtaaggggtagggaggaagttgtaagatgcatttttgggaggaggtggcagtggccattctctgtgcccctgaaaccactttgtgtagcagaagcctattgtcttcatgtgtaagaatattcccctaggcagaagcacagggagatctgggttatccagggaaaagggactctgagaatacaaaaacctgggtaagtctggagtcatctgttgtgggaccagagaaatcatgcatgctgcttttgaccacacagaccatgatggggaagtactgcatctgatcagcaagagagacagggtctttggccaaaatggagggctcttttctaaccatgttctcagctgttggataggggacgacgactgattttgctgagtggtttgaaaagcctaggggaggccaagtaggggagacttactgccaggactatctctccaagctcagttcctggggcttccaccctcacattctagaggaaagcatattgccactcagccaagttgtgtgatgtgattactagtgaaacgtgatcagctct

SEQ ID NO: 4205 - DNA, 6000 bp, Homo sapiens
cagcactttgggaggccgaggcaggtggatcaccttaggtcaggagttcaagactagcctggccagcttggtgaaaccctatctctactaaaaatacaaaaattagctgggcatggtggcaggcacctgtaattccagctacttgggaggctgaggcaggagaatcgcttgattgtgggaggcagaagttgcagtgagccgagctcacgccattgcactccagcctgggtgacagagagagactccgtctcaaaaaaaaaaaaaaattctgggaaaaacacagaacaaaatgaaaaaagttgtggagaggagaggtaggatagataaaacaagaatggcaaattgtttaagctgaagctggatgataggaacacagggatttattatatcatctcttgtatttgtttgaaaattttcatactaagtttattttacaaattaaaacattaaataaaatagaatttaaaaggttggtgtttgcataatgttctgctaaataaaaaatcctaaagaactttagacaaatttttttaaagtcatttttattttatcacatactagtttccatctaccataatatgatttttttttttagagacagaatcttgctatattgcccaggctagccttgaacacctgggttcaagcaatcctcctgcctcagcctctcaagaagctgggattacaggtgtgtaccactgttcctggcacagacaaaatactagaataacagaattcaacaaggtttttggtacaagattgctgtacaaaaatccacagtgttgctataccccaataatagccaaatagaaaaaaaaagatgtgaaaaacaaaactataaaactatgaaaatgaaaatgaaaatcttagtgacctcaggagagggaaggatttcttaagaaagctacaagtcagctatcataacaacagattgataaatttgactacattgaaattaaaatctagagaacaaatcaccgtaaacaaagacgacaagtgtcaacctgggagaaggtatttataacatataccaagcgttaacttaaaaaagcccaacaatgggctgggtgcggtggctcatgcctgtaatcccagcactttgggaggctgaggcagaaggatagcttgagcctaggagtttgagaccagcccgggcaacaaagcgagactctgtctctctctctcttttaaaaatgtatatattaaaaagccccacaatgaataaatttagaaaagaaggggagactttatggcctgcaaggtggccatcctgcaggctgggaagcgtgcctccagaaacaggcgctttgaaggaggagggcttggagtgtagttcaggctgaacaggttggctaaacctacattttcaccaggttacaggaagagctatgaatattcatgaaagtggtcctgacacatgcgtattgaacaaaaactcatgtaacatatgacccatattcactttgggatggagacttaacttttttgttgttgttgttcagacggagtcttgctctgtcacccaggctggactgcaacgatgtgatctcagctcactgtaacctccacttcccggtttcaagcgatactcctgcctcagcctcctgagtagctgggattacaggaacctgcccccacgcctggctaattttcgtatttttagtagagatggggtttccccatgttggccaggctggtctcaagctcctgacctcgtgatcttcccacctgggcctcccaaagtgctgggattacaggcgtgagccaccacacccagccaagacttaacatttaaatgtattacgagccctatacgtcaaaaggtctttcaggacatgaagccatgcaaatgtgcgacctctgtagaccagccagaaccagtccatggccagtggtcttcttacctggagaaagttactgaaatcaacaaaaagttgtccaatgaaagctgtagctatggctggtggaacggggactgggggtcagtaagtcagcatctcgtggagctgcacattattttaatattgtttatctttaggccagtacttgtttagctgctagagaagaatcttgtggcagttagaacacagtttattctttaagtataggggtgtgggactaaaaccttgcctggaatggctttaggtcttttttataatttggcatcttattgccagagtctgttctgtcagtcttatcatctctgttttaacattaatgctggccagttgttgtgttaaactacaaaagggagggagtataacaaggtgtgtctaacctgtcccatcgtggtctagaactcagttttaaggttttctaggatccccttggccacaagggggcctattctgttggtggcggacttaggagtttagttttactttatacaggtgaatgaatagagcaggctatctaatgacgtacacatcatttgtgaaagaaaactccatagcaaactttataaaaggtaagagtggacagttcacagaagaggaaataaggtttcataagtatggaagaatgcaccactttgttagggaaatgtaaattgcaattttcacagcggtaaaaatggtaagagtctgaccatatcttgtgttggagagaatgtggaacaaagagaactcatcaatgctagtgagggtgtaaactgataaaatagtacatacattatttaagacattcttgaggctgggtgcggtggctcacgcctgtaatctcaacagtttgggaggcagaggcgggcggactgcttgaattcagaagttttgagaccagcctgggcaacatggtgaaatcctgtctctacaaaaaatacaaaaattagtcgggtgtggtggtgggttcccgtagtctcagctattgtggggagaggcatgaggatcgcttaaacctgggaggtcaagctgcagtgagctgagatggctccactgcaatccagcctaggggacaaagtgagcccctgtctcaaaaaaaaaaaaaaaaaaaaaaagagggagagagagagagaaattgagattcattcaaggaaataccatgggtagatccttaatatccaataagaaaaatgatttggagaacattaaagtttacatacattaaaaaaacccaaatgacactaaatgcatgtgtctataaacatgtttaagcaccgtaaaactaaaaataaaagtggactagaattacacttttatttttataaaataaaattttatacccataaaattcatggtagaagtggcctacgccaagggaggaaaatgaagcagggaggaaagaggaattcaattctgtagtatttaatttcttatgaaaaatctgggacaaaaatgaaaaatgttaaatttttaaattcttggtgataggtcacaaatgtttgtttcataattacttgcactttttgaataaaaataaaatcttttggaaattaaaaaaattggcgatttgtcatggtgattttcttaaaagactaaggtgtctagtgggatacagaagactcgatgattttattttattttaggttttttttttttttttttttttgagacgcagtctcgcaatgtcgaccaggctggtgtgcagtggtgcgatctccgctcgctgcaacctctgcctcccgcgttcatgcgattctcctgcctcagcctcccgagtagctgggattacagctacttgcccgccaccacgcctggctaactttttgtatttttagtggagacagggtttcactatgttggccaggctggtctcgaactcctgacctcgtgatccgcccgcctcggcctcccaaagtgctgggattacaggcgtgagccaccgcgcccggccttattttagttttttatgtcaatttttgaatttgtaattgggtgagaattaaagtgttataaatttcaccttaagtgaaaatttattagttttctaatgacaaaagtagttacatctgacgtaaggggatttaattatctttttctgggcttgcgtcccggaacgctgctgcattatgtaatctgtagtaatatacccacgagcagtttggagggttctgggaagcacatttgttttgcttacctaccatgggaaagattccacgtggtcctagaagcatacgtattcgtcggttacagtattttaaatattcactggccgctgaaatttaaaatggatgaaaaagaaattctcttaagtagcgttcttgaaactgctttatcaaactcagttcatattttcagttggagttcgtgatgtatgtgattttcctttaaataaaacccgaatctttagtaatacaaatattgggaacttcgattactgtaggtcttagggtagactcgcttggactttgactaaatactatgctttagaaatttatctttaggagataaatttggggggtttatctttttatatttgctttgtttcaatttatttaaataaaagtagtctttctagaagtatgttttatagtaccacttacctcggttactgtcccagttaagcagttttcacgaatgtggaaaaatagtagtgtttttctttcatacacgcgtatatgaaaaatttttacattgatagagaattattcgtaaaaattaaagtaaatttactgttagtctctaattttgttctgagatagccacgctgtggcattaagaaggataatcaaggaataagccataatgttcagaaaggggctttactttttatttttaatattattgataaactttgtttagtcgaattgatgtctgcgtgtcttcccccgccttccccataaaacagcgggacagaaagtcctgaaaactccaaaagggaaatatttactcagaggtctattcaaatttgcttagtctctgacgttttcctgtgtcgtacaaatccctcgtgcggcaaaagtagtttgtctttactaggccaccgtctcgtcagcgttacggagtattttgtccgcctgccgccgccgtcccagatattaatcacggagttccagggagaaggaacttgtgaaatgggggagccggctggggttgccggcaccatggagtcaccttttagcccgggactctttcacaggctggatgaagattggggtgagtgggatctgagaatgtaccagggtggctcgggttcgcgtctaaaggtttcttcctccctacttccgcccactcgtggtgacaggtgtggaccaaccctgcctggggagtgaggcccctcgtcactcctgttcgtgcccctggaagagtctgggagtatcgttcggcttctgtcctggccacagggagagtagaatattgtctaactggagttaactgtcgtttttcactattcccactggggaagtaccgggtgatctttttgtgtggctaacactggacgtctttaggaggtttagagcaaaatggctgggaccgccaaaaaggctacaagctatttcctgagtgtgaaatgtgggcggtgagcacaatggagtgggtttttgtgtgtttggtgtatatgagagaatgtggttatatacaagaaattctaatcttacagcttttactattggtttaagcctgatgtccgtcttggcagaaaagcaaaacacccaagcacctgacctcgggtccctgcttagctacacctaatacttatggtgtaatcctgactgctctccagatacagctcttaattttcttgttaatggatattttgtttggttttggtggtcaggaagggtggaatgggatgaagtggaaatgagaatgaagaaactttgttatctaagtatttagaggagacttttattctcctcttgattgcaagatataatagtaatattgttcttaggttccaatatgaatttgggattgtgtaggttcccaaatgggcccgctagtgagcctacaccactcatcagccttggaactggggggaacccagtttatctttctcccttggatcagcattctcaatagcaggagtggaaggaatctcaactttttattgaacaaagtcatt

SEQ ID NO: 4206 - DNA, 6000 bp, Homo sapiens
ttctagctctggcaggtatgatcttgggcaaattaacttctctgtgcattggttttctcatatggccattgggaaaataatagtacccatcccataaaattcttgtgagtgttaaatgaaataataaatgtggaattcttataacagtgtctggtatacagtgtcagaagttttatatgtcaaaagttctgctttatatatcctgaatctcccctcctgctaattgtactcaataaattattatttctggatcttatttgatcttcacaaccctgtgaattttcagttcatattgtcccccattttacaattagaaacgtgaatgacttgttcaaggtgactctgccccctaggggtttgtaattggatcactttccatgaaagtgtccaacaggagaacagcacctagtagtgtgcagggttaggacccagaagataaagtgaacactctcttagagttaaaattatctttgaaagacctttaaatcacttacagtatacatacttctgtggatatgacttcataggataattcttaaggacactaaaattcgagaatcgtggggtaaattcaggaagacactaaaagcaagtctatatgcagctgtctgaacattcagactattttgctttttagaaaactaaggtgtttctattgtctacaagagttcctccacactgatttttaaagactattaagcctttatgccttaatatatgtcaatggatttgtctattatggatagaacaaccaggaacagggagtcttaagaattaggttctaaaattggaggccgggcgcggtggctcatgcttgtaatcctagcactgtgggaggctgaggcgggtggatcacttgaggtcagcggtttgagagcagcctggccagcatggtgaaacaccgtctctactaaaaatacaaaaatttgctgggcgtggtggtgtgcacctgtaatcccagctactcaggaggctgaggcaggagaatctcttgaacctgggaggcagaggttgctgtgagccaagaacgtgccattgcactccagcctgggcgacaagagcgaaactgtctcaaaaataaataaataaataaataaaaataaaagaaaaaagaaaaagaattaggttctaaaattggtgcttaagttaaatgtgtgcagaatataactccaaagtacacaatattctctgcttttgtgttagtaaggcataatttctttaaaatccagggattgccatgcttgtctaattattggtgtaacagacaattttggggtgtcttctaatgtatgacatcccttttctgagaattgattcatgtatgcgtatgagctcttggagccatattcatattatatgatccattgccctctacagtttagagatagaggatgcacataagaaacacatttgaccagtaaaattctccatcccagcattctagaactggactcccataatatctgtcattctctcatgatcgtttgaagcaaggagagataaatttgagaactaaggcactgttacaggcgcctgctataaccagctataatattatgcgaaaataagcagaaaaggctggtttactgaaagagaatgggctaaagcaaaatgagcagcggtaagcagaggagagagacaagaaatgaatgagagagagaagaaataagagaatgagaggagaagaaaagaggagaggaaagaagagaagagaggaggaaaggagaagagaagacaggacaggacaggagagaagaaaaacctgttgactaagttactggtggtggctaatttgtggcttaaattccttgtgaagttaaatgtaccacatgggtttggtttgtgtgaatatccatgtatccttttaaggtatgtgtgtgtttctcaaactaagttaagttaattcattttactttcatccttcattttatgtcctgaggcatcacaaaagcatccagctcatagctatttagagacagaaatattatagttatttcaatgctcaacttttgtatttacttgaaccttggtttgtagactagaaaaggtcttgaaaagtcatcttgcacatcttacttctaattaacactgcatcttgaccattccggatagatctgtcctatttttgtaaaatcccagtaatggaattctatattgtttttcagtcatttgttttcagtgtaaaacagtcctcataacaaaaatacattacttcctatggaacagaaataattctgaatgcagtgactcacatttcccaagccagaccaaccagggggtaaaatctgttcacagaagagtaataaaatggtatttctccacatctgttcctgcaatattaggaattccagtcttactcaaaactctaccaaatagctctgagagttcccaggacatttcttctgtgtgttccatgggttagtcccgtcagctttgaagttagcatttgccattttcttactttccagctctggcttcctacagcagtggctggtgtcaaggctgaacactggttgtcactcaatcagagttgtctctgaaaactgaggcttcaatctaatgaatcctcctcatgctttaaatatccctgaagtattttagtaaaatatcactttcagcttttccttgctcttttctttgtagaaccttcttcctagagttcaagattagaccccagctttggctgagaatagcctgagtgatggagatggtgttttgagtgattgatagacatgctattttcctttgagctactccttactgttgacgtagcttagtttttcttgggacttttatcccttggtcctttctgtgttcagtgagttcttccccagaagtgtcctggtctatatacaaatagactcttgactgcctagtccgcctcagacaaacccaggtgtgtctgggttttgcagtctacatcactggctcagtcctggctcaattaagactacaacttgagttctaattatacatacacagagaaaaaacaatctcacctatggagtagaaccaccttaaaatgaaaaaggaaaacacatacctatatgtacaggccctgtcctttatcaggctcagtctggttttatgaagttgttactgttttccacatttgacctatagtatcaccaaatctgtgaaatcacagattgtatttttggtacattctttatagtaatgccaaagaggtgaactactacaggcatggacatttgaggaggatttctagttgtctctggcaagcacccagtaaagtgcctgataagagcccaacacatatttattgagttgagctgcatgtctggcctgagtcaccctcaggcctgacttcagatgctgtaagttatttgaagagtcttcttaataagttgatctctgcagtgtcttttctcttcataaactaaccctagttctagttttttctctaaggtcttgcttgctgcctttaatcatttccatggctgccctctgaaccattcccatgttctccgtgtccttttctgtaacagctgtgaggcacagatgttaacggctgctttctgaccctcagactggtgctgagcttatgagacttttagggacttaacactgactcaacactagctctcagtttcatggccaccctcattgtgtgtgtgtgtgtgtgtgtgtgtgtgtgtgtgtgtgtgtgtgcgcttttccattccccttatgaaacatctcctgcccctaacttactatgggaacgttcctccatgatctctttccatcctccctttcctgtttgctcacttcttttcttgctcatcttggagactgtgcaatcccagattaactacaaacagagaagagctggtgatagctccagagctcagagaaaggaggtctctttacaagaagtctggctctcaaaggtaagctcggtcttcttgacctgccttttgccatctacctctctctttggatctcctgcccctgggtccctgcttgccctgcattctccatactcacggagaatcaggacctccagaacagcccagcgtgggcttggtcaggaatgatccaggctctgaagggttaaggctggagcctggatggatggagagggttattagttatcgtttggagagtggagtgaaggctcctcccctgttgcctacccgcccctttcacatgatctctgactatagctgtggaagcggggagaagataaaggagggaaaaaaaagttcacaaaataatttagaaagtccttataaatgcttgtgttttcatttagcagcatgaatccaggacagcaacagaccctcagaggcagcagccaactgggaattgagtggaaaaaaataggaatcctggattctggcagtttccagttgttttcttggtggggggagccgtggtgggaagggattaaatcaaatctttcgggggagagctcagctctaggctttcatggtcaaaatactaaaggtcagctccgcgtgtgtgccccaactgtcctggaagcttcaattggaaaactccaaactttaagttttgcttatagcttcagctcaagtaagaaaaatgaggtgtggggtaggcggcgggggggtggggatcacaggaaggggatcaagtcttagatggaggggaaggaagtggagatggatatgggtgggaataaggcagaagggagcggtgtctttaagtctgtcctatggttatacatattttttcttctatgaatgggttttgctgtaaattatagctttgcccatagtcccttgggtcaaaagaaatagtctccaaacagaaaacagctctgattggtgactttccttcttccctccccaacccccttcctaattgaaaccaaatgtgcaatatattggatgctgggatccctggcgctttcccaggaatcctcagaatgtgaggtttctctcaaaggcatcttgcatcagcctgtggatgtatgcctaccaccgggctccttcaccagcaaagtggaaaaagaagcgtttcacaacaaattcttctttttgggttggggaaacgcagtggattatagctctgttttcttctttccaaaactgtgcacccctggatgaaagtaagttatgtgggtcttttttctttattattttttcttttttgaaaatgaaagctccgcatatacttcttttggtgtttcaggaaaagttttaaaaaggaaacagaagggcgttttaagtcagacaaggaagggaacgtaatgaggcaccacagactcgagaaatcagatcccatgtttttgggggtctggatttatgctatgaagggaagaataaagagcagtaataaccaaagaagcctgaagcaaaataaatgaatctatagcagctgcaagatacaataaacagtgttagcagagttgaaattgttggcaggcaagacaggccgattgcagagttagtttcaggatgaagaaggcagagcaggagagctaagtttttagacatttagtagtggtgttagaaggtcctgagttttggagatagtgtagaccaagcactttttgtttttcaggggagttgctgatttacttgtgagaagggtaactttggatgaggggtggcttccccctgagatttggggtggctagggggaggctgggtgcatggaagatttttcagttgtgacagtgaaatacagcttcccagactcatctcctcgctggctctgggtgcctttccctttgttatggaatgactggggctgttttcatttgggacctctgagtcctggcctaggttcaagagtcccatccaaagggaaagagaactgttcccagtggctgaaactctcagaccagccatttgaggcaagagttcgtactgttcaagccagtagggggttcagcaccattttgccgatcattggcttcctacaacacagagttaagagtcctgaaaagggccttaggcctctcatctaaccccttcgctccacagatgtaaaaaatgataggaaggggaccgacctgttcaagtccca

SEQ ID NO: 4207 - DNA, 6000 bp, Homo sapiens
aagtgcattctctgtttgtatactttttgatggagaaattgatctatagaactgcttaattttttgaggcatttagacagcaatgaaaggtagttctccacaggacaccgaatcaaaaggagagaccagactctggcctcatacccagcctatttgaaacaagctatctagtttctcctgcagacaccttgtcaacaacatgcaacagtgtcaggtgccttgcaggaaaataatctgagtcccaagctagcctgtgctcatccacaatcacaatgaacatgtcaaggaagaatttgcagagactcaagggaagcacaatgggataaggtaatcactttcagtgaaaaactgttttcttgaaaacaggcttggacacaattgaaagctggcttcctgcaaacacaccaagagtctgtaatctagcctatccattatatgtcctttattattcatgatatcctattcttctaccttgttgcctggtaactttttctgaggactgagtttctgcagcgatgtggtgcactcttcctgtgatgaggaaacatctgggcccccttctgcaggctttggaagatgatgtgtcttgtcaaggggtaaagggcaaatggatttaatttctgcttaaaactatcatagacgttccaaatagaatatgtaaaatttctctgtattagaaaaagaaacgtgataccaattgtatattttcttttctttatttattctctgtaagtctgtcagatgataaattgtaaataacaatgattaaagagtcatgctactgatggatctccctttctgtataaacagtgccagttctgggctttgtaacctttgctctttatagtctttcattcctggggaagtgatggggcatgggcccagagctggggtgtatgtggtatggacacctgtttgtggggctttccagcaaaggattatttaaatagacctctaacatatgagttgactgtttattgggaagaaagcatcttggtctctgacatatccaaacatacgagacactgggattttacgtcctcacattaattagtccagttctggggaatccagtctagaattaactggtgatcccttatcgttatggttacagacttgtcttgtttgatacacagaaatcctttttaaatccaaatatagtctgtctcagactacctgcacatgcacaaaccaaaaaaaactatgaaaaccagaatttagactcagtcattatactagagattagaatgaaacgaccccaaacaacccatttcttacctggtctctgagaataagtttatacttttagttttctgagaatatttctcagaatatgtgagttttctgagcacatttttcagcatggggtatggtagataaatcacagggccaaggtttggcagggatagatgggatcattgtgtaccctattgttcttctgatttccaggagaacagaatgagcccatgcaaaacataaacttatgatgattaaaaaaaacacacctatccattcactcatcaataaaaacatattatgatggttatcaagctgtgtcctatgagtgataaaatatttgtaaaatataaaattaaatggcatctattttgaactctattctagtctctctgagcacctctagcagttcagcccatctttcaaaagtcataacaccttgaaagcagcaactttagtgcagaaaaaggaagaagagagcagtttcatcacttggcttgaatgaaaatcttggggaaaggagagacagacggtcttgctctgaagctgtctggacttcacttaattcagtctgtcttaggctggcggtcatcccgagactgcggtaatgctgagcctccacagcccaggccctctcccttctttatagaaatgatttttttatgggacagccacacaaccaggtcttcttcttattccttatcacctctgagctctagaacattttaaaatgagtctttgggtctagactctcacaattaggcttaattttactccatgactttcagaaaatgttgttaaattgtggtctctttagaacagttgaaagtgggataagcgtaggagctgagttccacccccatgataaagaaattttattggccgggcgcggtggctcatgccggtaatcccaacactttgggaggccgaggcaggcagatcacttgagctcaggagttcaagaccagcctggccaacacgatgaaaccccacctctactaaaaaaaaaaaaaaaatatatatatatatatatatatacacatacatatatacacacacaaaaattagctgagtgtggtggtgtgtgcctgtagtcccagctactcgggaggctgaggcaggagaattgcttgaacccgggaggcggaggttacagtgagccgagattgcgccactgcactgcagcctgctgacagagtgagactctgtctaaaaaaaaaaaaaaaaaaaaaaaattttatttaggaatctaatgttctaataaccagatttgttctttcaatctaattttattgatataggataaatgattactaagtaagttggtatcattaatcaaaacctctagaatcaaaagccaatataaattatctcagtgttttatggatcattgctgttcataaataattaaaacactgaaagaggccattaaataaagtatgttcagtagcgtttgatgtatgatacacagttttattctgcatgagctggggctagtgatggtcccattaccagtctactacaaatacagaaacctagagtaagcattagaaacctttatagcagttttgtcactggaaggagggccttgagtgtgagtcgtccaggtttttggccatttggaacgaaaagttggacaaaatgcacaaagtaacaaaggaatgaagctgcgaaagcaaaagcagggatttattaaactgagaaagcactccacagggtgggagtgggcctgagcaagtggctcaagggcccagttacaaagttttctgggttttaagtagttcttttgaggtccctatgggctaccccttatctggatgaaggatttggtttatggctaagtaaaggctgaggtgaatttgtgccctatgcagatgatggcatggcccatgcttagtgcttggcccacagccaatccaaggcactttccctttccatctgagacatggtggaagtgtggcaggccaggtctcactaacaactgtttcagtactaagtggttaaatattaaaagccagtgcccttatacaaaggctgggatgtaacaaaagcccatcaagaattttgcctaggcctttcctgggcctcttaaagcatacaaaataaagaaagaattcttaaccggacccctttaggattaaacaagttttattgtggtctgaagaaactccccaggcctccacaaacaagtttattggggggtctaagagaactcctcaaacctccaccacttagcaggagagaatacaagggcaatcaccccagcacctggacccatttaggttaagtaaatttactgaggctccagaggaaggttttcaggactcagaccttagttacagattaaaagaagttaatcacttatgtctttagataaatgcacacttacacatagacagttcgcttagaaggcatataagctctgaaaaactgtaattttgagttggtctggtgataatttccaggccttctccctgcaaccggttacagaaataaaaactctcttcctccccagctcatctgcatctcgttattgggccttgaaaaatagcagcccaaccctcagtttggtctgagaacagaaggttgtagggagagtagcctttgatcctttgctactggggagtggggagatggggtttttccttctggtttagctttaggaagttggtgttaattgaccctaggctctcggcccccagacccaggtgttttccttttgatccagctttgggaagccagcaccaattggtctcagattccctacttccagcccttgctgtttttccttgattgagctttaggaagtcagcacgaagtggccttaagtaccctgcctccaaaccctattctgcctcattttggcagagtacttttatatgtcttggatctaataataaaatatcggggcttgtgttttgtatgccttttgcttttctttttctagcactttatttttttgtattttctaaaagcacccatctgggatggcttggagacaaaaacaggtcctttagcacagtttgagatgcactgatacagaaggttacagcacattctcagtacttcggagaatgaagttctgagattctgattccacgccacattccaagttttgaatactggtaatttacgtctgattctacataaagttcttaataaaatcagtgctcattttctcaaataagcttctttagaggaggaggtctgggatcaaaagttgggctgtgaagtggcacaatgcctggatctgtacatccaaaaaggagtggaaaattagatgataatcgcccaactttggctcctagacccaaaccttttctctaaaatgggcactggtgcaaataccgtgaggccttcctgcaaagaagtgccaatctcaggcgccagggcacagacccagtgcgtgtcacagatcctgtcctgagtgctaggccgggtgacgcccccaccaggattaaagatcaggcgcccgctgagccctaggaagcagtgacagacacctgcgcctaggcggagcgagaagagcctggaatggctccgggctttgcgtcacgcagctccgcccctcggcctatctcacccgacgccgtctccgagggcagggaacggttggcggactgagattggagggatcagctcagactcgatgacgcaacgggaggcggggcgtggccgtactctgattggtgacgggtgaggcggcccgaaatcgtaggacttccgaaagcagcggcggtgtttgcttcactgcttggaagtgtgagtgcgcgaagatgcgaaaggtggttttgatcaccggggctagcaggtgaggcctcctttgggttggcagaggcggcagcggatcaggggtccgagagagcaggggtctgcgaccctccacgaacggaccccggaagcgcccgcccctggctttgcctaggttccccggagtctgcagcaggtgtggggcatgtcggcctcttgaggtgctcagtaactggtgctttgtattaaacatgacagtgaaaaggaaaactagagcatcagtaagtgatgagtgtcgcagtgatgatcctgaggttatcaaggcaatggggtactcaggcgggctccgccccttttccatctttgcctactgttcgtatttatcgtcagtgcccaatattttgctcctgaccacgtgatcatgtcttatactccaggtgttttgtctgtacaagccttttgcctacaaatttgaacacccatgaacattaggacggtggagagaaaacaatcccgtttcatttagctcagtgctagagagctaacatactcttcagaaacccagagaaaattaatcttttcctatgaaggcatggttggggtgcagaataaccagctcataataattccagggttgctcgtttagtctctcagcctcttctgttgcttgttttacctgtcatttgcacttctgtgaaaaatgtgtggaggatgaagccaatcaaaccatttttctactagttgcatttggcatttttaaatgattaagacagaggacatgttaaacatttaagattgatccactttcaattatttaaccacatgcgtattaactaagccagcttggtaggtgtctgcatttggcaactttttagcataccctctcaagtgactttaaccgttgattggtgcttcttatgtggaaggtactgagtaagtcagaattgattttgtctgtttcttttacatatattgtgacatgtgcaattgtatattaaatgcctactgttctca

SEQ ID NO: 4208 - DNA, 6000 bp, Homo sapiens
aggtcaaagcttcagtgagccatgatcacatcactgcactccaacttgggcaacagagcaagaccctgtctcaaaaaaaaagagttctggtaattgctcaggtcagaggagactgaagcctgaactagggcaaagggactagaagagaaactgttttgaggtgccatcaacacaaattggtaataactaaaacctctatttattaagtgactatagtaggcccaaactctgtactatcttcacaacagccaagtaagattggtgttagtataccaattttgcaaataaaaaggcaaaacaagttgcagagaacttagataatttcccccaaagtcacacagctaaataaggggctcttctggattctgctgcagggctatctcattcccacctccaaggaatgaaggaaaaggagcgatgctaagtttccagctgatgtaattactcagattatttcctttgctgaaatatgtaaaggttttattggaatggtaatgaatgtggctttggacatgctgtgtatgagaatcctgtaatatagtaggtgattctgcatgaaacagaaactgactctggctaccttgctgaataggataattcttggaaggctatcagggctcacacagtcacagttaggctggaggtacaggcttcataaaaaggccaagaagtcagagagttccagatggctaggcaacggaaagaagtcacatatgtattcatttcacaaatagctaccgagtgtctgtgatggttaatactgagtgtcaacttgactggattgaaggatgcaatattgatcctgggtgtgcctgtgagggtgttgccaaaggagattaacatttgagtcagtgggctggggaacgcagacccacccttaattgggtgggcaccatctaaccagctgccagtgaatatgaagcaggcagaaaaatgtgaagagacgagacaggcctagccgcccagtctacatctttctcccctgctggatgtttcctgcccttgaacatcggactccaagttcttcagttttgggactcagactgggtctcctctccttgctcctcagcttgcagccagcctattgttggaccttgtgatcgtgtaagttaatacttaataaactcccctagttctgtccctctaagagaaccctgactaatacagtgtctactgtatgccaggcatttaagagcaatagggatacagcaataaacagactatatctccattttcatgtaacttactactgagtaggaaagccagataataaaacaaatgttaattaaatcaaaaatacaaaagggtagtaaattttacttattaccaaaaatggtagtaaataaaacaaggaaggggaataaggagttccttgagaagagggaggctgtaatttttaacggagtaatcagaaaagactgagagagatctggtcttcccactgctgccaccataatgaatggagatctccaaatgtccccatgttgttgttaatttcctcaagaatcggaggcctgggagcaagcatctgattggcaaagctgaaggcacatgcccacccccttagttcctctgaagtgagggagagggagaattggccttttaacttttttacagtaggtacctactttcaaacaacatattttaaaataagggattttccttaaaaaaagaagggcattttgactctagacaaccaaaatattcacagaaacgggggaaattgttaagggagagtcaaagaaacgactcatagaagaatgagggggaaaaatagaggctagcactctggagagccttgaacacattttaagaggtagggagacaaaaagggaccaggaaaggaggcaacaaagaaaacaatcatgacatagcaatgtctgagaatccaaggatagagagcgtttacaaggcaaatggtgacctttgagagagcagtgtgagatgacgtttggaagcagaagccagattgtaaatggagaaggaattaatggtgactgaagttaagtacagactaacttctgagcaagtgttacatatccataatttatattgttgtaatagtgttgtggaatcaggaggaccagagagaggccttggggtatatacataaggatatctttattgagtgcactcagacccagcagacttaacatccaaagaccgggcccagaacaaagacagcacttgacttttatacacacctcaaaaaggggtgtggaccagcctgaagccggcttacagtggcatgaaagcagggatacagaggcaggacaaagacagttaattaaactgtaacaggttcataactcaggattacacatgaccattgctatgcaacccagatgtccattatctaggtttgcctagtgcctagcacggcttattccatgaccttcactatagcgtccaggtggcctgctcagacagtttatgaccttcactctactgcttagataaaacagaatacctgaagtcaccagttacagagaacaggaattttcataaactcataccataaaacaaaggaaaatttgtttttcttctccctatgtggagggagtgctgggagagtctccagagcacattcctttgtgtcctggctccttagatagtattatcaagactttccctgggtctgggctgtgcccattgctgcctctggaacaagtcagcctaatacaggaaaacttacttctctttttaattttttctttaacttcccacctcaataggacttgcaaaatatattatcctgagacaaaagggcaggacttttgtgtagcactttgtcctcacttcacttgaacttcacaataactttgtgagaaaggtcttattcccctttagagagatggaagaaaatgatatccaatatccagtgtgggagaggactgtaactctcttcctggagtgcatcttattgacagagatcaaaacctagaaattcctctgcaaaggaattcagtgaaaaaaagaaatcataagcacgtacacagatttatctacaagattgtacactgcaataggaaagaagtgaaagcaagctaactccagcaagaggattggtacatccatgctatgaaaagacatgcactgattgccaaataatgttgcagcatgaaccgttcaagaaatgaaaagcgtcctacatgaaaaaaatacactgagtgcatgacaggagttttctagtccacaacatacttaggttcccagttgcaaatcaataaagtgacactctggtttatgtatcaaaagaaaagaaaaagaaatgaaaagcaaaaaaagggtttacattttatgaagtgaacagagcagaccacaaaacagaatatacagtatgattctattgtgtgtgtatgtaatttttttgtgggcttttctgtatctccgaaaattctaatataaaggaatactgcttttgtaataagatttttaaaagaaggtcctcagtggttaagtacttgtctgtggtcagagataactggcaaagaagaggccaaattttttttgagactgcagtctccggtgtaaaatgagggtgcaaggtgcatccccgctcctgatttttgaatcatcccttccaccaccttggaatgacttcttacgtagaacagccagcaagtggagaaacttgcctcaataatgcaaaactgtctccctaacttacttcctttcaatgttcaagcaaaacaaagccctctctacatccaacatgacagaaacccaacatgacagaaagtatgagaatggttggaaattgctgaaacagcaacagtaaagatttaatgagctctcaaagtacctctagatgtgcaaatatgacaacccaataaaaagaaacacacacataacctagagccttcaaaaatctagatttctgcctttccacaccttaacttggaatcattcaggtgggttcctaagcattctctcggaggtgaggaatcctccaaagaggagactctaggaggggcccaggtgtggcaatcttcaaaaggatgagggatgtccagaggagaggtggcgggagggtgcacttaaaacacgcgaaaattggaaacgtgccttctgcagtcagttccttcggattttccggcatttagaagccagttctactccttcagcccgaccgtatctgcaggtctcacccaagaccaagacccccgcccccacccctcctccacccggcctcgagccccgccccggacgctggacccgagcgtaacgggagcaggtgttcacatcaaaggtctgggtcgcgaaggcagagactccatgtgccgcaaaaaaaactccacggacaattgggagactcctttcaaaaaaacaaaactccggagccacgcgactccgcgctcagggggcgtgggtacggcccaccacgagggcagggctcggcgccagctctcggcaaaactaacaatatttgttaggccctaaacaaaaaggccctaacagcgataaatccattcacttcgggagtgtagcaacctgggacaccaagcgccgcccacgccccagctacgcgcctcagggacacatcgattgaggcgcggctactttcgcgcacgcgccttgcatgcccgtgcttcgcccttacagcagagcgcctaaaaccgctacggtggctctgctggggacaaattattcacgtcccactgttctgcaaacccaatccgggaggtatgacctggctgggacagtttaggaagatggccacgaaggcacctgggggagtagatatatgtttttgagaatgagaggagtaaatcgctggacgaccatgagcaggaagaaaattaggcctccacctcccaaccagtggccctgagttggcaacttagacagcgcgcgccagcgccaggagccccgccttgggggcgtggccgcgcgctggtcggctggggcggggcctgcttctggcctcatctagccccgccccaggcgagggcgccgcacccacaccgcgctgcgcagttttgttctgctccagctgttcgaaggtgatccaggtgagtgctagcacctgcgggcagccacgagcaccgggccgccgggggcacttcagcctttgcgcagggcactcccatatttcagcctatgcgagctgaatagagacccgctgtctctaacctccccccacccttatcagtaaattagcgatctgaatttccaccctctctgctctccccttgccttgcatcttttccctggtggagtgggttgggagcgtctaagcgaggcccgacctatttatgtgtaactcaggaaaattctcaaggtcaacccttcctccattccttcctttcctctcctgctgtccccgggctctgcagtctgggggcacctttctgccttccggagaccacccgaccttgccctctgctgttccggcgcagaggatggcgagccggacactgccgggggagtggttgtgcaggcctgatcagtaacactggtttcagaagtggcctgtgagcaatgcacccgctgcggtggggatgtgttgctagggacggtcgggagagcctctgaaggaattgtgtttgttttcctcctgcctcttagaatcgtttgtccatttgtactgggaaggtggtcatttcctaccgctgacttagagcaagagacgcctctaggcgggtgggggactcttcaggttcttccttggatttcagaaaatgccccttctttatgtggggtggcagcacggagccgtagggctacagtagtggggcagttgcagggcggtggaaggcgctggagactccttagtgagtcattccccgaagttgtggcttctgctgatactttccttgagagtcacgagtttacaagctacataatagcgtcgggggcaagtaagtgtggaagacgaggtaaaggaaaagcagatactaggatgggtagaaggagaggcaggggttagaactttaattccttccctggggacaggagatgccctggaggggaaggcgcttccggctctgcaggtat

SEQ ID NO: 4209 - DNA, 6000 bp, Homo sapiens
gtgttttttgtttgatacagggtctcactctgtcgcccgggctggagtgcagtggcatgatcatggctcactgcattttagtacttttgttgccggaaaaaggggtcttcaccgaacctggagagagggttcttggatctcgtgcaggaaagaattcagggtgaaagaagcaagtttattggaaactactctgttacagagcaggatgttctcagaaagtaggaggagaaacaccccgttcttaagtttttcttatatagtgatcttacctatgtaaaagctaggctaagctgtgcctacatacgggtgagcagacaacatgacaaattttgttactctgttgatttaaagaagacaattattgacattttagtgtgtgaatacgtaaaagcataactgtgattatcttaaaggcatatattgttgtagatattaggacatttggacttcttgctgttgtaggagtcagtcctagttatcttcaggctgtttccttaattataaacatcccatgactatgggtcgtggcaggcaaggaatgtgccttgttagtcctaaaatggagctgaacttaaaatggcattattctagctttcctaggctgctgcttccctaacacgttgacaaacacattgacaaacagtaattgtgaattgtcattctagcaaataaccaaccagataggaaacaagtagacagagtgactatcttaaatagacctattcattaattttatttcatatgtcatacattcatcggtttattcattcattcattcattgctcattcttttttatttttttccgagacggaagtcttgctctgtcacccaggctggagtgcagtggcgcaatctcagctcactgcaacctccgcctcccgggttcaagcaattttcccgcctcagcctcccaagtagctggattacaaacggtgggcaccaaatgtatttttagtagagatgggggtttcgccatgttagccaggctgttctcgaactcccgaccttgtgatccgccggccttggcctcccaaagtgctgggattacaggcgtgagccacggcgcccagcctactcattcttcaacaaacatttaacaacaagtactatgtgaccgactccgaactgtccactttcttcctatggtttgacaacagaaaattatagaaaatctagcgctgtctttacccttgttttatttaaaactgccctaacttgagtcttcagttcttcttagggctccaggaaaggagggaggataagaataccttgtacaatgttaataagttctagattgccagatagtgtattcatcaaaatctaactggaaaaaaatatgccctggacacctaagaagtttatactgcttttctccttaaaatgaggaagctgtagaatataactggttagagaaaataatataaccacttcagatatctgaaagcctcagtctcaagaagtctccctgctctctctcttttcccttttgaatttactatagctattatcattttagatttttccccccaacttcttctatctaatcattaaaaaggaacttgtcttttactcggcaggccaaatacttgagtatctcatttgactgtcataacaatgatgcagaaagactgacaataacaaaactcagaatattgattgcttcattgacagtgggaaatatccctatttggtaggaggaatgcctgcgctatctgtccaggcacatgcttccctagaattaggtccttgggaagcagatgtagtacacagatggttgcagggcccaggaaaacagtgtatcttgaggaaaattttatcccagctacagtgaatttagaagtctgacagcacagccttctcctgtaagaattaacacctccctaaggacccttttaccctcgttcccccaatttggtgtctctgtgccaaggggaaggagacactagaactctaattttccaattttcaaaaatttctagcagcaatgcttctggattaagacattctttgtgaaactgatttggcttcaggcgaatctttctcaaggtggcctgggattcctctttgaatctatctgatttgttatctgcgaggagtcaaattctcagggttcctgggacaccacccacattccaattttcctctggcaacagatcttgaagacaaagacagacaggctagaaattgggactctttttctcttgattatacttctcatccaatttatacccagtcctgtaattcttttcgtgaaatgtctctcaaatcctgtcttctcatccccactatcaataccttatttcctgctctcttcattcttgccctgctgcagtggttacctttttaaaacacagatccgaacttcttacacccctttcaccactctccactgcctccagaaaaaacacaactcaaggctcttcaaaatatgaccgcagcctcctttcctggcattctctcttcccctctttccctcactcccctcaagttgcaaaccacaaaggattcacctaatgtttctcacacttggtaggtgatttcttttctctgaatgtgcttttcctgttttctccgttctctgagtttgcttttcctgttttctctctggtgaattattcatcttttaaagttcaccttaaatgttttatccttggtgaatctttctagatgcttcttgggccagtggattttaggagagcgaggtatatgtggctgaggtacatcacaatcagcagagaagctttaaacactgctgagagtcactgtccctgctggccttgggtttcttctttattcactcttcctttttttgagacggagtctcgccctgtcgcccaggctggagtgcaatggcgcgtgatctcgtctcactgcaacctctgcctcccaggttctgtagcaggatgagccgcagacaaaactcctcagacacggagttaaagaaggaaggggtttattcggccggaagtatcggcaagcctcctgtctcaagagcctagctccccgagtgagcaattcctgtcccttttaagggctcacaactctaagggggtccgcgtgagagggtcatgatcaattgagcaagcagagggtactgtgaatgggggctgcatgcaccggtaatcagaacgaaacagaacaggacagggatttttacaatgcctttccatataatgtctggaatccatagataacataaccggttaggtcaggggtcgatctttaactaccgggcttaggtcaggcaggcccaggcctggtttcgggtctggttcttaggcgccgggttacctgcctttaatttcgcttctctttccttttctgagtataaaactatatgagaggttctgtctctcttctctcagttcaagcgattctcctgcctcagccacccgagtagctgggtacagtcacgcgccacccatgcccggctaatttttttgtatcttttagtagagatggggtttcactacgctggccaggctggtctcaaactcctgacctcgtgatctgcccgcctcggcctcccgaagtgctgggattacaagtgtgagccaccgcacccggccctcatttttacaaatgtaattgagtacttgtttgtgtacactagtagacgatgtgcttcttgagagtaaagcccaggtgttctacatccatggttcaattaatgcattggtatcttttccaacctatggcatttgagatacaacttcaaaaggatctgctgacagaaatagggcaaagtggttctggtattttttttttttaagtttttttctcactaatgttcttatgatttcgctgtactgcaatgttagctgaaacagcacagatatcaggaatggcattgttaagactgaccttagacaaaaaccctgaagtgagaggttacattttgggttctcaccatactcttcccccgctcttgtcctaattgtctaaagcttgcttcccttcctcatcgtatcagcctcccacctgaatcttcccttttcctccttcacactcatctttcttgtgcccctgtcccccatttttcccttttgtaagccattttcataaggatccttccaaatatttcccctattgattggacaacccgtaggtggcagactgttctgggccaaggcaaccaagttgagcagggccagcaatcagtgtcgggaacttctgcagggcacttcagaatcagtgttgggaacttctgctttctatttttcacggacacagacaggaacacagatatgcgaaagcaaaacaatcaaaaagcattttcatttgtttttcaggtagtaggaaagagttccagattcccatccttctgaagccaggagggaggttcctaagaggaggttagggcaagatggagacttctttttaaactagtagatttcgcaaattgcaacacatacattatctagtccacgcaaaggacaggccttggggacacggcacggggaacgtgttccacctggacgactgaatcagaagtctctcccccatcaattgaacgcctcattatttttctttctgtcttttctttctttttaaggtaaatgaattgcttctttttcgttaggtgaggccggcagagaacaagaagagctgaaacggaggcgaggttagtacccagcaaagacctgtggcgaggagagacaatgaagaggaccacgggactggaccctgagaaaggcagaggagacgctggctggtggggcccgcaggcggacagccacgcaggcaggcggaaggctcggctcggcctgggaccgctgcagacccggcctccgcgcggggccgaggcgcctgggtgggaccgaggaggcggggccttcccggcggacggatgatggacagcctgactctccaatcgcgtccttaaaagggtgcgggcaggccaatgagcggacagcgagggccggagtggggctgaggcttcggtgcagagctggagagccgcggctgggaccggagtggggagcgcggcgtggaggtgccacccggcgcgggtggcggagagatcagaagcctcttccccaagccgagccaacctcagcggggacccgggctcagggacgcggcggcggcggcggcgactgcagtggctggacgatggcagcgtccgccggagccggggcggtgattgcagccccagacagccggcgctggctgtggtcggtgctggcggcggcgcttgggctctgtaagtgatgccaggaccagggctggggccggggagtggggcccccgggcccgacacacgcccatcgcggcggtcgcaggccaggcgcgcgcactgagagccgaggtggggagggggcgcggcctgcgctctctggggccgaggggacccagcccatggggaacgcgggcctccgcgactggccgggaaggcgcagagcctctttcttctctttcctggatcctggagtgcggaggaggaggggagagtgctttaccttgctccttcccggggggcggtccaggggagcggacccggcgggcggctgcggtgagccctcgcggcgcaccctgccctctcctcgtggtgactctggatcgtctaggccctcccggattctgactcaggaactagggttctggcgttcttcacctttgggaggtggcggaaagttgcaggtttttcatttgtagggcctttgttgatttgtttcctgttaagccagggttttgttgtaagttccctttcccatgctctcattcagttttaagtctccgtaataaaagagtctcatttccgtggtctgcaaaacgccaataaaaaaatattgttacttctaggttagaatgcaaagagcttggaataccagtgagatggcctggcttaaaagaatttggtcaaatccatcataattccagacgtagccaccataatttgacaagacatagagcattaaaaagcataattttcctaaaggaaaaaaaaagctcctttttcttaccaaatattgtgactcaagcttaaggtaaacctc

SEQ ID NO: 4210 - DNA, 6000 bp, Homo sapiens
tcaggcctaccacctaccaatcatgcaagtaagttcagattattgcaaagaccggacacctctgcggtcctgctagaacaaaccaaacaaaaatcattctctgtgtgtcttcttttctgtgcctgccttggtcacctccactatccacgtttaataatttggcaaaggacatggcaggtggagagaaatcccagtattctcactatatcagggatgctttctggacgtcctctcaggaaacaggaaacagcacagcagaaaacaacttctgggagtctgctagtcaaggcctgggagccaaggtgttgagcgggtaacctaccactcccactgatgacacgaatggtccgcttaccaacatccctagcaaaaaaaaaaaaaagtcctttttttgttatttccatactatgtcctcacacaaggattcgattccagatccagtaaaataggaaagtgccagaacagaatgccttcagatgaaagaagtgaacggatagggtttaaactgcagcagtgctaaattattgttagaaaccagaaccattttggagaatgatttggttttctgtcaaacaggccaggtccattgtgcagcacagaatgaagccccggagcaatccggcatccttctgtgatggtaaggcactcagcccagccccatgttaggtgcaacccaggtatctatgcatgtcctggccaaggtggcaagtccagcagcatttcccagagctcgtcctctcccagccctctttgtcttccattgcagagctgtgcattccactgcaaacagagcctgccattgagccatttttctctgcactgcacatagtttctgctgccaggatgagtcaccatgcaacacataccctcatcccctccacgctgtacttaaaatactctagggctggccaaacagaaccccactgtgagtgagcacgtgtgtgaaggtgggattggcagctcagccctgcggagccctctgaagagcagtctgcattgtgtttggcagagagattcagagagccaatatttggggaggggcagagaggggaaggtctgtttttcaaatctggttcgacctcatgcagcctgccaagttgcgccctctcttttgcaggcacccctcactttagcttctctgaacagaaggatcttactgctaggggttgatttgtcctgcctcttctcccagcccagcttctgactggccaccttgctacaaacaggactgctctgtcctgcttttacctgccagcctgtctgcctccagcgtagatttttcttcaatcgcaagagcatctattcatttcctgagttagaacatgtcatcctcactgggacggaggtctctcaccgctctcctgccattcctgctctccgcttcccctcatccacccacagagcactaaccttgggcagaaccaatcacaggactccagaaccatgcctcttccccagcctgcactgaaaaaagggattaaaaattgttctcttcctcctgagcctttaaactgaactgaataatttctttctcctttctgcagagaaacactgggtttccatacgcattgactgaaaagttgtcttagttccccatggtccacaccctcttccacgcccagccacacactccacctgccggggcacccctccctttggagaaccacacatgttcggctttcaacctgctgctacagcacccttcacagaaggggccttggaacaaaagcccagctcagcacagcccaacgggacataaagtacttgagttattcattacttgagttggaggaggtcacacagcaggaagcgcactggaaagcaaggggaaaggtggcagagagggtggggaatgcgtcagggtgaccttctaggggctgatgggaactcagagtcctggtatggggtgggtatcagagtgggaaggtgacaaagtcatagcaacagccccaaggttagccaaggtcaaatggaaacagctgattataattaagctagctacttagctcttgccatgcctcaggcactgtgcttaacactttcccatatcgctccttttatccttgcaataatgtatcacttcaattttatgactgagggaacagccctggagagaacaagtgacttgcccaaggtcacccagctagcatgcatgttctgaagctgggaaggtgaatgtaggtctttaccagcttgttctgtgtgatgaagtggttagatgagtggtacaattccagatggtctagagtggcggggcaagtggagtctgagatgagctactgagataaatctggttcctatagggctgagatcatgttttccagcagcaatcccaggactgggtggaaacctggaggttttcaggaaggctggaggaggctggcttaggatgagctgctgcattggctgtgcagacgtgaccctcaggacttcatctgaacctgtgaagagtttccatgcagggaaggggggatgagtagagctagggacctaaaatttgagaggggaagatattccccagtggaagacagtaaatcaaagactagagaccaagcatcagtctactgggtgtttgctacacctctgaagagctaaggtaggacacttgttttaggaaaaaagaaaatctgtcactggagactctctttatatattttgtcttaccatatgcttcttttggaaggggggttgggaatcaaggtacaggaacggagtgggcacaagtaagggcaccaccaactcccagaaccgcctcatcccttcccatgctaccctttccccactcatctctttttgctgattctgcctacaggttttccctcctgttacagtaatggacactcaacaacacatacccttcccagcaacctgtcctgctggaaaactactcgataaggtaacttctgcctgaaggggaccagggtcatcatacccgcaagtgcagcatcttcctgcagctctcatactaccaagctggggtttttccaacataaacattacaggtgctaaacgagaggtggcttcctttctcaataagctgttctctctctcggatgcccttgacagagccctgcagcctcccccactggggcttggtggataggtggtcgcttctcccccgaatttcaggaatgtttaggtttgcacaggtcctgcaggcgagcttggagaaggattagaaaaatgctcattcttaatcagttcgggcttgtctttatgccagcgaggttgaccttggggacagaagggtggccaggataaggacaagcatcctggtattggggaattctctgatatggggctgggacgtcaagatgggccatgatggcccctggggatagggcttctctgcagtggaagcagaagcatcccggtgttttctgctgtgtcactgtcctcagagggatgtataaagctgcttgggggctcataggagagggatgaaaccaagagtttggctttccagcaacagcggacaaagagtgggaaggggtactctatgccccaggtctgcaacatcttgccctatgcgctaggttttcccaaaggtcctttggctccaagaattttacagcagaacaaagggatcgatacccccaagggggcataaaagcatgccaatgagaatacccgccgccgaccgggcaccaagaaagtcctcggtggctgggtcacgtgcagatattgttgcctggggtctagactggcctgagtctcaattggtttctacgggacaactcactgcgggctaccgccctgggtgggtttggcaattgtcctgctcgaggtggttcaggccgcccacaaggggcacagccgggcagtcaggaaccggggctgccggctgggctggcctgcaaagaagagggaagggccggaactgcaaccgcagtggcggggagtgcgagggggcggcaggtgcaggagcgggaggcggggcggagctgggcagagtcctcgccagtccggcgtcccggagtgaccttcccccaccccgccagcgcccaggaggggtggacccacagcccagggaggccgaaagcgcgggcgggcaggcagaggcgtggaggctgggccaggactgccgggctggggtcctcgaggctccgggcgacccaggtgcggatcccccagccacggaaggggcggttcacgcccagccgggagctgggagggggctgcgcggcgctgcctgcgcgtccctcaccgccgcccccgcctcctcctcgccccgcgcccaacgccccgcgcccagcgatccaagcggcccctctagccccggcggctcctttgtgccggccccgaacccgccctctcgggccgagtccctgcccctggcgccggcgattggccaccgggccgctagagggcggggcgcacggccgccggggcgcggtatatagtaaaggtagggcgggcgcagccaattcctcggctcctggcgggagtgccggtggcgccccgcagtccgcttgtccgtccttccctctctgactctcctaccccgggcctgtctctgcagaggtcaggggaggcgggggcccagcacacgtccccagtggcagcgggagcggcagctacgggttcgcggagcccccgaccccccaagggctagaggagcgctcggcggaccaaagaaagcccgcgagcggctgcgcgcccaccaataggtgcggggctcggagccgcgcagcctgcgccgtccctccctccgcccccgccccgccgccgccgccgccgccgcctccccctcctcctgctcctgccttggctcctccgccgcgcgtctcgcactccgagagccgcagcggcagcggcgcgtcctgcctgcagagagccaggccggagaagccgagcggcgcagaggacgccagggcgcgcgccgcagccacccaccctccggaccgcggcagctgctgacccgccatcgccatggcccgcgggaaagccaaggaggagggcagctggaagaaattcatctggaactcagagaagaaggagtttctgggcaggaccggtggcagttggtgtaagtacggggtccgcagctcccggccgccgcgtctgatctttcccgggcggcgcatcccctgcgcagggtccgcggccggttccgcacccaccgcgctggccggggtggcgggggcgagggtggtggacgctgctgggtcgcgccggcctgggcttgcagtcctgtgcggaatgcggtgtccccagagtggggcgcagggtcggggctggaacacgacaggcggaaggttatgcatatcgtagcgatcttggcttggtaatttgcagtctttcctaccgtgcatcggttgagccttttactcctgggaatagtcaggctctgcgagactacatttgtctctcccgtgtcctgagtccttaaaaaaaaaatgagatctggggtcttgagagaacctcgtgaggtgatgggatctaatgcagacgaggttgtgtgttacagcatctttcttctagtctaaatacgtatctcaaaagagaggaaagagaagggtggagaggaatccatccacactgtagtatttcacagcgatggctaaggatttccctccatgacctcccctggagtcatcaccacccagaaatggttcaataagctccatttcaggactccgattcttagctttggcccgaaacctggcaaagtctggttgttttcaaggtctacacagacagttgtggatcagtcagtaggttgggttgattatggtgaagggaatataaacgcagagcagctgatcttaaaatattttgtgcagcctgttgcttggttggatagacttttttccatcgaaaattagatttcttgttttcagcctctccggaaaggtgacttttttttttttaaaaaaaaggtcattttgaagggcagagttgtaggcgaatctatgagtcgtgactgcgtgagggaaggagggagggaactccccctgctgcatcactgccccctcctcctccaacatcatcatcatc

SEQ ID NO: 4211 - DNA, 6000 bp, Homo sapiens
ttacttatggtccaataaatgatgtgtaacctcctcttgatggtattctggagtcgggagaggtagtgaaatggaagaataactcaggtgtatcacctgttaaacccaggaggtggaggttgcagtgagcagagatagtaccactgcattccagcctgggcaacaagagcgaaactccatctcataaataaataaataaataacttgctgagggggtcctaaattttaaatatataccactgttgtcagacacttaggagtggaactggaaaactggcaacgaaggagatcactggaataagttacagagaacatctgtcactaatacttagaacattatctggaatataatagacactcatttactagattaaaaaatgaaaagtgtatatgaatgcagcttaatgtgccaatgaaaggcatcatgtgcattctccttagttataagttccaaccagctgcccttcattttacatattttctattttggctatttaatatgccacgcaactcagcatgctggacagtgcacgtgtgtctgacttgtaactagtcagctacaactacaagttgaattagttaattaacctctttcacatttttaggtctaaaaacaaaataggtgtgttgatctataagtgggtcttgatggcagaaatacttccccatagtggcatctggaaatatataggggtagtcttttctttttctatgcctagtagttttcactggcatttattgacttagatactaggtaagctaaataccctgcaatcttaaggatgatctcacacaatgaaaaattgccctgcccaggctgacttgccatagtgctcaagcctgtaatattagcactttgggaggctacagctggaggatcactgagcccaggagtttgagaccaccctgggcaacatagcaaggcccccatctctactctacaaaaaaagaaaagaaaatttgccaggcatggtggcactcacctgcagtgccagctacttgggaggcagaagcaggaggatctcttgagcccaggagttcaagggtgcagtcagccatgatcgcaccacggcactccagcctgggtgacagaacaagactccaactcaaaaaataaagaaagaaaagaggccgggcgcggtggctcacgcctgtaatcccagcactttgggaggccgaggcgggcggatcaagaggtcaggagatcgagaccatcccggctaaaacggtgaaaccccgtctctactaaaaatacaaaaaaattagccgggcgtagtggcgggcgcctgtagtcccagctacttgggaggctgaggcaggagaatggcgtgaacccgggaggcggagcttgcagtgagccaagatcccgccactgcactccagcctgggcgacagagtgagactccgtctcaaaaaaaaaaaaaaaaaaagaaagaaaagaaaaattgcctagcccaaaatgttatagtgagatcgttcataaatttaatccttaaagttctttcaagttctaaaattacatgattctaagtggaaagtacattttgaaaattattgttttacaatgcagacatgagtatcaggctaacatcagccaatagggtttctgttttcttcctcttttgcgttcttgcgtgttcctggctggcccattactttcaggtgcaatatgtgggctctatgaatgaaatggtcagattctctggtgtgaaactcaaactactgtccccattcctcatgcatccaaaactagcctggaaagtctttttggccattatacaccaacccagttccaggtgatagaatatgagaaatggaatggagcctaaaaggctatcttgtcccctcacctctactgccccaaaattaccaaagcaaccaacacaagggttctttctctaatgagcgatgaaagtgatctttcttattccataaggctcctgctctggaaggctctggtaatggcgaccattttcctggtaacttagggttatttgtaactccagcagctgccacagaaggctcagatgggaactcaaagttgtaagataagctcttcatttattttccttaatcagggctgtcttggttttcctgcccctggggcaatagtggcaatgtgaggaacagagaccttgcccctttgtaaaggaacaagtggagtaaccactctggacctatcattggacctgactttaactcagtgtttctcaacagtgcaaccaaatgtcaaaaatcacagacaaacattgtttgcacttgcttgttagttccaggattaaatagacagtcttttattacctaagttctaaaatgttttggttttattttttccctatcataattttttaaatttagttttcctattttatttattctaagctctttcatctactcacatatgatgacccccaaaggtaaagcatactaaccgcttcttatatatacattcatatttttctccctgatcaaaatccattacagatcatatgagtatgtctatgtgtgtctgtgttcacatttatacagatttttaaaaatcagcattcatttttgaaataaggatcatattataagcacttttttgcatgttgcttttttcctttctagtactttaatggggtatttctccaagctatctgttagctctaatttacagaataatttattcacttctctaacaaaaagcattcattctatctcatttttgatactttgaacaacactgaaataaacttttttatacaatttgttaaagcatgcttatatttgtatttttataagatatattcccaaaagtaaaatcacctgatcaaacagcatatatcttttttctaaagaaaaactgaagacactttatttttatcattattgaagttaacaattgacaagcccattagagaaaacattttacataattttacatcactgacttagagcccacacatacatgacaaagatagctaaaaacatatgaaaaaatatatctttggaaataaacacagcattcctctggctatgaaactaaaaaagtttgagacactttttaaacttgtagcagaagatgcaacagactgtcagcttcatttagcactgcctgcactaattgttgttcactcgattctttacgagatattagcttcagaatatggaccctaaagaatccacatctttggaatgttccatcatagctttgatgatcaagtctgagtctccaaaagccactctcattttatagaaatctttcaactgttatgcatcatcagacatgacaacaggtgtcacaagagatatatgccttgcctccagcaaatcaattagaagaaaacaaaaatttctttaaaatacaaagaaaatatagagcaagagaacagaatataagtcttccactcatatcctccaacagcaacaataatctagcaaccatccagggatgaaagtttcttcttagcagttttgtgatttggaggggacaacagagtagagaatgcccactgccccaaccagagcctgggcatttgagattctgaagatttaaaaaggggctctgcagaaagctgtggcaagcaaaggataggctagagagagacaggactaataaatgtgtcgacttcagatacattcttgtgaaggacagcaaagaataggtggccttttcacctcctagagagataaaacatcggaggccaaggtagaattgggtgtgtcctgccaatctttaaatgaataaggctataggagtagtattgcttcctgaagtagtcacaatcttttctttgcattattttaattctatttatgtagcattaaaaactgaaaagaagttctatgtaaaatgagagcagagaaaatcatgttgtctgaattgcagccctagaaaatttcatgaacctatgacttgtttttaatttttatctacaagtcacatttgctcatttttaactacatgccacattttatatgtacctatgtatacatgtatttatgtgtacataccctttaatcctctaatccttgttaaaaaaaaaatagccagacaggaattaatagtgtagttatccctattttattaatgagtaaatcaacgattggaaaggttaagtgatttgcccaaggccacagagctatagaagtgatttggaatctctcatactcacacttcagagatgaagattactgtcttcaaaaggcatgaagggtaattcctcaaaattagacatataccagtttacactaagtatcacttgcttaatgaaggagttaactagacaaaatgagtgagatgttataattctaagtgacatcaaaatatagttgataggaaaactttttttgaaattctactatatttcatgactgggagttaggtgcagtttattttgtctaactgccaacataattttacctggtactaattttacctggttcctggtactaatagatcaatttgtggaattttgatcttttctgtgaccacacactgtactcagaaacaagtaaatataagcttgagaaatacaggcctttgaccccaaaattccaagacaggacatgaaaagagagagcagagaaaagtcatcctccttattgggctatctcaattaagtagctaagtttctacagtatttggaggactactatgagctacccacaaaagaactaggaataaggaaaacaaggtaaactttcaaataacacataataaaatggagtacagaactgcaaagtcacctgggagaaactacttgactcccaggccaagggtccaagagtataaccagcagcttgtgtttaccataatcaaaggaaaagtagaaactgggtggccatgggagactggcctacagtcccatccatcacagagggttggcgtgtgctcacccattcaaggaccaataaatgagtatctctttaagagcagctcctcccatttttcaacaatcttcctaatatgtaggctcactagaacattttctctttcaaactgcccagacggttggacaggacgtagacacacagaagaaaagaagacaaagaacgggtaggaaaattaaaaaggtaggaggctgaggcgggtggatcacctgaggtcaggagcttgagaccagcctgaccaacatggtgaaaccaaatctctaccaaagatacaaaaattagccaggcgtagtggtgcatgcctgtaatcccagctacttgggaggctgaggcaggagaatcacttgaatctgggaggcagaggttgcagtgagccgagatcacaccattgtactccaacctggataaaagcgaaactccgtctcaaaaaaaaaaagaaaagaaaaagaataaaaggtgatatagtaaagggttgagggtgggatgggtaaatgaagaaggagcatgctgtagttttataccaaatatggctagaatgagaatgatataattcaggcagtttgtttgtttctgggaatcacggatcatgatgtttaatcatccaagtctatttccctgcatagctatgtgattttgtctaaaaagaaaaaaaaaagtagtgaaagaagtagtggtagagcctaaagacagtgtcaggaacagaaaaaagttaggaaacgtaattttcttagaggggaatggacgctgaaggtagtgggaaaaaattgtttttaggtaagaacatgacttctttccccaacaccccccggagagaaggtctcactctgtcacctaggctacagtgcagtgctgtaaccatagctcactgcagcctcaaactcctgggctcaagcgataccccagctcaacaggactatataatcccagagtagctgggactataggtatgcaccatttacttgtctttttaattgagaaggtgaagtacattattgatggggagaaggggtgactacctggcacactgaaatacagacatcttcagaccttgttcctcattatccgtatctaagtaaaaagaagatacagattgcgtgtgtgtgtgtgtgtgtgtatgactgtgtg

SEQ ID NO: 4212 - DNA, 6000 bp, Homo sapiens
ccatgcaaattccatgtttcagaaacatcgttgatatctagtccacgggttggtaaagacttcttagatatgataccaaaagcacaaacaaaataaaaacaataaaatgtactttatcaaaattaaaacttttgtacttcagaggaaaccatcaagaaagttaaaagacaatgcctcgaaaaacagaaaatatttgcaaatcatttatctgataagagaattgtatctagaatatataaagaattctcacagctcaataggaagacgaaatgggcaaaggatctaaatacacatttctccaaagaagatatacaaatggccaacaggtatattaaaagatggtcagtatcattagccagatggtaaataataggaaaatgtaaacaaaaccacaatgagataccacctcacatccactagaaggggtataaccgaaaagaagagttggagaggatatgaagaaattggatccctcctacattgctggtgagaataaaaaatgttaaatgtgctttataaacagtttggcagttactcaaaatgccaaagatagaattaccatatgacccagcaatcccgctaaacatatacccaagataaatgaaaacatatgtccatacaaaaacttgcatatgaatttagatagaatttagatagaagcattattcatgacagccagaaagtagaaacaacccaaatgtctatcaactgatgactagatgaataaaatatgatattcatacaataaaatactattgaacaataaaaacagaaggaaccactgatacatactgtactatgtgtgaaccttggaaatgttacactaagtgagataatccagtctttaaaaaattgtatgatttcatttatatacaatttcagaataggcaaatctatagaaatggaaaataaattggtagttgccaagggctgggagtgaggggagcttgaagcaaaatagaaagagactgctgacagatacaggagatttttcgggggagggggtcgtgatgaaaatgttctaatgttgattgtggtgataattgtacaacctgtgaatatactccaaaccattgaattttacatttcaaattgatgtagtttatagtatatgaattacattacaaaactgctttttaaaaatctgatgcacagaacacttccctttctcagggctgtcatggatttagttcttttgtataactttcttaccactttaatgagatttttgaaagggttagcaaatgtgcttgctcagtccactcttgattcagaagctttggagggattatttttaaaaagaactgcccccaaaaatatagaggacacacagaagttatggaactatatatgtcacacaggaaatgcagatgggttcatacaaaaaaaaaattgagtcataggcgagggaagagaaaaccagtttggttgttatttctctaaggtataaggcaacttaatgagagaacttgttggtttgttatttctctaaggtgtaaggcaacttaatgagagaacttgttggtttgttatttctctaaggtgtaaggcaacttaatgagagaacttgtcctcacaactctgtgcttctcaaaaagtaccatgtggttttaaggagttttctgttgaaatatgtaacagaaagttaaaaatgaaggaggagataccagggctgatatgtatattgttcttatgataatatacacaattaagggagcttggactcatccaagaatggttcagagggggtgactatggggcccctaaccatgtagaggggtgaagggggccaacaccctcttattctcctatagtaaccggagtattttcaaatccaaatacttctcagcatttttatgcctatcttaaaactttaattgatgataagatttcacatctcagaccctagactcttgcagttagtgacattactcctctttcacatgctgcctgaattcctctcttatccactaacaagtggtcatctaacctttgtttgatatttacagtgatagggagttcactactatacaaaacaactcactctatatttgtacagcacggttggctagaaagttctttctcacattgagacaaactcagtttttttgtatcattaacatatgtaatcctagagagacttgtttctacccaaaataggcttgtatgaccttttccgtataggaaccttcttgaaggcaattgtcatggatttttcaatatctcctctaggctaagcatcagaagtttcttcagtggccccttatgtgacatggctttaagaagttcattgccatcttggttattcttaaattctctggtagctaaggcaagcttatttccacatgcgtgaaagatggatgggtggtaaggcctatggtcctgaactagtaaatgaattaacatatgtgatagtatttttacaacttaaaacactttgtaaacacaagatactattaaaacatatctccttcatagaaggcaacttggcaaagcatattagaaacttgcaactcaaaatatggtctaatggtacacctggcatcacctggaagcttgcaagaaacaatttcaggcccacctcatatccattaaatcccacctgcattttgacaagatctccaagtgtttcatttgcacattaaagtctgaggagctctgtaaacttaaaaatatgcaaacactttcactaagcaatccttgtttttaggtatttatcctgagaaaatgattaggttaagtacacagcatttttataacagcaaaatcttacaaagaaagttccactaatagaaaattggccaaggtgctttacggttcttctatggatacaccatttgccagccaaggctaactctataaagcaagctggttcttctcagctggtgctggtacctagaagatgcctgctcctcagctgatgcatgccaccatgaacacagatgtatgtttagttgacacaaaaggccattaatatccccacatcagttatccctggaggataactaagccatctgcctccatcatcttttaagggttcagtcagtttaaaactttgcttctatacctaggtattttcttttctctgtatgttggtcaggtacaattatttttaacagggcttccatcaatatcataactacctagagaagacattgcaaagataaaattggagaattgttaacaggctgttaacaaaatgtgtacccaactgccaatgaagtggcttgatttttttctttttttaaaatttttcttttgtatccttttattttatttacttattttttagagacacggtctcgctctgttacccaggctggcgtacaatggcacaatcatagcccactgcagtctcgacctccagggcctcaagcaatcctcccacctcagccttccaagtagctgagactacaagtgcatgctgccatgcctgactgattttttgttttttgcagagatgaagtctcactatgttgcccagtctgaccttgaactcctagcaataccctaccctggcctcccaaactgctgggattacaggcatgagccactgtgcctggccttttttcattttaactgagaaatgtgttcagctcttttgttccttagtcattgatcatcacttttgttatatctgttagtcttgtcatagagttgctgcacttattacacagagaaggccttttatcacgaccaatttattttaggaaatttcagggaaaacgtttttctagaacaccttatttgacattataaaacaactcttcactcttgcactccagacctccctttccagttttctttttctccatagtggtcatcaccacttgttttattttattgatgggctgtctggctccctcaactacaaagtaaactccacaaaggcagagagttttgcctcttttattcattgctgtacctgcatcacttagaaagtttctggcacctaggaagtgttcagtaaatatttattgaataagtttatgtaaaacgtctcagactccttagagaaactggtcttttggggttggagaataaagttctttacctcatcagttagactctatctaaggtacacgagggcttgctagtctcctaagttagtctgctaataaatgttaaccctaataactgaaattattagcagaggtaattatccagttctatatcaaggcaaaaagacagcagtggatagaaagatcttagaagtcccactaggttcatccaagccaccatacacataggcagaaaaatcaaaataagatatgagcctggacagggtgagcaatctgggaaaagatgaacacagtatgctaggacccagaaatcatcaagtctatgaaaactaagccagaacacaaatgtgaattccataagatcaggaacataatctgtcttgttcatccaggcatggtaatctgccagaaatagtgcttaactgcaagaactgaatatttgttagataattaaaccatcaactaaatgagattcatgcaaccatgaaaaatgctgctataggtacacaatattgatatactagaaagttaaaaaatcaagttggaaattagactattccatttctgtttgtgtgtatgtatctacaaataggtggaaggatataccaaaatgtcaacagcagttacctctgggtggtgaggagtaatcttaaccttgttatttatccctatatgttcatttgtgaatgaatatttattacatcattataaaaaggatttttaaactatctgtatgtttaagagtatatgttgctactatgtaagagtatatgctgttactgtaaagacattgcattactactgttgacctcagagcacgagcctcttgcctaattctaggactcctaactaagtctttggagtttcagctggaagaatgctggaggaatacggaactcctcccatttctcacagccacctccaactcttaaaaacgcttccaactgcctcccagcacacaaccaagggagaaaactattctgtcaaagagacggtgccaaaaggcaaaaacaaaggtaaggatgatcgctggggaaagaagctgaaaaggaaaagctcagaactctagctggaaatttggctcacatccctagtatgttactgcatagtctggctttgttcaatgggtcgcttttaaatattaaagctagatgtaagcaaggtttgcaacaaagtccataagaaactcagcttttctcaaaggcaagaagagagcaggatttttgactggctctttattcaatagtgctgcttattaaattaccactgctacaatgtttaaagccaattacctgagcacatcataaggattctcttaccggttgtcccagttaagtaatgttgattgatcaactccttgacaggagctgatggcaaagaaggtagctgtgattggagctggggtcagtggcctaatttctctgaagtgctgtgtggatgagggacttgagcccacttgctttgagagaactgaagatattggaggagtgtggaggttcaaagtaagtgagattttcttgggtcttgaacaggttgtgttgttatttcagggtgaatcacagttactgatgggtcatattgagaaatttattaaacaactctgatcagattttatttctacttattgatgtggccataatggaactgaagtcataggctggcatctctcccccagtcaatactaacccaacccaggtagctgacccaggcatgtaaaagatctcttcttttggattcagcaattgtcttacagcccatacttctgtcattctttaatacgctaatattagagaacattttacaaaaatagaagtaacagggattcttctcaagatatcacttctgtttcaattattaaaccaaatgcttctttagagaccatgctcttatcattactatttttctctgacaaatgaagcatgtttgtttactgagctttatcaatgacattctagtataactgctgtgaaactctttg

SEQ ID NO: 4213 - DNA, 6000 bp, Homo sapiens
gtttatcaagctataaagatgtttaaagaaattcttaaaaagaaaaacataaaagtggctgtttcctccaatcttcagatagtggatatgtgagtcactgaatcaccactactgacactagtaaactcatttcaagcataataattggccttaagtagtcttggttctccctccaactccactttcagtgctttcattctaaaggtgggttctcaggaaaagaaaaataataacctcgaggtgtaaggaacagagggaattacttcctttaatgtgtggcattaaaaaacaaacactcacattttagaatgacaggtatctgtggggaagatctgtgtaggtaggggacctttgatgcttcgagtgtagcgggaagttgtgagttagggaattgtgtttgtcttaactttgttttttgtagagagaaaaacaatttcacggggtgggtccaattttcagactaagtaaattctgtgctctctttcagctctaaaattctgtggctctaactgtgaatcagagaagtgaaatagagtaatggaagtgagactgaagaagatggttgacaactcaagatgaatgaaagacaaatctaacacctgaaaccataaaaatactagacgataacatcagaaaaactcttctagacattgacttaagcaaagacttcatgaccaagaagccaaaagcaaatgcaacaaaaacaaagataaatagattggacttaattaaattaaaaagcttctgcacaacaaatgaaataattagcagagttaacggacaacccacagagtgggagaaaatctttgcaatctatacataaaacaaaagactaatatccagaatctacaaggaactcaaacaaatcagcaggaaaaaacgaacaatctcatcaaaaagtgggctaaagacatgaatagacaattctcaaaagaagatatacaaatggccaacaagcatatggaaaaatgttcaacatcactaatgatcagggaaatgcaaatcaaaaccacaatgcaataccaccttactcctgcaagaatgtccataattttaaaaatataaaattatagatgttggcatgaatgtggtgaaaagggaaaacttttacactgctggtgtgaatttaaagtagtacaaccactatggaaaacagtgtggagattccttaaagaattgaaagtagttctaccatttgattcagcaatcccactactgggtatctaaccagaggaaaagaagtcattacacaagaaagatacttgcacaagcatgtttacgtcaccacaatttgcaattgccaaaatatagaaccagctcaaatgcccatcaatcaatgagtggataataatttatgatacatatatatatatacacacacacacacaccatggaacactactcaaccataaaaaaaggaacaaaataatggcatttgcagcaacctggatggagttagagaccattattctaagtaaagtaacccaggaatggaaaaccaaacattgtatgttctcactcataagtgggagctaagctatgagaatgcaaaggcataagaatgatacgatggactttggggacttaggggaaagggcaggagggaggtgaggcataaaagactacacattgcgtacagtgtacactgcttgggtgatgagtgcaccaaaatctcgcaaatcaccactaaagaactttttcatgtaaccaaacaccacctgctccctaaaaacctatcgaaataaaaaatatactttttaaaaaagaagatgattgagaaatacaatgaaggagctaagaaacatccctctagtgcattgatcaataaagacttggtatgatgcattaacaaccaatccccaaacctcgataccttgaaataaaacaaagattatttcatgtatgtgtccattagtgtaggccctgctcatcacattcaccaggtattcggactaatagaagagccatcttgaaagttgctgattaccacactgaaggaaaagaaagttctatggaatcttactggcaattaagtgctctagcccagaaaggacaccttactctagctcacagttctttgaccagaacgagtcacattcctcccaaccaaccgctagagggccaagaagaacaatcctaccattcatcttccctgaaggtaggaggtccagaatatttcctaaagagcattattgtctaccaattcagcttcttagggtctaggtccactcgaataaggggactacatatccttccttatcccatggcctagagtataactgactaacaaaaatccctaaaaatagcagaaactgaagttgccaccgaaggccggtcttctcatttttaattactacaagtctcttgctgattatggaaaatgagatgatataataaaatcatcatcttattctcaaccaacagtttaaagtcctgtgattctccttatgttagcagcatgcctggtaaggcccagggacaagttaagtcccaccattagtgtaccaaatcccagtacttacatacttaccttgatgtgtatatgctgcacaccaaggtaaattacaaatcaaacatattctgatttttgaaaacatacttgaactaatagtcattttaaaggcttactctctgggtataattaagcttgaaatcatccaaatattattattttcatagctgcagcaaagcagctgaatttcacagagctaacaatgctgtctctgtgctgaatacttaataagccagaaatgaggcaaaaggtgagcccaatgagcaagcagtatactcagtgatacacaggacctccaggtcaaagggttataccatgttgaaaatcaaggaaaaagacatattctttcagaaatttctctctgcttcagtccaccaacctctcatggaatttattctctgtacctgtgggagtcatttcagtgttatgaaccagcaatcaagacaccttatctggtccaacaatgacagcatcatcatcatcatcattatcatcattacaatcatacacagtatttactatatatacacaaatctcttgacatagattatctcatctaatccccaccacaactatctgatgcagatgttattatgcctgttttatttattttttagaattttttattttatttatttcaatagcttttgggggagcaggtggtgttttgttacctggataagttctttaatggtgatttgtgggttttggtgcacccatcatctgagcagtgtacactatacccaatgtgtagtcttttatgcatcaccccccactccaacacttacccccaagtccccaaagtccattgtatcatttttatgcctttgtattctcatagcctagctccaacttatgagtgagaacatagaatgttcagttttccactcccaagttacttcacttaggataatggtctgcaactccatccaggttgctgtgaatgccattatttcatccctttttatggctgagtagtattccatggtatgtatataccacgaattatttatccactcattgattgatgggcattttggctggtttcattttttgcaattgcaaattgtgctgctataaacaagtgtgttcaagtatcttttttgtataatgactccttttcctcattttcaagacagcatcagctgcggtagtatagggagaatgcaagattgccctaaggtctcctggataagtattcgtgtttctcaggctaatagtcaaaactattacaaagttcagctggaagtttccttctccctgtggtccttcctcaatttcactggcagccctcctcaaggacccctgtgagataaagtcagaaatgacttccctgggcaccaagagtacctacagggctcttcccactgcttctacttttatatttcgttttgctctctaaattcatcccagctctaggtaaggttaaatccttctcctgtgatctggatttttaggttccctagtgggtttgcgtgtttggaggcagattttttcccccactcacactttgggcactcacagtttttcagctgtctcatggagtttgcagcggcaagccacttctttcaaaggtcctgtgaattcttttggttttcctggtatgttcatgcagtacttcttggaggaaaatttcactgtgtgagtctccacatgctgttctgtctgtctgcgtggaaactgcaagttagtcctgcctcctatccaccattttccaacaatctgtcgttaaccatttcaaagtatagaattcagtggcatttagtacattcataatgctgtgtaaccacaacctctatccagtttcaaaacactttcatcacacccaaaagaaaactccatactcattagcaatccttccccattcccttctttccccagcccctggcagccactcgatcatgcctattttaaattgaggaaactaaagctgagaaaagttatacaatttttccaacatgactctgataatagctggtgaacgcaatactcgaacccaggacttgtgattcccaagatcagactcctcccatatacctgtcttttatttcccaagtgcttgggcaatcagctgcacttaaaaagcctttacaaattgagtttactaatgtgagtaatatatgattttttaaaaataataattgtccctaaaggtgaaatggatcaaagcccttaaaagtgaatctgtggtgtagtaactgttaacataattgtcttattttattctcatccccttaaagaataaaactgatgaacaagtgaggatgctggtgtaactccctaacttagtttatagtctgtaagcagaagagtgagtctaaagtacatatcaccagacagtgtttctcctagcatttcgctgttgcattaatcaacaagttaaaatataaacaacggctaaccttgggtttcaaatttaacattccttatctcttagaccaggtttatccactgtgctggggactcccaagccagcactggctcatactgattcattttgatctctgctaataccagagtcctgcgtggcagagccattggcaccagaaattacaagtacgtaaagtaagtaaccagatataatctctgatttctttggatgaggaaagtggggtctggagttttcctgttttgttattgtgctccagggaagaaccaccttatcagaaagcagctttctctgtccaaccctggaggagctataaagctactccttggcccaaagtataggagtagtaaatgtttggatacttataatgggacaatatcattgattcaaccacttaataatctacccagcagtatacttacctgtcttccatgtacacaggtaagtatactgttgggtagattattaagtggttgaatcaaatgggaaaaacttggatttctaatgcaagaggaaaagtctctttttttttttagtgcttccatcagcagcttctaacattgtctgagatcatagtttttgaagggtgactaccaaatgttggcatttggcacaagtgggaagcaaaaggcaagcccctttagaatttgactaatctgttctgtcatgtcatctttttttctgttgttaaaagtgtttcgtgcttcattctatgtattatgtcaaaatttattgatttccatgtgattggcacatcttttttactaatcctgctccagttaaattcacaagatcataaacatcaagggtttgaaaatcatttttagatattcaggtctatgccatctgttctgcagatggagaaactgagtccttggttattagagtttcccctgcatcctagggaatctgctatggccttgtaactggcacagaggacctaaagcctgggagaatttttatttgcttgttgtggttaggaacatttgagtaaatgaggagctgctgctagaggacagaaatcccagagtatggccctccttggacccaagtttcttaccagctgtgctcctttgttcccaggggctaagtaggcacc

SEQ ID NO: 4214 - DNA, 6000 bp, Homo sapiens
aaaccttaaagcaggccctagcacaagctccagccttaagccttccacaggacaaaacttctctttatgcgtcagagaaagagctggaatagctcttggagtccttactcagactcatgggacaaccccacatcagtggcatatctaagtaaggaaactgatgtagtagcaaaaggctggcctcactgtttatgggtagttgtggcagtggccatcttagtattagaggctatcaaaataatacaaggaaaggatttcactgtctggacttctcatgatgtaaatggcatactaggtgccaaaggaaattcatggctatcagacaaacgcctgcttagataccaggcactactccttgagggaccagtgcttcaaatacacacgtgtgtggccctcaaccctgctatttttctcccagaggatggagagccaatcaagcatgactaccaacaaattgtagcccagacttatgtcacctgagaggatctcttagaagtccccttagctaatcctgaccttaacctatataccaatggaagttcatttgtggagaatgggatacgaagggcaggttatgccatagttaatgatgtaacagtacttgaaagtaagcatcttcctccagggaccagcactgttagcagaactagtggcacttacccaagccttagaactgggaaagggaaaaagaataaatgtgtatacaaatagcaaatatgcttatctaatcctacatgcccatgctgcaatgtgggaagaaagggagttcataacctctgggtgaacccccattaaataccacaaggaaatcattaagttattgcatgtggtgcaaaaacctaaggagatggcagtcttacactgccaaagccatcaaaaaggtgaaggagaaaaggcagaaggaaactgtcgggcagatgctgaggccaaaattgctgccaggtggaacctaccattagaaatacctgtagaagggccactggtatggaacaaccctctccaagagattaagccccagtatttcccaacttaaacagaatggggactttcacgggggcatagttttctcccctcagggtggttcactacggaagagggaaaggtactcatacctgaagccagacagtggaaaatacttaagaccctccaccaaacttttcatatgggtattgagaacactcatcaaatggctaaatctctatttacgggtccaaatctcctctggaccatccaacaagtagtcaaagcctgtgaggtgtgccaaaggaataatcccttggtccatcataaggcccctctgggggaacaaagaatagggcacaatcccagagaggactggcagttagacttcacccatatgcctaagtctaagggatttcaacacttgttggtctgtgttgaaacctttacaaattggatagaagccttcccctgcaagacagagaaggctcaggaagtggttaaagtcctaatgcatgaaataattcctagatttgggcttccccaaagcttacaaagtgacaatggtctggcttttaaagccacggtaacagggaatttccagggtgctagggatatcatattacctccactgcgcctggaggccacaatccttagggaaggttgagaaggcaaatccctataaccatgaataccatcttaactttccaagcccctctatgcatccaacacaacccgttatcaggcctgcccctgggggacctattatcccatcagtgtaattacatcctacaacttcaagcccgaactgattatagtaacttccgagtcacccaaacagctccactcagatggcttgtccacttctcagagcctccaaaaatcatcacctcctccctgcttaacaaacagtctgggttttttaatagcaaacatactccctgcatgaccattcacccctggaccccctgcagcagtgcccccaccactagtgaatgcctcctcatcccctctttcaattaatctattgaatggttcctagtagatacaaaacggctttttcccccaatgggaagatagagcacagggagccactcagtttgctcccaacacccctttccagccactcaccggagccaccttggcacgtactctaggagtatgggaaaatgaaaacaacaaactcacacacctttttaacgtacacaaccagttctgtctacccagccaagacgtattcttcttacatggaatgtcaacctatatctgcctccccaccaactggacaggcacctgcaccttagtcttcctaagtcccaatataaacattgcccagaccctatcagtgctcctcaaagcacaagtccatcagcacagggccatacaactaatacccctacttatagggttaggaatggccactgctacaggaaccggaatagcagatttatccacttcattatcctactaccacacactctcaaagcatttctcaggcagtttgcaagaaagaacaaaatctatccttactctacaatcccaaatagactctttggcagcagtgactctctaaaaccactgaggcctaacctcctcactgctgagaaaggaggactttgcaccttcttaggggacgagtgttgcttttacactaaccagtcagggttaatatgagacgccacccggcatttacaggaaaagtcttctgaaatcagacaatgcctttcaaattcttataccattctctggagttgggcaacatggcttctcccctttctaggtctcatgacaaccatcttgctattacttgccttcgggccctgtatttttaagctctttgtcaatttgtttcctccaggatcgaggccatcaagctacagatggttttgcaaattaaaccccaaatgagctcaactaacaacttctaccaaggaccccctggatcgacccactggccctttgatacctagagagtttccctctggaggatactacaattcagggtctcttcttcacccctatccagcaggaagtagctagagcagtcattgcgcaattctcaaaagcagttggggtgtcctgtttaaagggggtattgagaggtgaagccagctggacttcctgggtcgagtagagacttggagaacttttctgtcttacaagaggattgtaaaatgcaccaatcagtgctctgtagctagcaagaagtttgtaaaatgcaccaatcagttctctgtaaaatggaccaatcagtgctctgtaaaatggaccaatcagcgctctgtaaaatggatcaatcagcaggattctaaaagtaaccaatcgtggggagaattgagaaaagggcattctgataagacagaaacaggacatgggaggggacaaataagagaaagctggccaccccagccagcggcagcaactggctcgggtccccttccactctgtggaagctttgttctttcgctcttcacaataaatcttgctgctgctcactctttgggtctgtgccatcttttaagaactgtaacactcaccacaaaggtccgcagctccattcttgaagtcagggagaccaggaacccaccggaaggaactaactctggacacaatatttttttttctttttttaaatttttttctttatttcttctaaaaaaaagtgggatgcatgtgcagaacgtgcaggtttgttgcataggtacacgtgtgccatggtgatttgctgcacctattgacctgttctcctctaagttccctctcctcaccccctaccctacaacaggccctacaacattcccctctctgtgtccatgtgttctcattgttcaactcccacttatgagtgagaacatgcagtgtttggttttctgttcctgtgttagtttgctgaggatgatggcttccagcttcatccatgtccctgcaaaggacatgatcttatttctttttatggctgcataatattccatgatatttttcaaaagaaaatatttgctgccaacagaagattttatattaaaatctgtatttgcagcttttactgaaaagaacctaaggccttgccatattgggctcattttctcaaatagcaacatttagctgaactgaatagacagagaaagtactttccagtcagatcatatctggcccactttcctcgtgtatgttaccctcctcactcctgtaggcatttgcatgtgtagtcacaagcaaatgtggtttagaaattgttcagtgaaccatgttggaaaatgtccctaaacacaagtcctaaagatggtctgttatattatcttacaagcacacagtggaaggaaaaacagttaagttttctatttctgccacagcttctataattattacctttcttgtgccctaggttaatatctaaaaatagctttatgctttctcaaacacatttcaccagctccctctgctgatccaatctgaaggacaaaacagcttaaattccttgtaagtcctgaactttaaaatcacatttctggggttggagaactccaagcatgaaagaacttgatgaggtaatggtcatctaaataactttctcctttggacagctcctatggtaatccaagcaagagtcagggtgtagaagtttgtttccaaaagtagaactcctgtttcgctgagaaagctgtaatttggggtgatttggcgccctctacagactataatggcaaaagcgacgctatcatgtgcttcccatagctttagggctttgccagaactatgacgttgaggagggtggggtaaaggggcaggaagcgtttatgttctgccaatccaacagctgtattctaactcaccattccgccctcccttaagatcacggaagtatcacgcttgcctcttacacaactttttttccttagtctgtatactttctgctgtcactagcataacagaaaagacgaatggcttttgttttaaactgagggcacttttacaaaagtcatctttccatttatttttctttcagaaaaaagaatttgggttttgagcttttttaaaaaaaaaagacaaacactttccttgactttgagaaataatttaagtcaaagaatctgctctatgctaaccaaggtaagtgtcctggattttttttttaatggggaaatgatccagaaactgctttcacaaaagatgaatgtttttcttggagtgtgttccttaagaatgaatgtgattatcttcttttggggtctcttgactagggctaaagcaagagaattaaggagagagtcaggaagcaaagggaagttgtaaggaaacaaagttatgttgtggacagaaccatccaaaaggaaagtgtcagtgagataaacagaatcatgagactttcagtgactccagtgacctctgatttcatcttatgaatgagatggaaatgccagccattgggaaacaaataccccatagatggcgtgggaaaaaaatactgtaacaaagcaagagcatggtaggatgatgataagaaacataaaatgatcaaatttcaaattcaaagaaatcataattgattacatgatttgcaaatcacccaagtctctccatgtctcataaaggattcctacatttgctggtcagtcaggtatagggtggggttttcccgttgtacaaaggtctagttcaataggtcaggtctcctttctgccaagggactaaatataagcaacctatggctggcacggtggctcacgcctgtaatcccagcactttggaaagccgaggagggcagaccacttgagatcaggagtttgagaccagcctgaccaacatggtgaaaccccgtctctactaaaaatacaaaaattatccaggcgtggtgccgcctgcctgtagtctcagctactcaggaggctgaggcaggagaatcacttgaacccaggaggtggaggttgcagtgagccgaaattgtgccactgcattccagcctggaagacagagtgagactccaactcaaataaataaataaataaatataagcacctttgagcaaccaagtaccttatgaag

SEQ ID NO: 4215 - DNA, 6000 bp, Homo sapiens
catgatggcgggtgattgtggtcccagccacttcagaggctgaaatgggaggattgcttgagcctgggaggcagaggttgcagtgagtcaagatttgcaccctcgcctgggtgacagagtgaggccctgtctacaccccactcccatcaaaaacaaaaagagtatggctcagaatgtctcaacatggtctacaaactttttaagtcctgacactggctttacctctggcccctttaacaatactcacgacttccttcatgtctcctggatggttctggctccttattgccttgtggcctttgaccttgatttttttttcctttgtttggaatgttcctcctccctaccctgatgacaaaactcctcctactggttcagaaaactgggctcagttagccttcttccattctcccttccctctcctccaaccgccagctgtgatcatcattaacctgctcccactgtattcagaagataataacataaacaataataatagcagttagccaagcctggtggctcacacctttaatcacagctacacaggaggctgtggcaggagaacagtttgagtccagaagtttgaggctgcagtgagctacgatcatgccattgcactccagcctgtgtgacagagcaagaaacctgtctccaaaaataagaataaaaataaaataacaaaaaccattaatattggttgagcacttctatataccagtgtctatatgtgaagctttgaaggcattaaccaatttaatccacacaatgaccctgttgggtaaacacattttttttttttttgagacagagtctccctctgtcacccaggctggagtgcggtggcgcgatctctgctcactgcaacctccacgtcccgggttcaagcgattctcctgcatcagctgcctgagtagctgggattacaggtgtgcgcgtggcgcccggctaatttttttttttgtatttttagtagagatgggatttcagcaagttggtcaggctggtctcaaactcctgacctggtgatctgccccccctcagcctcccaaagtgctgggattacaggggtgagccactgcgcccagcctttttttcgagacagagtttcgctctgtcacccaggctggagtgcagtggcgcaatctcggctcactgcaacctctacttcccgggttcaagcgattctcctgcctcagcctcccaagtagctgggattataggtgcctgccaccacacccagctaattttttgtatttttagtagagatggggttttgccatgttggccaggctggtctcgaactcatggcctcaagtgatctgcccacctcggcctcccaaagtgctgggattacaggcatgagccactgtaaagaattttttttaacatctttttctttttttctttttgagagggagtcttgctctgttgcccaggatggagtgcagtggcgcgatctcggctcactgcaacctctgcctcccaggttcaagagattctcctgcctcagcctcccaagtagctaggattataggcgcctgccaccacacccggctaattttttgtatttttagtagagacaggttttcaccatgttggccaagctggtctcgaactcctgacctcaggtgatccgcccaccttggcctcccaaagtgctgagattacaggtgtgagcgaccacgcctggcctttaacatccttttattgtaacacttatctcattgttttgaaatggcttatacctattagtgtctccaatagacagtcttattcatattcttagcactagcaactatacaagttctgtacacctgtttttttttcaatatgatgaagtcaacacttgcatttaaccaaaccttgatttccaaggattgagtaatgtgagattttcagtgcagtggtgggagaggcttggagtctgagcacaggctttggagtccctccaatcatatatcatctttgcccttgcactaaatggtatccccatcctctcaattgcttaaggaaacaacctgggagtcatctcgtttactacctttcttcacacctgcacctcgggaaaatatcctgaaatctttcaatttctatttccacaccaaccagcctagtccaggtaccaccatctaccccctgaacttgcccaataactttgtattgttcttcggctcctttttgttccattgctgctcccttcaagtcattctctataaaataggttgatttaaaaaaaaaaataaaccaatggccgggcacgtggctcatgcctgtaatcccagcagtttgggaggctgaggcgggaggatcacttgagcccaggagttcaggaccagcctgggcaacacagcgaaaccctgtctctacaaaaaatacaaaaattagtctggtgtggtgacgcccacctgtagtcccaggtactagggaggctgaggtgggaagatgacttagcgagcctggggaggtagaggatgcagtgagccctgattgcaccactgcactccagcctgggcgacagagtgagaccccatctcaaaacaacaaaaacccaaacccttcattatcttgcctttgcacttaacagataaatccaaacaacgtgattaggttcctgcttaatgctccaaactcaacttcaaacccctatttgacatgctcaagcctcctggcctgttcctcaaacagccacgcttcagcatcagccacagttcagcatcggggccttgacacccattatcctctgtctagaatgttcttcctccccatggttggcttggctggctccttcttgtcatttaggtcttagctcctgaattatctcctcagaaaatccttccctgaccattctgttttgttttctgctcagtacttatcactgccagtgattatctcatctattcgttttattatttatattcttcattagaaacataagcttttgttgtttgagacagagtcccactgtgttgaccaggctgcagtgcagtggcatgattttttggctcactgcatcctccgtccctcaccccccatcccccaccacaagcaatcctcttatctcagcctcccgagtagctgggaccataggggcctgccacaattcccagcaaattttgttgtcattgttgttgttgttgttgttgtttttaaattctgtagagagggagtctcactatgttgctcaggctggtcttggactcctggcctcaaagtgatcctcctgcctcagcctcccaaagtgctgggattataggcttgagccacctgtttgtttcctttcatacctagtcctgcagaacataagcctctaagtgcaggggcttcttctgtttattcaccactgtatttctagcaccaagaatactatcaatattttttgaatgaatgaatcaaacagtgaaaaggccagtcatcttggtgtatatagaaggtagccaacagagacccaatagaaatgagtgcctatgttcctactgctctataactagtgggagtggggaggggaagcagctgggggtctaccagaccctgtcaccaactagtcagcacacgtggcaatcacagttgtagaagaggccaaacggagcagatctgccaatgacagccagtactaaactcgactggatgctgagggccatttctgctttgagtgaacagtgcagcctgctgggtggccaagggaacgtgtacaaatccactttgtttaaaggacccagagagtagtcagttctgctaaacctcatctgtttgttcagggatttttgtcctggggaggagtggggaagaagcgattagtcaggccaggctagctggtattagtttgcaggctgtgagtgcgactcttcagtctctgctcctctcatcattgccttttcacctacctttaccctaaatttacgtacacctctgccttcacaaattccaagcgattaactgttgtatttaatctctgtcccaaatctctctgcatcattcttcttttgattatgaagtcacgagggccctttgtttattttatttttaaaactttttttgagaaggagtttagctcttattgcccaggctggagtgcaatggcacaatctaggctcactgcaacctctggcttccgggttcaagcaatcctcctgcctcagcctcccgaatagctgggattacaggcgcgcgccaccaagcccggctaattttttgtatttagtagagacggggtttcaccatgttggtcaggctggtctcgatcctaacctcaggtgacccagccacctcggtctcccaaagtgttgggattacaggcgtgagccaccgcacctggcctcaagggcccttaaatattacttagttgttccattatttggtgtgttttattatttggtgcaggttttttccccttatctagtttgaatgttgctgaaggacgctggttttcaaacggtaaggaatctcctgataaaggcacgaatcttggtgtgcagataagccagcgattcttgcttctggctagttctacgttgttcctggatggtcagttcaaactgcaatgatccacagctccagaagcggcttcttccagtcggcctaggagccaaacgcccctgcagctccatgctaccacgcagggtgccgtttcgggcttgcagggagttgtcgcagtcccgttttggctgcacattctactgctggggtggaagtgtcaagcaagatgttgtcgccggtatcatgatgtccgggtgagaagcttccttggcaggttgccagggccagcctgcgagcactggcgccggggacccgcgcgcccgggaaggggcggggaggtgggcggagcctggcaacctggggaccaccaataggatgctcagccggaggtggccctgcgcgtgacgcagcggtgctcggaggcagggggcgtaggggccgggctgtccggcgctttagcttagcaggcgacgttgcgggccctgggcgccaggagagcttcccggagtcgaccttcctgctggctgctctgtgaccgcttcccggctctgccctcttggccgaagtgcccgctgccgggcgcgggcctcaggtaacggtggtgctcccgcgcctctcctcgcttcccgcttgggtccaccggcctcagcccgcggggaagggagaagcggtggcggcagcagctccggcccggccttgtcctgggctgtgctgcggagaaggcgaggctcggcgactgcaggggagttggggaggggagggcgggaaagttaccgtcaggcgcccgggtcacgggcagccttttaaaccctgcacgctggtttggtgttccgcaaatctcgtggcatctctcaagtcagtagtaaagaaagttaggaattagaagacgttttattctttaaaaagcgaaaccaaaaatgcactcaggaagtcagctttttaatgatttagagaaaatgtgtgaagggaaggatggtattagcaagacatgaaaatctgtaggggcaccagaacctttaatcaagctcatgttttattgtaaaatattaggatgtaggtaagtttctgttttccctaagtgttaatggtcatgtaatttaaataatatgtatattgaaaggttatttctaagtgagaaacaactatataaactttattctccgtatatatatttaggttaagttcgttggtcacttttgtttgtttgagacggagtctcgctgtgtcgcaaggctggagtgcagtggcgcaatctcggctcactgcaacctctgcctcccgggttcaagcgattcttgtgcctcagcctcctgagtagctgggattacaggcgtgcgccaccacgcccaggtaatttttgtagttttagtagagacggggtttcaccatgttggaccaggttggtctcaaactcctgacctcaagtgatccgcccgcttcggcctcccaaagtgctgggattacaggcgtgagccaccgcgcctggcctgttggtcactttttaatatttaagtggctgccacctgt

SEQ ID NO: 4216 - DNA, 6000 bp, Homo sapiens
tatagcactataggctgactgtagttaaaaataatttattatatatttttaaatagctagaggagaggctattgaatgttcttaacacaaagaaatgatgactgggcactatggctcacacccataatcccagccctttgggaggccaaggcaggaggatcgcttgagcccagaagttcaagaccagcctgggcaacaaggtaagaccacatctttactaaaattaaaaaaaaattggttgggcatggtggcccatgcctgcggtcccagctactcgggaggctgaggagggaggattgcttgagccctggagttggaggctgcagtgagccgtgtttgcgccactgcactccagggtgggtgacttaaaaaaaaagatagatgtttgaggtgacatacatgcaaatcaccctcatttgatgaatatacactgtacgtatcaaaacatcattatgtactccataaatatgtatgattattattagaaaagtaaatcttttttcaaaacaaaggagttttggcaattctgttaaaaaaaaaaagaattgggtgcatggggctgggtgggaaggaagggttttacctcatacaagaggaatcctgtctttacctgagctcgccacgaaagataccttatcttgttttgcttggatttgtaccaaggacctaggcaggatctataaacctaacacaaagcatcatgtgtagtcattgtaactttgaagagggatattgtcattctcttccagtatcacattaatttttacctaattttaaattcttatttgataacctaaaaaccctggaaatgtgagaatgctcttcccttatcctctttcctatcatgacgttgacataacagaaaaggaaacagcattggtcagggagccagaaagagcaggttcctggcctgactttcctcctacttgtctacagaggttacttaatctctttgagccttaatttcttcagctctgcataggtgataacattctttgcttcagtgtaattttgaaaagtgtaacatagaatgtaaatataggctaacattgtcaatcattattaataattattatgtttaggttgcatttctaaatataaaaagataaagcatatagtatagtgatgcttaggcttgggaagaatacaaggaaatgaggtcagaaagaataaggactggaaaaataaacgcattggtaattataaaaatataaaaaatgacaaagttgcaatggaaaggtcaatgcaaacttttaaattatttttctaattatatcacacattctaaatcctgctgtagtagacatccgttgttttttctgccttataacctgccctcttctggtaacagcaagctttcctttcaattgcttttcccacattccatggttttctgttgggctgccaaacaccacacacatggtattctatttacctagctttgggggtatgccaggtgaccaaagccaagccaatcaacatccttccttgaaattatttatatagattatgaagggagaaatctcttttctctggagtttcacattttttttctttaattggagctctcttgcccatacaataaacaataaacaattacatttcctcatcctgcctttgttgctgcatagagacactgatgattgggcactaagatcatcttttgagggacctgaataaagttttccccatccgttcacatttttcttctaagtaccatgtctggtagataatgaaactcccctccccctccccctcccccctccatccctcctttttctctctgtctttcagataatagaattcctctctctttctttctttcttttctttttttttttgagacaggttctcactctgtcgcccaggctggatggagtacagtggcgcaatctcgctcattgcaacctctgcctcctgggttcaggcaattctcctgcctcagcctcccgagtagctgggattacaggcatggacacaacgccgggatgatttttttcctttgagacagagtcttgctctgtcgcccaggctagagtgcagtggcgcgatcttggctcactgcaacctccgcctccctggttcaaggattctcctgcctcagctgcccaagtagctgggattacaggcacgcgccaccacgcctagctaatttttttatttttttagtagagttggggtttcaccatgttggctaggctggtctagaactctttacttcaagtaatccacccgcctcggccttccaaagtgctgggattacaggcgtgagccaacgaccccagccggcccggctaatttttgtaattttagtagtgtcagggtttcaccatattggttaggctggtctcgaactcctggcctcaagtaatcccctgcctcggcttcccaaagtgctggaattacaggcgtgagccaccgcgcccggctgataatgaaatgtctaagcacttaagaacgtgcattcaaaagactggagttttttgaaaaacagggtaacctgcagtaaaagaaattcttacacactttcactttttttctttaaatactgtctagtagactgtggcatctctaggtggctaaaataatttgtcgataacatcaaacatctggttagtgttcaaatttctcaaattgtcttaaaaattttgttttaaccgttgatttgtttgaatcaagatccaaataacggagcaaaatttttatcatcaagcccactggctggttacactttacctcttttcaaaatagatgtttgtcactgtgacacatttccataagcaagagaattgagagattaattcaaggtctctttatgtgctttacaaatatcagataagctctggtaattaagttacggaaaattcgcataagtaatatcttgatgttagtcttggacattaggactcaaaaggcagcaatgacaaacccatttatgttgatttcacagcctttgggggtctccttgtctttattttgattgttggaaatagagacccacgctttggccactatataacaaagtactaaaaatgtataataatgcaaattcactaatatgtttattaaaatataaacaagtttattacaaatctgtagctttattcacaactaacatccttatttttgtcctatatgcccacgtttgtcctcaagtacaacgaaggactgagagagcatataatcccctctaggtgtaaatgaacgtatttatttcgcttcaactcatgtatgaaaggattaaaaaattattagtccccacaacttaattctcccaaagagaaggtgccaagaatgaggcacctttagccatgcataatctccacccatctcatcaaataaacggaacagtgatgaacataacttgctaagtaagctcagccgtgtaacaagaccctagattcccctcccttcttcatcctaccagaacattatccttaaggttttcctaatcagcagtctgcgtctaactaaccctaactatccagagtcacctaacatatacttatttccttgtttcagattcccattacgcctatcttaatgggacaactgggtccgaaattatgcatgtgtttttttgttttgtttttgcggtgtacttattatccgcactttatcattaaattcctgaaaagctagaacaaaacaaatccgtgtcattcactatgtgcatcctctctgcttggggacgccaagggtttcaagctgctgcctccctgccctggtctctgcttgccgtatccagcactgggtaagcgcccaggttctgctccgggactaaaactcatgatcttctggctcaggttctgtgaactgagtcattctggcactgagaatattccgtgactcagcaggcccgaaaaggaggatgtcagaatccacataatttcgagtcttttaaaggcaagccgaggaacacaaacaacacagtggaagaatttcgcagtgggtcgtgcgtacccaagggaaaaattcattccattcccagccttttcacttccttccttgccccggtaaaacgactggttacactttaaatcagcggcaggaaatcgcttcacgaaactcatctggctgctgcgaccaggcccttctgattctccagggaccgtgtcggccccatgaacgccccgggacctctgttcgggaggggctggagcggggccccgggcagcagcgggcgctcccggttcggacccacacctggccgggcggggaccctcttgccgcagcccaaattggcgcgaggccccagggacgaccccgagcgacctcctgacccggcatcgcccctctaaggcgccctcccccgactcctcccgcaatccggagtctcccaggccgcggagcccaaggaccccagcgactcccgcgcggggagcgggtctgcgaggccgcccttccctcccggcatgcaccacccagccgccctcccctcccctcctctcctctcccctcccctcctctcccctcctctcccctcccctcccccaaccccctcccccggctccccgcccacctcgcgcgcccctccccccgggtcgcgcgccgcgggcccgagcgcgagacgccgctgctcccgcccccgccgcctcctggagtcgccggggcggacgcgcagtccatggggcgcggtgggccggggagttgccccaggggccgcgggagttgctgagaggagacagggttgggctttctcctcgcccagaccccaccccaccctgccgaccccaccccctgctccttcctccccgggggcgcgcactcgggcacgcgctcggaagtcgggggtcggcgcggagtgcaggctgctcccggggtaggtgagggaagcgcggaggcggcgcgcgggggcagtggtcggcgagcagcgcggtcctcgctaggggcgcccacccgtcagtctctccggcgcgagccgccgccaccgcccgcgccggagtcaggcccctgggcccccaggctcaagcagcgaagcggcctccgggggacgccgctaggcgagaggaacgcgccggtgcccttgccttcgccgtgacccagcgtgcgggcggcgggatgagagggagccatcgggccgcgccggccctgcggccccgggggcggctctggcccgtgctggccgtgctggcggcggccgccgcggcgggctgtgcccaggcagccatggacgagtgcacggacgagggcgggcggccgcagcgctgcatgcccgagttcgtcaacgccgccttcaacgtgactgtggtggccaccaacacgtgtgggactccgcccgaggaatactgtgtgcagaccggggtgaccggggtcaccaagtcctgtcacctgtgcgacgccgggcagccccacctgcagcacggggcagccttcctgaccgactacaacaaccaggccgacaccacctggtggcaaagccagaccatgctggccggggtgcagtaccccagctccatcaacctcacgctgcacctgggtaagcggtgacagccccgtcccctgctactgctcgccagcagcccagctcccggaccggctccgtcccagtggccggcctcacgggcgcagacggccgcgtgtttgctctctgttccccggcatgggccacacagaaactcctttctccaacttcttaaatagatactgcttttaacatcccgtgagggccaggatgttccgcacgagtctctctgctttcctgttctttctgacttaacgggattctggctctctgattattctgcatttcggctgttaggattgtgatttcccccttttttttctgaagcgttaatcagaaactcccatccccacttttctctttgctagcaaggtcatcacagcgcattcttggatcggaaacaagaaggtccgccttaaacactttcgcctttaaaatgtttagatgtccttccagggctgagggtgattgctctgttgagttaagggggaatttgaggggagcaaatgccttcgctgcctatattgcctatgtgt

SEQ ID NO: 4217 - DNA, 6000 bp, Homo sapiens
ccaaaccagcagagatggttttgtcaggcctggttttatcacacaacttatgcaaacactggtatgtttccagtggttgctttgaggttgcacatttgaattaaagtatctgaattatgaaatatattcttttgagattttctcttttttatatcagtttattgagacattttgtatacaatccaattttaagtgtacaatagagtttttttttgtgtttttttttcttttggagacagagtctcgctctgtcggccaggctggagtgcagtggcacgatcgatctcggctcactgcaagttccgcctcctgggttcatggcattctcctgcctcagcctcccaagtagctgggactacaggcgcctgccaccatggctggctaatttttttgtattttttttttagtagagacggggtttcaccgtgttagccaggttggtctcgatctcctgacctcgtgatccatgcgcctcagcctcccaaagtgctgggattacaggtgtgagccaccacacctggccttttttctttctttttttttttttgatacagagtctctttctgtcgctcaggctagaatgcagtggcatgatctcggctcactgcaacctccgcctcccggattcaaacgattctcctgcctcagcctcccaagtagcagggattacaggtgtgcaccaccagtcccggctaatttttgtatttttagtagagatgggattttaccatgttggccaggctggtctcaaactcctaacctcaggtgatctgctcacctcagcctccaaagtgctggattacaggtgtgagccactgagcctcaccagcaattgattacttttgaccacagtaatatttctttcatcctccagaagtatcctcatggcccattgcagtcagtccctgtccctggcaaccactgatctgctttcttgctttgtagttttaccttttctagaattcatttaaatggaatcacgtagtatctgggctcttgtgcctggcttgttttagcacaatgctttgagattcacccatgctgtgtatgtatcagtagtttattcctttttgttactgagtagtattaagttgacttttgtctggatttgaaaaaatatatatttatttgggccatatggaaaagcaaatagatttttgtttttgcttttttgaaaagccatgtgttaattaaaggtaatcctaagaatacatttaaatctttacctttaccttttccttgaaatgtaagatccctacctgtctgaaagtgaagttttaaattcacaatttttttttttttgagacagagtcttgctctgtttcacaaattttgaaacaggctgggcacagtggttcaggcctgtaatcccagcactttgggaggctgaggcgggaggatcacttgaggtcaggagtccaagaccagcctggctaacatggtgaaatcccatctctattaaaaaacacaaaaattagccacgtatggtggcacctgccaccaatcccagctactcagaaggcttaggcaggagaatcggttgaacccaggaggtggaggttgcagtgagctgagactgtgccactgcacttcggcctaggtgacagagtgagactccatctcaaaaaaaaaaaaaaaaaattgaaacatttggtaagaaaatctgtatgtgaaggaaatttccagatatgcagcaaaaatatgaaataattaatagcatccaagtaattattggtaatacgggcatgaacctggattaggccaagagttccacaaaattgtaaaataatgattcaataattaattagatggattgaagcaaaaatttcatctttctcatatggtgtttgttagtaattttaacaacagaaaaatgattagtgctcactcagagataataataatttttaaaacaataattattgttcttattatggctatatctgtatagtacatattatgtgcctggtgctgttctgagccctagataattcattaactctaataaccctactaggtaagtgttttaatattatctccattttatagattaagaaactaaggatcacagaaagcaaagtaactgctttgatgaatagaagccaggatttggccctgggaacctgcctaagcctcaacttttggccactagaactctcttaacctcaggaatgcactagagaagaattctcagattggtaaaaggggtcgatattgtccctgagcaaggtaagggatgaggccagagcaggggcgtcaagcctgagccagacagttgtttggatgtgtggagaagcccagaataaggcaatgtgaagaggtgggaactgagaaaagttggggagtgcctgccttaaggcgtttacattttaaaaatatgttttaaatcctgcactgttcacataaaagaggctgctggtgggtctggtgcccaggggcctgtgcccatttgctgcccctggtccagatgacctctggcagtccttccagaactaacatcttgggaaaaattagaaatatttgttcagagtcttttgtgacttgaatttatcgatgtaggccaatagtctacaatctggctaggttataatggtcattgataaataacttttgattgcatgttgaattcattcagtgttgtgaatttgtctttgttttttatggtactttttaatctgacgtaacaaagagctaatggattgtggagtcatatggcctggttttgaaccttggctttgcaacttactagcagtgtgactttgagcatgttacctgactttcgcatgcctgtgttttcttgtctgtaaaatggggaaattaacagtacacctaattcataaagttgttttaaagattaaaagtttaatgagataatggatttacaacagcgactggcaaatagtaagcattacttatgtgtttgtattgctattatcactgtcccaaaatgatgctagatgaaaacatctgttccaacttttaacatataataaactatagcaatctgcactaaaatgaaatcttccttcaagactttattttgtagggccctgttccttgttcctgcaggaccgtggtgaattgcacaacaaagatgggactcagggacaggacctcagcctccacaaggcaccagcgactagaagggaaaattctaaataccgtctctgtgaactgaaaccttagctgtagctggagactctgagttttgagagagaagaatatttgtgtaatttgtttgaatcctgggcagagtagaagagaatcaagccttggatgagaaagttggagtttcttttctattcctcaggttttattgctggagattttagaataggtgtcagccagtttgcagcaacctgtcttgcccctaccattcttgggttctgtattcagaccccagctattcctaacacccagttcatactccacgttctgtacaaagccatccctagctatcccagtcagcccacactggtctccatgacatgcatgaaccgaagtttttagaacctttgacacttatgtctgccctggatgatttgttcattatcttatgttgttgtcatccacagaacaatctggagaatattcatatatttagtcagcaaatagctatttattgggggcctttgtaggcctcaatgttgagaagaagggttggttgttttggacagattgtgtatttataaagctctagcaatttttaaatctctagcaggaaccaaagccttcttgacagccacctctctgaattattgtcactagcctccttaggagaagagacaatatagtttataccaagatttgcagttgtctagatattactcacttcagctagcactgtgctagtagataacattcaaagttggtctcaacaaatattttctctagtgcccatggagagtggctgagaaatacactctaagatgtaaaagagtttggtatctagatcctctttcttattcatttcaagccaatatttattaagcaccaactgcaagctagatactattatagttaggaatataaagtgggccagggatggtgtttatgcctataatcccagcactttgggaggccaaggcaggaggattacttgaggccaggaattcaaggtcagcctgcccaacacagcaagacctcgtctctacaaaaaattaaaaaattagctgggtgtggtggcatttgcctgtagccctagctactcaagaggctgaggtgggaggattgcttgagcccaggggttggaggctgcagtgcgctatgatggtgccattgaaaacaaaaacaaaaaccaaccaacaaacaaaaaaacaaacaaaaagaaaacgatactcagtctttatagggaggttggccagtcaataggttactttatgagttgctaaccctggtgagcaggaagttatgtggaccaggagagaaacccttggttcagcctggagaaaggagaggttgaccctaaactggagggtggagaggaccctgttgtgactctccgactgacttgtcttccttgatgtcctttaagccggagctgattcgggctgctgccttatttctgagttagcgctcttaagattgggcctcccagtttgaggaaggggcgggctgctgtctacctctgtgaatctgccctggaccaccccgggagagaaggagggctccggggaatctcgcacattccaggcaaaggctcccgggccgcagcctctgtgccacacccttggcccgggccaggtgtgcgccctcctcgctgcgagggggagcgggcggctgcggggagcgattttccagcccggtttgtgctctgtgtgtttgtctgcctctggagggctgggtcctccttattcacaggtgagtcacaccctgaaacacaggctctcttcctgtcaggactgagtcaggtagaagagtcgataaaaccacctgatcaaggaaaaggaaggcacagcggagcgcagagtgagaaccaccaaccgaggcgccgggcagcgacccctgcagcggagacagagactgagcggcccggccccgccatgcctgcgctctggctgggctgctgcctctgcttctcgctcctcctgcccgcagcccgggccacctccaggagggaaggtgagtcggcttccacaaggaaacatctcagccctgggctgagaatctgcctttctctgcagaccgtgatggctgaacgtacctccgaggattcccactttgtccagaaacttgttagagctcccttctcctcccctatctggggctcctccagagacggattttaaatgagactaatatataaagctatctgctttttaaaaatagtaagacaataagctgtgacaaaagagggtcttccttaccttaaaaatgttccttcttgatgtcttttttcgaccaaggggccgctatttaatcaataatgtgttgttatatacgttctttccccagcgtgtgcttttattaaaaggttttggtggcaatgtttcccatgactgtgaacaccacaaagattgcaaaggaacctcttcaataatcctgtaattgatgtttcaaatttcggatggaaaaatgagccttaatagtattagcaatacccttaacttttgcatcacgttacttttcatagtattttcatgtaatattcattcaacaggcacttactgggcacctgtgtcatatatcatttgatcttatctagggcacctagttggctgtcatgtgttagacgttaagttcatgtaaacaaaactttgtgagaacctagcaactcttaactgtaagcatgtgtcagctatggcaacattttatgggtgttttccttgtcacttagttctatggatatatgcctgtataattgccctgatgttttatgtttatattgcatcctgcatctgatggcgtttcaatcattctttcaataggtccaagaccaagagccatttccacacaagtgcatgcatgaatatgagataatgctcacatgcacatgcaatt

SEQ ID NO: 4218 - DNA, 6000 bp, Homo sapiens
aaccccaactgaggcctggtaagtttctacatattctacacttacttgagatgccatactttctggaacaccttacctgatttgcctttcctgagagtggtgcctgtcctatttgcttccttagaatgctaggtttagtctttcagaacattcttaatctgtttgctcagccctacaaaactgtaagtgccttgagggcagggactgagttttctctctctagtacatagtataatacctggctaaataacagttattccagaaatttcttgaggaataaacaagtaaataactgagtacagtttggggttaagagacaatagagggttcaggttattaactatgccatttttatggattttaattgctctgtcaaataagtggtaatattggataatacccaagaattacttggattaggtcagtttattggatacttgtcattcaccacttcatatattgttattcctgggcaatactttcacttaagcttcactgttgttgttttttatcccaacccctcctactctcatcctggtctgggcccttttcctaactcaatcatgttctcttgatttatattcttggtattctcagctgactgcttgtcaaagtctactttcaggggttcatttattctaaagtgtaagtaagatttccgtccagggactattttgtcccagagagctacattttaatataagaccaaattttattgaaaaggaatgagagacccctcctgtgtcccaagtcatacattcatcaatatataagacttaagacaagagatggatttgagattatggaagatatatgtctatttctacatatatacatatctacttaaaaatgccttttaggtattaaatgttccttttctctttcccaactacggcaccctgtggattttaaatacattcttaagtgctatcacccacttgatggtagtgaagctataaaagacctaaaagcaatcaacttgataatgtactcttatattggctatcctttcttccttacttcattacctctacccctcatacctgtaccctggggtcacattccagaccatctctagtcagactagaaaaccccatgattcatagagtactgggcagagtatacagaagggccttttctcagtagtggaaatacttagccatagactgaatactgctttggtttcacctaacaatttttaaaagaaagccctaagaggatcaaactgtttctaagcaacttaattctgtcccagaataaagtcctagcgtattgataggaatacagagatatccttgttatcctaacaaggttaaaattcacagtgtctgataggtagtcaaggattatgaggcttgaaaagacgcaagaaaatacaatccataacaagtaggagtactgaccaattgaaactgatccagaactgacacagatattaaaatgaccaaatgcacacattgaagttattataactgtgttctatttatacacttaaaaggagaaaaggaagacataaaaaagatccaaattaaacgtcaagagttgaaaactacaatgcctgagatgaaaaatatattggatgaggcaattggcagattgaatagggagaagtcaaggttaacgaacttgaagaaatagttatggaaactataaaaaatgaagcatagtgacaaaagaaaaaaataatttttttaaaattaagagagcatcagtgaactgtggaagaactttaagtagcttcatatatgtgttaattggggcccctaaaggaaaggaggttgaagacagaaaaaataatggccccaaatgtccaaatttgatgaaaacagatggaagaagtacaagaaatatgagggcagccacatcaatgcacatcataatcaaactgctcaaaaacagtaacaataaaaaaactcttaaaaacatacatggtttatatagaacaagtaagtacaaagatgatagagattatctttttattggaaacaatacaagcaagaagacaaatgaaagtactgaaagaaaaacaaaaaacctgtctacctagaattctttactcagcaaaaaaaaaaagaaaaaactctttgaaaaacaaaagtgaaataaaaacttttccagacatacaaaagtgaaagaatttgtctctagtcgaactgcattactgaaattattaaagaaagtctcttagtgagaaggaaagtgatatcagatgggaatctggatctacacaaagaaatgaacagcacaaaaaatggtaactacctgggtaaatatgctacatttttcttatttagattcattaaaagataactgactccttatgcaaaaaaatcaatataatgtgggatttaaaatatagtaatatgcaataaaaatggatgacaaaaatagtaaaaaagtcaggaggggagaaatggaagtatactaatctaaggttcttatacatgaagtggtataacactacatgaagaaaggctggtaaattaaagatgtatactataaactgtaaagcaaccactaaaagagttttagctaataagctagcaatggaaataaaatggaatcataaaatattcaaaaagaaggcaaaaaaaaaaaaaaggaacaaagaatagatggaagaaatagaaaacacatagcatggtggcagatttaaactcaaccatatccataatcacattgagtgtaaaacatctaagagcacaaatgaaaaggcagagattattagcctggatgaaaaagcaagacccaattttagggtgactacctaaaatatactttaaatataaagaaaaaaataagttaaaggtgaaaggatagaaaatgatacaccatgcaacactaatcaaaagaaagttgcagtgttaatatcagacaaagtatattttggaacaaataatactaccagggacaatgaaggcaacttcataatgataaaggcgtcaattcatgtccattatgtcaaaaggacataataatcctatgtgcttatgtaactaaccacagagcttcaaatacatgaagctaaaactcatagaactgcaagaagaaatacacaaatccacaattgtcgtcagatatttcaataccactctcaaaaactgatagaacaaataggcagaaatcagtaaggatatagaagattggaacattattaaacaacttgacctaattaacatttatagaacattccacccaacagcattcttttcaagtgcacatggaacatttatagatcatttaatccttattaggtgggtgctatcattattcccatttacagctgagtaaacacaggtctgaaaaagtttggtaaccttcttgaaggtcacacagttaaatgtcacagctgggctttcaacccagggtatctgacccagaactcttaatcactaggctctgtggcctcccttgagcacctggaatagctcaggtctctaagacttagaatgaaatcctttttaaataaacaacggaatgggagactcaaatagcattctctaaatactgcttgagaaggaagtaccttccccctttcctctcatattcccactcagcccaaatggcctgtctgcttcctttaagtgacatgacttataggtatcataaactcgggttccacagccgctgggactgaaagagaagacagttgtagattacaaaaggttggtgggagctaactcttcctcaggctgcatctccgttgggtgggcggtctaatatacatccaaacagagatcaagatgcctgtttgcccctctttaaatgctgggatctggacaacaactccttttccaggaaggaaatgcgtttttattaaaatgacataaagaatccttagttcatggtagactttctttgcttatcctcttatctctgttattagtactataacgtatatagcaatcacaacacggaaaaacgttggcatgtcttccagggtgaggtttccttcttgactggcaagaaaatgccatagaggggagcacctttccaatagatctttggctgagacctgaggcatgactgttccaggggaggaaatctgaaacggggatattattctgccttactatgctgagcgtaggattcaaactgctcagcaaatgtgaatcttgataatacaattaaaaaatcaattttctctttaatatgaattttatgtctcatctttccccacacctctctcgcccctcctccttgtcctttctacggggcttccatcctgtattcacattcccctctacagttagtgactacctagttcttgtctctcatttccctcagcagcccctttcctcttcctgggcttcttgccccttcagcgttgtcctcccttccttccctgcagtccagagtctcagaggagatcaaagagcgatagtgtggctgcctcgcagctgagagaattttccagctccccctcctggctgggccgagttgtgggctgagaggcaggaggctgggctggggcgtcttgacttttggggggaattaggaaagaggtgtctaaagccgcgttgtacacaatagaaaaacaaaattccctttgtgctagtgtggtgtccctcggtttgggtctttgccacacattcttgaaagccattgtttacactagcgttttgcaggttaggaacggtgccggtgggaaccgagctgacaccgtaagcgcttccctgggactgaattgaccctacaatcagtggagggaaaagtcaccctccgggggggcctccagagcaaaggagggaggacggcaactggccaatcaggaggcgaggccgagccaggcttcccctcgtcgctcgtgagctgcaaacagtggaaagttgggaacctcagtcgctggcccaggcggagagcagcggcggcggcgagggcagcgggattcgggccgcggcgccgcaggctcagagctgcccccggggcatggacccgacgcgccgcccgcactccgccacaggctgtccagggcccgcgggcagatagcagtccaggaggaagccgcatccagacaaaagctgccgcatccctgccctgcccaacccctggagggattcgagtttggtgcttgtccccgtctgattctcagcgccaaactttttgctagttcagagattccaagagtctgatgagttactctgagaggaaaccctctgcctgttgttgaggaggactgagcacagtgcttaggcgctgagggggaaaaagagggggaaaaaaaagaaaatgatttcctgggaagttgtccatacagtattcctgtttgctcttctttattcttccctagctcaagatgcgagcccccagtcagagatcagagctgaggaaattcccgagggggcctccacgttggcttttgtgtttgatgtgactggttctatgtatgatgatttagttcaggtgattgaaggggcttccaaaattttggagacgtctttgaaaagacctaaaagacctcttttcaactttgcgttggtgcctttccatgatccaggtaagggaaatatttatactttgtctttgctatgtctcatgattacattatttctcatgctgtgaatgaaattgtttgtcaggaagtttcaaaaccattttaaaaaaatgtgcagctgaaaatagttgtaacaaagaattacttgctggcgtctgggtttgctcattgatacctacttaagtctcagccctggtggagatggcttgtttagggaacttgtactgtggtcctcaaacctggaaatgtggagttacgaaaaacaaaaccaaaaatcttgggcaacgacatcaaaatcacttaactcacttagattttagaactaaagcatgtttaattacgaaggcagacttggacacgaatttatagcagcgaagctctaggggctaacatccagattgaaagcacactctgagggtaactctcatttaagaggggaaaaaacctgttgtgtgagacacaaggaagcctgtaagtagtaactactagtggaactgaagacatga

SEQ ID NO: 4219 - DNA, 6000 bp, Homo sapiens
cagcattttgatcatgaccatttaaccagtctctaataaattctaaattttccatcatcttctcgtcttcttctgagccctccaaactcttccaacctctgcttgttacccagttccaaagctgcttccacatttcaagtaactttataacagttcccccctcctcagtaccaattttctgtactaggccattcttgtattgctataaagaagtacctaagactaagtaatttatttaaagaaaagtggtttcattggctcacggttctgtagcttgcacaagaagcatagagctggcatctgcttctggggaggtctcaggaagcttccaatcatggcagaagatgaagggggaacaggtgtctcacatggcaggagcaagagaaatagttgtaggggacaggggccacactctcttaaacaatcaggtcttgagagaacttactcaccattgtgaagacagcaccaagctatgagggattctcccccatgatccaatcacctcccaccaggccccatctcaaacattgggaattacaattcaacatgaaatttagagagaacacaaatccaaactatatcaccttcctttccaaatcctctacatgcagatatttgagcacctccatcatttttgcatttatgtcattgttatgtaacagaacattctatcccaactccaaataatgtgtcagtgttcatttagcatagctctccatttatttgggtttgggaataaggcacctccttccatacttacgaaattttatttgcaaagcacagtctagagtcagacataactactctctcttgttgaaaggattataagtgatagtgtgacattaaatgaaaataaatccaatatggaataagtataccagagataatattatcaaaagatttcctcagtgctttcaagaatgtcttggaacacgggcctattatcaagaacttaactggtaaaattagatttagggtgaatgaggcttattgaatcacataagctcagttcactgaaggtcccacatactattttcttgtaaattctcaaattatagaaaggaggcagtcagtgttgactgaaagattggagcagagtgagaaaaagaaactagattcttatcttgctcagttgcacttactgagatcattgaagtttagtgtgttgcatatatttgctcttattaaaacccatcatatttcttcacaacaaaatcataagcaagtctaaaatgtttaaacttttcattcacacgatataaagttttcaccaaccctctatacacatacagagaaaaatccttctaaactcacttttgttgcagctttttcaaattttcaaataaactctatgaaatttagctgaaacacttttagtagccttatctataaaccttgaagaccaaggaagctctgagtggttatgctaattcaactaagtcattcagagtacttttgaaagtttgcaaagctttgtgagtacatatgggatccatttttccatgatccttcaacataaaactggtctcttactagagaccagtttctccattgcagccatttgaactttccaagggatgctaaacacaaatgcagaaacaagcaaagaatagatacatgttgattttacagtaaagacagcagtactttgcttcctttctcatacttccagaggtaattactcctctgtgttcttttctctgtacattcctctctgatggcacctctcacaaacatctgtcagccccactacacagtgaaccccttaagacagagattcattcatctttgtatctgcagtgctttatgtgtgatacactgtagggatgcaattaaactttgttgaatcgaaacattttgtttcaatggatcaagctatctttccacgtcactgacttttccagtatggatacatttttattttaaaatagaatattatactcatcattaccccttgtctcacaattctaatatccacaataagattttagcaacattttaaaagttcaaacaacatcaggtttaaggaaagcactccctattagtattccagtaattggagtaattgaaaccaaatgtttccattcaaatcagttcagcaaagattaaaattttccttatttttcctatcaatatcaacagccataatctgaaatgtcttactgaaccaatctcctaggtattttaaaatataacactgggatttttagggaaggaaaagtattctgtatggtactataatgatggatacatatcatgatacatttgtcaaactcatggaatgtacagcaccaagagtgaactctaatgtaaactatagattttagatgataatgctgtgtcactgtaggttcatcaattataacaaatatttcacactaacgaggtatggtgctggaggtggagctggaggcaaggtgaaaggtggggagttgtgggaactctgtactttccactcaattttactgtaaacctaaaacttccctaaaaatgaagtccattaatttttctttaaaaaaaaagataacactaagactacatgaagtattccttttcctagaaactcaaacctagatgttttagcacagtttcaaagagggaaaactgaaacccagatcgtgagacccactgtttcttctactgacgtttttgaaatcctctactatttcaaccaaagtcattgattcaataaagttacaatttgacagtttatcttttcttagtgaagtttacaaagaggggccagatagtggcactctctttaaaattaatagggaactttcaatgccctgccatgcacttgtcacacttgctgatacaacttgaccaaatttgccttgttctggaacacacagactttgggtggatgagcaaacagcctctgagagagcagctgctttattgcatgactaaggtgacctcatcagccaattgtgatacaggaattttgaaaggactccctctttcaagagtttatatttctattcaagtgtggaagcatgcagttgtaaatgcttgcgcttcaaaatgtatattgggataggggtagcaaaatgttgggagcatcagagcagttcctaaatacactacaggcaaaaacttattttgatctcagaccagagtttcttaacatagtgtcaaaaaaacacattatttcaaaaaactattttccctatctaaagagggtttagttctttaacaagttaggagtccaacatttcccaaacttacttggccccataatttttgctgctgctcttgttctttggaaactgtcagtatatttggatgataatactagtgggctgttaaaaataatttttaaatcattttactctaacataacttactcacaattatttagaggagtgagaggatactagatcaacaaacatgagcaatgttgaagattttaacaggaaattaagtatggactgaaccacaggaagtatacaaccaaatgcctttatgtcatctgtctttgagtttcatcggtctcattagggtcacttccaaagtggccagctcatctcaccagttatctttcttaatgccttatgttatcttcccaacataaaatgatgcttgttacatacaatataatgagctcattataatgaaattaatgactgtgtataagtgaattttataatattgtaaatgtgttttcttcaaatattctttatcctgacgatagaaccagaacagaaaaattaatactcccctcccttttatcagctttacctaataccatcagaagcttcactaagtaaatgcttttttgtccttttaaaggaaagtattgtccttccaggggtaaaatccaaggaggcttaagttaaactgggtactctataaataagccacacttgttatataaacttttgaaagcttatattttactaacttctctatccttataaatgattagtcatctagttccttgagttttgtttgtgttttaaactttaatctcaattaaagctaaaactgttatctctccagagatactgccaaaatgtgaaagatcattacctaagaagtacacattattggtctatccaaatagacttttattttaccttgagcagtttttcctctgatactgtgaccttggtatcagtatgtttacaaattatgtcatatttgtatacaattaaacatttatttatttatgattggttttaattaaactttattttttcctaatatgcaaaatatgcaaaaatcaaagtttgatatactagttatattcttaataaatatgaaaataatattaaaaaccatgcaccccttaaaatcatcctatgtattgccagtcgatgtctagcacacaccttggaaaatattaacatggaaatttcctgccatggaaataagggatgagaattggagtgggaaaatgtgaagatagcctcttataactttccctcctatcagatatgtgcaaaataattaaacaaaaattatttgtttactttgccctgcttcctgcagaaaagaagagaactcttaaaatattttgatcagatgaattttatagtcaaggactatccaaagcatggagtaagatacaactctatgtgatgaatttctatgtgagtttctatatgataaattaatacgccaaatgaaacagtttattgaaacatgcaacttttttaaaataaacaaacatcctccagaaccaaagactgatgctgttaatgctttagacatgtgacatatgtgtgtgtacctctgtatgtttaattttctttctttctaatcaagtgacctgttctcgtttggttaagtttcaaccacaagacaccactgtatgctttttttttttcaagatacacgtcacagcacaccaagaaaaggggaacttccagtgtctgtggtaacatcacttgataaacagactcctttaaacagcaagtgcctgtctgcattctactatataaagcagcagagacgttgactagcgcatatttgctaagagcaccatgcgcgcagcagccatctccactccaaagttagacaaaatgccaggaatgttcttctctgctaacccaaaggaattgaaaggaaccactcattcacttctagacgacaaaatgcaaaaaaggaggccaaagactttgtaagtttgttcagagtctcactttgtgaattttaacaagttatctttaatggcagaaggattgagaatgaatggaagagagtgtgagcatttagtttagccagatcagaggagttaattgcctgttgtgagtaataagtaatattcagctgcattaaaaaataaatcttgatatggcattaaattgggtaggagtttttctctacacaggctcataaaaatgggttctatagcaaaatgttgtatcaaccatttttagtattgccttattccttagagaaatttattctatgtctttttacaaataaaatgaattctgaagaaatatgaatattcacttttatgtcttttgtagtggaatggatatgaaagcatacctgagatctatgatcccacatctggaatctggaatgaaatcttccaagtccaaggatgtgtaagtacactaatacactaaactatcattatcatttacaagagaagcctatgcattatctctatatcccagcaagggataaatactgcgcacagtagacttcatttcttttaagtaacatgccaaataaaattagactatcagtaccaatgtaaattgaatacaaatgtgtacacacacatattggactttatctatttggattttttcaaattttattggcaggttttttttttcataactatagtaactctaagggaagttttgcattttgtgaataaattttaacatatttattagaactacagtttcagtttgtgaagttatcaaagtgtaacagccattcttatttcatttgtgcttacattttaaaaattgactaatgtatgtacattttgtcccctgcagactttctgctgctgaagtaatgcaatgg

SEQ ID NO: 4220 - DNA, 6000 bp, Homo sapiens
tctgttcatgtcttttgcccactttttaatggagttgttttctgcttgttgaactgattaagttccttatagattctggatgtaggacctttgttggatgcatagtttgcaaaaattttctcccattctgtatattgttcactctgatgatagtttcttttgctgtgcagaagctctttggtttaattaggtcccaattgtcaatttttgtttttgttgcaattttgttgcactttaaatgtaatatttcctagggattcagtgagcttttctaaattggagaaatcatattttttcatatctgaaaactgtagtccattagttcttgatacttaccttctcccacttttttccttgcttctgagatagaactttctattttccgtgtctctttattgttcattctttttcaccaactccttatctcacattgatctattctaaaaaaaacttcagatctatcttctgtttagtatattgtagtgtcatctactatttattagttaaatttttgaaaaaattttaatgactttttttatttttagaatttatgttcagtttattttcgaataggcctaatcatttttatcatgtcttgttcttgttttataaaataaatacattcttttatctcttaaaattttttatttgtatgtatttaaaaggcacaagtgcaatttgttacatggacatattgcagagtagtgaagtttaggcttttagtgtatccatcaccaatgtacattatacccattaagtaacttgtcatcatctatccctcctccaactccctcaaccttccaagtctccatcatctatcatttcacactctgcatctatgtgtacacattatttagctcccatttataagtgagaacatgcggtatttgtttttctgtgtctgagttgtttcccttcagataatagcctccagttccatccatgttgctgtaaagacatgatttcattttttatggctgaattgaattccattgtgttatatataccgtattttctttatccaatcatccattgatggacatttaggttagttctatatctttgctgttgtgaatagtactgcattaaacatataaagtacaggtatctttttcatacaatgattccttttcttttgggtagctacacagtaatgggattactggatcaaatgatagttctattttaagttctttgagtaatttccttattgttttccgtaaaggttgtaccaatttacccatacacagtgaataagaacagtgcattcttcttttttttttttttttttgagacaaagtctcactctgtcgctctgtcgcccaggctggagtgcagtggcatgatctcggctcactgcaacctccgcctcctgggttcaagggattcttgtgtctcagcctcccaagtagctaggattacaggtggctgccaccatgcccggctaacttttgttttttttttagtagagacagggtttcaccatgttggccaggatggtctcaaactcctgacctcatgtgatccacccgcctcagcctcccagagtgctgggattacagacgtgagccaccacgcccggccagaacagtgcattctttgtttaacatattttctcaaccagttattttctttgattctttttttctgtttcttaacaaagtgttattttataatctcttaagttagctccattatcatgaatcttttgagtgtgaattttcccactcattgtgtccaatgtctgtcatggcagtgggtttctagtttgatttatagttttaagctgtgagctcatcttcggtagaggttggcttccatgggaaccatttgtgaactgtgaattgtagcatttccacatgagagtttagtttcatctcagttctcattgatttccctgtttctgaactactcttttctttatttccttctttcttcccttccttcctctctcctgcttctttctttcctttctttcttccttccttttgtcctttcttccttccttttgtcctttcttccttccttttgtcctcccttccttcatttttccttccttcttttcttatctttcatttgttccttccctccctccctcctcctctttctctctctgtctttccattccaaaagtcaagaattgtctacctcaattggttattttactttattgctgttgagctcacttacatatttctataaaagttacactttgctcaaatatagacatatatttaaatgtgtttgacttgggaaggatggtttttgctgtttcttgtataggtgcccttgtctatattcttcatttttatgaatgacaataatagcccaaatgccgaagctcaaaacctgataaaattcgttttcatgttgccttaatctctatatgtctttagatgtatctagtttattgctgttttgtttcattttatcatccccactgtctctgctttagttcagtcccttatcatctctcttgtggacaacggcaatatccttctcactggtttctgtgctttccatctgcccttttccaaacattgctacattgctgctagatttatctttctaagcacaactctgagtatgtgaattcactacttaaaacctattaatggtgtcttttcctcatactgaaaatcaaacttccttgattttgtggatttgctgagtcttatttcctgacatctcttcacacctatgtttctgcaatatcagaatatttctagtttcttgatttgcccaactgctttaggcctctattcctatatacatatcctttttctgtaaaactcttaaacttcactcttgccctatttatttgttatacctttagttttttcatactgctataacaaaatttagactgggtaatttataacaagagaaattgacttcttataattttggagactgggaagaggaacatcaaggtaccagcaaatttggtagctgccaagggcctgttcctcatagaaggttccttctatgtgtcctcatgtggtgcaaggggcaaataaactccctcaggcctcttttataagggcagtaatcccattcatgagggttaggtctaaccacctttcaaaactccccacctcttaatactatcacattggggattaggtttcaacatgtgaatttgggaaggggggaaaacattcagaccgcagcatacccatacttatgcttgaaaattcaacgtaaatattatatgtttttctaaaggaattcctgactagcccaaatctgacacatggtagccattgactcatttgtataatggctatatccacttacttttttatattcaaaccccatgtatataattcctataaccatcctttgtataacatgttctctcaaccacttattttcttcgacacttttgtcttttgaaaaactaattttctttgtttctttgattgtgacactcataattaaagacaccctaacagaaggctttctaataccataagattctttacctgagtctattcatttttttttccagtctatcaatcggccttccatgttgtaaattccttagtcttggggttcatggtggaggcctttttagaacgaatggagatcaagttggttcagtatgtagatgtcccagaatggtatcgttgcaaaaggcatgacagaaaacataagaataaagatgaaaagagacttcacaagatttagtgaagaactaatgttctagaaatcatgggaagactctggtcctaatgttgacactgacccaccagatgactctgggcacacagaataattgctctgcttctcaattctccaattgacaaaacacagggattagaatagggagttaataatgcttctgtaatctgaaattcttttactctaattgttaaattgcccaagttaaattatttgcatgaggggaggaaaaaatctttaaaaataataattgtcatgaattctataaaaattaaataattttaaatggataaatcctacttcagcaagtaaatctgtgagtatgtgagagaataatattgataaaaaacattaagctgactgtcaaaatattagagacatgggcagaaaatataaagacttcaaaatatatgttatatagttaaatatctggcagatttataaagctttgtaaaaatcagctatagaaattgcattttaaagtgtaacagtgaacagttttaacaatggaaaaaggctctgtactagcactaacaccaattagaaaataaagcattctggttttaattaatggatgttttcatggtgtctaataaaaatacaattttaaggacttgaacaatttaatctgagaaaatattgtgtatttaaagcaagtgtattttttaaataagcaaacatgtttacattcatcaattatagtaaaacaaaagctcaagaaatcccagagcatataatttcatgaaccgagaataaaatgagctctggacttacgacaaaatctgcccctgaatgatcttcagaactctgttcattttatgcagtagtttaagttttcttctgtcttggcccaacttacaaacagcagaaatctgagttgtgggaatataatttatgaacagaaaagattacttgtctgtgaattattttctgaagatgaaagtaaatatacaggaacatacggtattcctttaaaagttgccagatcataattgtgtggcaaggcagttatcagaaattaatccctctattgagagcaattgaagacactattctaatgtaggcccttttgaggaggcagcatgaacagaagaaaactcgcagcaaaggcttgaggggggaatgaatccaatccagcctgaaaaaatctgcaccaggtttgaaaaatcaccccatcctcccgtgtaagtgatgctaagaagcacaaactgcattttgaatctaagtccctgtattttctgtgaaggagctgtaagtagggtgggacagagatggcacctgggggttctgaggcacccgctcctctctgagacagacagggatcaggagccggactgggaccagaccaccagcaacacaccagaggatgttctctaaataagaccatggcacttaagaacattaactaccttctcatcttctacctcagtttctcactgcttatctacataaaaagtaagcctttcccactttgggcatttttcctggtttatttctggcttattatatttcttacaaataatggataatgttgcatgttctataaaatacaatgctaaaaaaggaagtttttatttgttttttttttaagtgtcctgtgttaaagaaatcagtgataccagtcaatgtgaacagtcagttttaagattctatgatttccaataggtattcaggtacagaaattttgtttttaacctttgtagtagtgagctggagaatgaaatggtcacatagactagaagatattttgttgtgtttacgcttttacaaaatagatttggcccttactaattgatatcctttaaaaggaagttattcataacctgtatttcattttattcccacatactatatatttatcttcacttttaaataactctgtgttgcaacatttgctctcataattaaggggatagtctcaatgtttcccagaggataatggttcaaagtgtttctttcaccagagaaatgggcttttactgttatgtgtttctgttttataaatgaagatattattttccacaaacttccccaaatagaagcaagagcaatgtttctgagataatcttgtcggttctatagcaggatggaaaatcagaggagaccaaattgccccagctgtgtgtttatgaagcacagtagctattcaacacgtttaaaacgaagacagggagagtgtgtgcttgtcaaaggggccatgtgatttgtgtctgttgaatctgaatatcaataaggcaaagcgtagagcagctgccgttgaacaagacaacttggcattagcacacagtgttggataatctgggtcaccttctg

SEQ ID NO: 4221 - DNA, 6000 bp, Homo sapiens; identical to SEQ ID NO: 1558

SEQ ID NO: 4222 - DNA, 6000 bp, Homo sapiens
tgcagaaccagtaagtggcagagcaggactcatatctagttagtggttcagagcatgggctccggagctagactgcctggatttgaaccctggctttgccacttgcctgttgggtgactttggacaagctgcttaaattatgtctccatttcctaatccacagaacaagtgtaatactagttatctgtttcatggagtgattgtgaggattaaataaagttaatataacacaaagcacttcgtagtgctgcctcatagtaagtgttaatgttacctattattagtctgatcccaagtctaatgcagttgtcaccacctaaacctgcctttacagagctggcctttctgagaaaccctgtgcctctgtagattcaacactcccatctgtgcagatggctaacagctaggctgaaaacagaaaccttaggttggaaagggtcagctggagggctgaggcccatggccccaaatcctccccaggagagagagtaggttcagaaaggagagagctataaacagagccttcctcccttgccctcagatcccaaaataacacttgtctaccgccatcctgcccaactggcagagtggcaggctgagtaaggtgccatttaaagataacctggccctcaccatctgccccactggctgggctgggctcctgaggccaggccttggctgcctgggactgctgctgctcccacagccacccagagtgtgcctgagtagggggctgctcacagctgccatccaagccagcctggctacaccctcttctttcctgaggcccaggctgtcctgggctctctacaaacaagcagaagcctggcgttctgggagaggcaatcctacaaaggcattggtagaaagtccttctggagaagagtgctccatatatatatatataaatgtataggatacttgtgcaactttgttacatggaagagtacaccttcttaccagtagcttggcagcagtgaggctcatcctcactgtccttcacccaccctccacttgctagtccctcccaccaagaggacaaacaggagacagtctttcatttacagcaagaaagattaaagctggatgccaagaaaagcattctgatttaagagagatgtttgtttattccggggcagtgagagccaaaagacctggttccccaactaagccatgagacttggccaagtcctggtgctgtcctaggccttactcttcctagctgtggactgcaaggagaattaatgtgtccaagaccctccaggaaggatctgacattaaatcagagtaaagaactcagggtcctatggagtgggggaatgtataattacctgtctgcaggagttgggttgccagaggctgggcaaggaggaatagaaaaaaggagggcagagtaatgtagagtgcattcctggagagcactgactgaccagaggcaggaattaggaaaggaatggagtttcccttatcttggaatggttcaacaaaccactggccagacaaaagtggaggcaggagcctccacggccaaacagcatgggtggggtaggaccagggtgggatggagcctccagggctcatggcccaggaaagtaaggaaggcctcaggaatgcctgtgttagtctgctctgatagaggagcatggaagaggttgggaggagccctgggctggtcattcagcccaggagtgaggtgactcagcagagcactcctaccacagcccctagccaagcccaaactgggtcacaggcagggtcccagcccttcccctcctcctgcctttccccacttcagatatccctggctaccttctcaccacatgcagaggcctgctagagataagggctgggcatcaaagtttccctgaatacatgctttttatgccaggcatagcactgaacattttagacttgtttttttgtttgtttgagacggagtttcgctcttgttgcccaggctggaatgcaatggcgattcccgggttcaagcctcccgggttcaagtgattctcctgcctcagcctcccgagcagctaggattacagtcatgtgccaccacacccagctaattttgtatttttagtagagacggggtttctacatgttgatcaggctggtctccaactcccgacctcaggtgatctgcctgccttggcctcccaaagtgttgggattacaagcgtgagccaccgtgcctggccctttagacttgtttaaagagaagcaggtggtgaagctgaagggcctgggctttgaagccacaaaagtccaactgcaaatcccagcagtgtgagctgggggaattgaagttcttccaacttcagtttcctcatctgtacaatgggatgagctcatcagcaatgttcgctgctggtggtatcattaccatcatattccagacaccctgaggagaacctcctactggcaaagcctatgttttgtctcatctgatcacaaattactctgcctcctcttttccaggaaagcgtttctttcccttgctggggattaagagaccagcttggtgagcggggggtattcctgcctgcccttacctagagaaggtgtagtgaagcccttccaggcctgaagatttagacaacttcttccagggcccccagtcctcccacccaagcccctcctcactcctggccaatctacagactctttcaagacccaggttcattatggcgacataagctagccccagctctccatctccgagctccagcatcccttgtcaaggtaagaagtgccagttctcccagtgcagccagttctcccctctggttggcccacagccccctctcttcactctctgtcctagtctagtcacctcccatcccatgaactgaaacacattcttagaattttgcaattagaaaatcactgatgatgttggtgcgtgctaggtgtcattgcaagctggaagtgtcaactaggggtatacactttgaggagggcgtgtcaactaggggtatacactttgaggaaggctagttggagaaaaaagcaggaaagtagctagagagggatgagttttaggaaggatgtggtttggtttggtttgctttgctttgctttgctttaaataggagagacttgagatttcctagggaaaagaagctggtaaggtgtgagaagctaaagacactaaagagatgggataatgaagagacaaatcagcaggggtcaagggtacacatgggagattcagctctgggcaggaaagacagtcccttatctgaagatgattcaaccaacaatgacaacactgatggctagggctggatggccacattgaacacagccacgtggtccctgcagtcatggagcttttagtgtaggaaagaggagatggatggcaatgggcacactgagtaggtggtgctggattcagaggcgtttctctttgtccctgctgctgcatttatgactgtgtcctgcgtgaggacatactcttgcccatcaggctaccagcaactttctggggcaggagcctatcctctcctattccagctctcttgggtaggtgtgccagcacccacaggggcccaggatggggtagctcctctttcggctgtccttccctaacctactaagattctactgggccttccatggacctgtcctgattctctcaccccagaacacaagaaatactcactgtctacactgtctgctgttgcggctggggatcaaccctgatttagatttgggtcttcctgatgcctctaccatttactggctgtattaccttgaacaagttctttaacctccatgagtcctagtttctcagtctgtgaaatgcgattgataacactgatgaaccttgcttagttcatggagttgtggaaagattccagtgaggtagatgtggaagcccagaagtgtgtgaaagggtgtacatggcaggggattaaggtaggcttttgatgatctccctggcttaatttgcagttcctcggagggtacctcatgtagcatggggcatagtcactggcactcagtataaacctgtgaagactgacctctcccatcctaaaacactgtctccacctggaattaactgttgcccacctgaaattaactgttgccctccctatgctccggtggctattgcagtacaggcttgctctgtgaagggctttcactgtgaagagtgtttaactggatgggccccaggtggccccagcagcctgccttccctgctagtgaggccatgggctggtgcatgccagctctgtccacttgaagggggaagggtccatcgtagggagccagtgcagctggcagggttcaggcctgtgggcaccgctggggacaaagccactctgaatgcctctcaatgagtgcttgtgttctgggaatgggggcggggtgacatccagcctctttccctctccgcccccgacaggatgtcccaggctggacgcggcagaggaggtcccccacaagtgaaggtccagccctgctcctccagggttggcccatgtgtctgggcattcggaggtggcaccaggatcagggcttctggagtccagcatagtgattgggcccaggccgggggcgggtccaggacacagccaggcttccctggccgcagtgcccaactgcccgcagtgcccatggtggctcggatgggaggaaccaccgcggagccggggacagggggagcagggcagtgctctgctgggtgaggggcacccagctccagaggctaggtgggcgtcgctggtgggtggactcctgggcgctgcgcggagccgcgccggctgggttagcgcgggcggggcgcttagtcccacccccagaggaggcggaagaggagcccgagcctggccgcgggctgggccccgccgcagctccagctggccggcttggtcctgcggtcccttctctgggaggcccgaccccggccgcgcccagcccccaccatgccacccgcggggctccgccgggccgcgccgctcaccgcaatcgctctgttggtgctgggggctcccctgggtaaggggatggggagagatgcggcaggagtgggatgggggcggaggaaggggagggaccgatccgaggggcttgggctcggggcttctccgagaccctccggctgccacgggagccttgggtgttgctgggtcctcaagaagcgggaagagggagctccaggatgctgggccatgggaggctgatcccggggtgcagggtcagcttcaggcagaggcctcgggggctctggggctgagaccctcagggtggagacaaggggcaaccctcagtgttcgggagccgtcaggctggggaccgccgggggagtggggccgagcgcggctggggatgaactggcctggtggccactgggcacccccaatccctgcccgcagtgctggccggcgaggactgcctgtggtacctggaccggaatggctcctggcatccggggtttaactgcgagttcttcaccttctgctgcgggacctgctaccatcggtactgctgcagggacctgaccttgcttatcaccgagaggcagcagaagcactgcctggccttcaggtgggttcctgcctcctcaccctcaccacctcctctatccttttctccagaggcctcctcttcctccctcccggactcctgcctcctccgttgtcgacctccacattcttagctgaatagagtcaccaggactcaagcctggcggcagagctaggtgcttaggtgctggtgcctgggagttccagaaaaggcatgttagttaccttcataggctttgactgggcccggggtttccaggttctttctggagccctccctttggtcctgccaggtcatggggagggagggttcaaggttaacacccggacgacagtgtagctttgtggaagaagctctggcacaaaggcaggagacttgggtttgattcccaggtccacttcttactagctgtgtgatcttggagaagacacttgccttctatgggtcattgcttgccaaatt

SEQ ID NO: 4223 - DNA, 6000 bp, Homo sapiens
aaatgaggatattaagagcatctacgagctgggtgcagtgatgtgtgcctgtagtcccaactacttggggtgctgaggcgggagggttgcttaagcccaggagtttgagtccagcctagggaaaatgtgagactcgtctctaaaacaaaacaaaacaaaacaaaacaaaacaaaacaacaacaaaaaaccagaccgggcatgatggcttatgcttgtaatccccacattttgggaggccgaggaggtgggatgaatgtttgaggccaggagtcaagatgatcccaggcaacagagtgagaccccatctcttaaaaaaaaaaccttgtccaggcacagtggctcacatctgtaatcccaacactttgggaggccaaggtgggctgatcacttgaggccaggattttgaaaccagcctggccgacattgcaaaaccccacaaaaactagccgggtgtggtggcacacacctgtaattccagctacttgggaggccgaggcacaagaatcacctgaagctgggaggcaaaggttgcagtgaaccaagatcatcccactgcactccagcttgtgacacagtgagactgtctcaaaaaataataacgaaaataaaataatctaaaatttaaaaaaaccctaattcatagttatggaattattgagcatattaaataagataatgcatgcaaagtacttaacagcatcggacatattttaagcactcactgatgcttgctatatagttaaattatatagctatatgtatgtgtatatacatgcaaagatcaggagatatgctgacatagaatgactatggcagggtcctgaaagagaccacaaaagagagaagttttcacactggttctttccttttgggggatgctgacagttcccctagaaggcagcagactttgcctctgggagcaagccactggcctggcccagcactcctgagatgagcagaaatgggcagaggagagctcaagacagagcacaggccagactaatgtcttcctgagaggagagcagtgggaggaaaaagggggcagcaaagagacaagagattgcctccttcacctccaccaatgttacctaagctaaaacccctctgtctaccaaatcagccctggtcacaaactaaaacccaaacccaacaggaggcttacttatccacgccaatctgaatttctccatgacatggaccaggtgggactgtgggtttggtgccatgtacatgacctgtgacttagtggatggagttccttaggccacagcagcctctggctcaatgaagcttgatctactgagtacctggaccacatggggctctagcagcagtcctatcttgagcccagaacagtaactttcaatagaatatacactggtatgttgaatcagaagttcaaacgcccttcacctttatggtgacttttctctcaaggacctccactgctttcttctactatgccttcgtatcattgaccattccatcagtgagggccaccacagtccctcagaattctttaagactaactagggggagattagagtaccaatccttctaaacctttcaaaaggcttcttttgaacccttttcaaaagatttcttcacttagcaccctggaaccaaatggaagtgaatatttttgagaagacgtgacatctttctcctgggccttgcccagccaaaaatgttctgttatctgttgcaattaaaagagagcaaagagtaagaagtctctttccttaaagtttctttggccacttgagcggagcttcccagagcagtaaactcctttaggatagggactgttggaattaaatgagctggggaaccacaacctagaaactggacttcagctttgtaaactccgaaactcattatcactgtgatggttaatttgatgtgtcaacttgagtaggccatagggtgcccagattaaatgttgttctgggtgtgtccatgaggatgtttccagatgagaatagcatttgaattggtagactcggcaaagtagattgccctcctcagtgtggctgggcattgaaaaggccgaagaaagaatttgcccctcttttcctgcctcactattgagctgggatatctcatttcaccttctcctgccctcaaactgggatttacatcatcagcacccctggctctcaggcctttggacttggaccaaactgcatcactgactttcctccatctccagcttgcagacacagattattggacttctcaacctccataatcatgtgagccaactactcataataaataaataaataggctgggtgtggtggctcatgcctgtaatcccagcactttgggaggcccaggtgggcagatcacgaggtcaggagtttgagaccagcctggccaatatggtgaaacccccatctctactaaaaatacaaaaattagccaggtgtggtggcgcacacctgtagtcccagctactcgggaggctgaggcagaagaatcacttgaacctgggaggcagaggttgcagtgagccgagatcacgtcactgcactccagcctgggcaacagagtgagactccatctcaaaaataaataaataaatattaattttatgtatatatatatatatatatatagagagagagagagagagagagaaacagaaacagaaggatatatatatatttgcacacaataagatatatatatgtgtgtgtatatatatatcctcttggttctgtttctctggagaaccctgactattcctggtgatttagtcaaaataactgatctcacaagaggcagatacataagccagtattaactaccaagtggagaagaatagttataaacacaggccagggtattctcttctatatcgaaatctattcagaagccaaataagaagaagaagattgcataataaatatggaataagaacaaagggaggtagctagagctagagctaagggatattttatctgggtcctggtgagagtgcaaatctctagttactaaaatatttatacccaccaggtcttcggtgctgactaaatgtcagattcctgccctctgaattcctccatgtcccctctcccacattctctctttggcctgtacaattaaatagagttaactattcttaattacagtcacattctgaacacgtcttctccaccttacacacccaaatcagataactagtatgaaccattctcacgtgcaagacacatttattgataatctttagttccatggagggttcgattcatctgcttactttatttccaagcttttggagagaccctcactcctctttgcagtcttcctttatttatttatttatttgaggtggagtctcgctctgtcacccaggcacaatcttagctcactgcaacttccacctcccacgttcaagccattctcctgcctcagcctcctgactagctgggattacaggcaacacgccaggctaaattttgtatttttagtagagacggggtttcaccatgttggtcaggctggtctcgaactcctgacctcgtgatccgcccgcctcggcctcccaaagtgctgggattacaggcgtgtgccactgcgcccggcctcttccattatttatgacattgacttttccgtaaaataaatatatacatatttttaaagttaattacaaacgtacagaatggagaggagcactttaacagccatcacatgattgggattttgttgacagtaaactaaaagctccatgggtcccaacctttttttttttttttttttgacagtgtctcactctgtcactagagtgcagtggcatgatcacagctccctgcggggtagatctcctgggctcaagctatcttcccgcctcagtctcccgaacagtcagggctacaggcacgtgtcaccacgcccggcctggtccccataagtcccctcttctccgagccaaacatcttcacaccttctggtgatcattagtggagaggcctgtgagaggctctggtgtcaatgtccctgaaatcgagggctccaaattggtcatggctctccagatggcccaaacagttccagttcacaaacatttattgagcatctactacattccaggcactgtggttattataaatcactgagacactgtttgccctaaaggagctacgtgtatttggtaacagcttcacagtaagtgacgaataagatagcattaatccacatttgacagcaaaagtaccaaaaaagaaagaaagaaaaagaagagagagaaaggaaagaaaagaaaagaagagaaagaaagaggccgggtgcggcggctcacgcctgtaattctagcactctgggaggccgaggtgggcggatcacgaggtcaggagttcgagtccagcctgatcaacatggcgaaaccccgtctctactaaaaaaacataaaaattagccggacctggtggcgcccgcctgtagtcccagctactcaggaggctaaggcaggagaatcgcttgaactcgggaggcggaggttgcagtgagccgagatctcgccgctgcactccagcctgggcgacagagccagactctgtctcaaaaaaaaaaagaagaagaaaagaaaaagaaagaaagaaaaaggatggaaggagagaagaaaaggaaagggggaagggaagggggaagggaaggcggaagggaagggaaagaaagaagcgtatttaggcagtatcgcgttgatttcagtccacggaacctctggtgaccgggtagtgtgactccgtcattggtagccccccgcccacacagccgggactcgcggcctttgaggacgtgggcagggccagtctcgccacgccgcggccaatgccccgaccacacgctggccacaggagtcctggctcccattggctgcagcgggaaatggtgaaccaatgctcatagaccttaacgccctcctctcgggatcacttccgcctctggggtcaggctccgcccagcttgcccggcatcactcgcggcattggagtcaagatggaggagtacgcgcgagagccttggtgagcttcaccgctgtctttgcatttctcttgcccccctgcccactgccctccttctcccttgtccaggctcccaaggtgcaagccagactcaaccgcagcctcgtcgacttgggcctggtaactgggcaatgcggtctttcgcggccagtcggcttcttagccctgtacttagtacctccccggccgcgtgagcctccctctcccaacccagcacccgtgtgaccttgtgatggatggtaaggaggtccagacttgagtttgatagaacctcggaacctcctcccaacgcagggcgtaatcgactttatgcggggccagttataatcccccctgttcgtcgaggtgaccttgggcgcgtccctccgtctcgccttgctcagttcctgcgttgaggaactgaagaataggcatttgagggagtgtcattcttgaggttttacttgtatcatgatatgtgtccacagagtgaagcattttaaatgaatggaacatagattttagccaaggggtctggataagcttctttattgcgtggggccttgttttccttcttggaattctttcttgagggtagagggggacaaaaattacctgggaaataggaagaggtaatagcatgtgttctctgaaaagccatggacagaaattcattgttacatccagcgtttattgagtatgaataaaccagacacatagataattataaaacgatgtaattgctgtcagaagtctcaggttgccagagtttaaagtttctagggtcataggtaaaaaatcaaatcttgatatttcggttaatcatttgttttattgtgtaagagcaacaaccaagatgtcctcaatttgtgaaagtgcccaggaccttaaattactactctggtatcctagccttgttgcatgttttatgttcccctctcccataaatggcatacaaaatataagttttagggtctcctggctcttcaa

SEQ ID NO: 4224 - DNA, 6000 bp, Homo sapiens
caaaggcaaaagttcagtatgactcttttaatcttagaggcagtataagacagtggtttttatttttatttcttattcttatttatttatttaacagagatggtgtctcactatggtgaccaggctggtatcgaacttctggcatcaagtgatcctcccatctctaccacccaaagtgctgggagccactgcacctggccaagacagtgttttttcctgcctcagcctcccgagtggctgggactacagacatgtcccagcatgcctgactaattttttttttttcgtatttttagtagagatggggttttaccatgttggccagggtggtctcgaactactgacctcaatcatccacctgccttggcctcccaaagtgaacagtgtttttttaatatatgaactttggagatagtctgaattctaaccctgccacttgtatgttaggtactaactagtcttagcattttaataaactggaatgggttgccttccttctgactctatgtattctgtcctaatgcagtagaagcaaaaaggaatcagtcacctaaggtgttttcaaataacaactaccacaactttttcaccactataataatagctgagaggcttactatgtgctatttttaatgctttttatgggttaattcaattaattatttcaacaacccagtgaagcaggtgtttttattatctgaaatttacaggcaaggaaactgaggttcagagaggttaagtaacttttccaaggtcacacagataataaatggcagagggaagttttgaatgcaagcaagtctgacttcacaagctgcactcttgactactttcaaaatattgcttttttatactaaactgccttcagtaggaaatcccactgtcatgtatttatttattcaaaccgaagggatacttttccaatacctccaaagcaatgattcccaggctttagggtttcacaggctattaaaatttgaaagaaaattatgacaaccaacatagatttgccatctttaagttttcaagataaaggaaccttaaaaagcaaacacctcctgtgagcatttactattagtgcaaaataaataacaaccttttttttttttttgagatggagtctcgctctgtcgcccaggctggagtgcagtggtgcgatctcggctcactgcaaccttcgcctcctgggttcaagctatcctcccaagtagttgggactacagtcacccgccaccatgcccggctaatttttgtttttgtttgtttgttttttagtagaaacagggttttaccatgttggccaggctgatcttgaactcctggccttgtaatgcaccctcctcggcctcccaaagtgctgggagtacaggtgtgtgccaccgtgccgggtctaaaggacagtttaataccaaaaaagtagggtggacataatctagaaatatagcattcgaatgctgtatatatttatctgctgtccttgaatttcccacttttctgaggaaaatatttgaaaacaacattttcctttcactttcttcctaatagctaggttaagccacttgcatttaaacataataacaattttagtaacttttacttgtcttcctagcaagaacttgtatcttctggtctggagattaacagtgctattaattaaaaattgttgctttttaataaaaggtggaatgaaagagtaggatcatttgttccactatattggcccaaggacttaagagtctcagaggatttgcttaaaatcttctcagtctagaaattttgaaagatgaaataaacagttttgaggccgggcgcggtggctcacgcctgtaatcccagcactttgggaggtcgaggtgggtggatcacaaggttaggagttcaagaccagcctggccaatttggtgaaaccccgtctgtactaaaaatacaaaaaaattagccaggtgtggtggcacatgcctgtaatcccagctactcgggaggctgaggcaggagaattgcttgaatccgggaggcggaggttgcagtgagctgagatcgtgccactgcactccagcctgggtgacagagtgagactccgtctcaaaaaaaaaaaaaaagaaataaacagttttgggaactagcatttctttcatccaatgcattaaaatagtaattatactgctgaaaaatgagacaacattcttgttaaaacccaagttttttatagtgacattgtaatagggtttatgtttcttgtaactttgatttcctccagaatctgaatgcctgagtgttttcaacagggtgccacatgagtagaaatctacatctatgtgaaccttgtgaaatttttattacactttttttggtctttttttttttttacctttttgtggagaatggggtcttgttgcccaggcaggtctcaaactcctgagctcaagtattctcccgcctccacctccctaggtgctgggattacaagcgtgagccaccatacccggccatgaattttttattgataacgttgtgaaatgagaagcctcagcacttaccatctgcattttgaactggactacaaacatgaattacatataaatagaaaccttatttgaaagaattttcttttgttaacagcttattagacatttgtttcatgttgtaactttagataaattaaatttgaatatttcataattgtaatcaattctcttcagcttcaattttaattcctaattgattcaagcctattagcaagatccctggtggtagtctgttacataatgttagtaaaaggcctgaggtttttctcctaacaaacttggtgccagctcgttagactgaaaataagatactctctggtagatccagcggattggatgcctgggtcctaagtttcccaagccagggattatcaccttttaggagctgcaaggaagttagaaggataaaggagaataacttaggaaaccaaataacttcttatgtgtcgcggtgatacttttcttttttttttaatttatttatttatttacttttcatgcgcgtctgtgtgaagagaccaccaaacaggctttgtgtgagcaataaagctcttaatcacctgggtgcaggcgggctgagtcggaaaagagagtcagtgaagggagataagggtggggccgttttataggatttgggtagataaaggaaaattgcagtcaaaggggatttgttctctggtgggcaggagtgggggtcgcaaggtgctcagtgggggagctttttgagccaggaaaaggactttcacaaggtaatgtcatcacttaaggaaggactggccattttcacttcttttgtggtggaatgtcatcagttaaggcggggcagggcattttcacttttgtgattcttcagttacttcaggccatctgggcgtacacgtgcaagtcaccagggatgcggtggcgtggcttgggctcagaggcctgataatactagcccagggtcctgctcccttacagttctgtaatcttcactcagtgactcgcttctgtctcaatacaaaggaaagacgttattttttctttttctcctttttttttttttgaggcagggtatcgctctgtagcccaggctggagtgcagtggcgcaatcatggcccactgcagccttgacctcctggactcaagtgaccttcctgcctctgcgatagtttttcatggatgcttctagtagttttttggaggtatggtgtgttaggaacaaactgccccaaaaagcttcttggtactgccgacacttcccccaaacctctccgtgctgctcactcctccccctaatgctctgcaactcttctccttcccccaagcctctttacacttctaagtccttatgaagccagcagacttcacttatcagaccttgctgcaataaacaaaccccaattacaaatcatccggaccgcacaggggaaggtgatgggaagcataaacaaactttacctacaccctcctgtaataaacgtcacaagctaatatgtggcaaaattaaccagcaaacaaccccagggtctctctcccccatataaacccctcattttgtaagctcaggggtgcctcctctgtctgtggtggagcagccgtcaggttaataaacttcctcggctgaccttgggtctctctttcgtcctttctctcggctaaccttatatggtgatagattggaaacttttttttttttgagacggagtcttgctctgtcgcccaggctggagtgcagtgacccgatctcagctcactgcaagctccgcctcccgggttcatgccattcttccgcctcagcctcccgagtagctgggactacaggcgcccgccaccacgcccggctaatattttgtatttttagtagagacggggtttcaccgtgttagccaggatggtctcgatctcctgacctcgtgatccgcccgcctcggccttccaaagtactgggattaggggcgtgagccaccgcgcccggccgattggaagcttttaagaactccttctcctattttgagaattcagaaatttatttatagctttcgtaaaatagagtgaagactcttacagacctatgttagactagcaggcgctcagtctctgtggtccgagatagagcacgaagatgacagtgtatatgcattttggtgctgaagtggacctggagtgtggacagaggagttactaagaagaatcccggagaccaggatgtaaactctcaattctaatcaacacaggtgtgggctatggttctgagacaccattcatctcacacgaggtacggcgatacgcgacaccacccagtacaacagctctctctccacctggaacccggacccagcttgattcgcgggtgccggatgatgacgtatccttgcacctggcgatgattggttcgcgtggagaggcgtcgtccgacaacgcgactcggaacccggacctatgttctcgcgagagttagcggcctccggtgtgggatggccgcggagccgggcggagctggcttgcggctcccggggccggctctccggccggagacatggcccgggggcccggcccgctaggcaggcctcgccccgatacggtcgccatgcccaagagaggaaagcgactcaagttccgggcccacgacgcctgctccggccgaggtgggcgaggggggcaggggcgctgaaacattttgggggctggcggctgggagggggctggaccgtgccgaggtgagcgctcgcgtgcccgcggctggagggcggctcggtccgggggcctgcagcgaggaggaggtgttggcggggaagacgctgacgagagaaggcctcttccttgagggttggtgctgtgttgcagtgaccgtggcggattacgccaactcggatccggcggtcgtgaggtctggacgagtcaagaaagccgtagccaacgctgttcagcaggaaggtaagctttgcgcgagcctttaaagactcatgccgcgaagacagaactaggtattttatttctgtttttcttgcagtcctttagtcgtcttcctgtaaccgtgtttgctttcgttagtgttaacttacatattggggtggaggaggattagtcaagagtagcagtttctgtagcagaaatattttctttctttctttgcatttaaaaacatgtttgcatactttttagtttccactgcattcttcttggttattaatctctttgctgtagttcacatgttttactctgcagtttgcttccttgtttaataaccttggagtgttcttttccttttctggtgtttctcttgctttcagtctgtttactcatgggtctgagacttgtgttttatgacacctactgcctccagctcaggaccaggattaaattggattcaatttgtctcaaacatttctctgtagaccttatgagaatacaaatcagcttttatcctgcagggtttatagtggaaaaattgtacacaccttttttcttcagggctgaaaaaaggagtttctg

SEQ ID NO: 4225 - DNA, 6000 bp, Homo sapiens
cagcagagacacattctcctccagagaaaacggaccaacagtattgatagtgagccttctttgagtggtatttatgaaggttctgtatggtggtaggaagcactggaacaggtgatccaaccagtttatttggctgactctctgtatcctctgctgtctccaaattcttgtgtcttctcctggaatatatttttggttaaacagcagaggaatgaaagaggtaccctacccccaccttcatcactcctacccctccaacctcaacagtttcccccacattactcccatttcttttctgagtgaagattttttggacaagactaggatcagccaccttccaacaactagaaccgtcctacaaccatttacctttcccctggcccctctctccaacttctcggagctccaaccctctccccctaccccaattctaccatccctgattctaagccacgcctcagagagacctgcagttcagaaaagcagagctgccaaaattgctggtgcctgtggacaagcaaaagctgttcacaggcatcaattattgtcagttttttcttgatgactctgaactgaccgaatcccttcctttttgcgcagtaagacagagactatgacactgggcaatgcatctccttttgcccagtaaaaccgcacgtggtttcctttccttcatcctcttcatccaccccatcagaaaggccacttgtttgtagcactgcctcctggattaggtttctctccctggtccctttcattcccttctccacataagactatgctcctcttcacaatttggaaacagctagagaaagcagcatgattgggcacagttgctgtgtatcagagacatgaacgtgcatttgaattatgagagccaggtcttttctcaataggcaggaggaaggcatcttttgacacctgtattttatctgctgcttctagggaaggggctgaaggagtgaagttctgtgttatttgcggggaggggacacagtggtggttgtgggatataaaaatatgcatgtttcctggctgaaagggcaaattattattagagagttttaagttcctgcatgctgctgacacaaatgaagattggtttgtctgcctggctgcacagttttcatggtcactcgtcacccaacctgtattatgtgcagattggtgtatgctggctctttgaggtctttaaacagataactaaacctcaatgcataatttttccattccacattcacaaaatgtttggcctcagcacagaaatccacatatctcaatcatctttttaagtttggctatgaatttgcatctagttcccatgtccttgccctccatctaaaagaactaatgaaacttcttgttttctgtttcattttaaaagtagattgtttgggaatgctaacgttgctttgggttttctactttttttaatgcagctttcaaaacgtcctagttgccgtcactcaccccagcccaccccactgcttgaaagttgagccatgtgatgtttctagtgccccatgatctcttctgatgtgtgtttggttttgatgctgagcagtcatgttttatagtctgggttttgtttctctcctaaatccaccatctccttgttctgccggccaattctcacctctctattttctcatcctccttttccttcccctggtatagatcaaagtggtcaaagcgttccatagttccctccacgaaagcattcagaaaccctacaaccaaaagtccatccacagcttcatgacccaccctgaattcgccatagaggaggagttgccacgaacaccactcctggatgaggaagaggaggaaaatcctgacaaggcttctaagtttgggactagggtgctcctgttggatggtgaggtcactccatatgccaatacaaacaacaatgcggtggattgcaaccaagtgcagctcccccagtcggacagctctctacagagcctagagacatcagtttgaattttctttctctgactctcatccctattttacctatttccattttcgtctatcccatctatgaggtgatgatgggacttttcattgtcacgtcagctgctgtgttaacagcagtgtgtgtgaagtgaacctctacctgaccatgaagaggcaagagcacagacttacaaggatttcaacttaagcttgacttggggtttgtagcgggacccagtcaaaccccattcaggtcatggtagaatctactccttggtagtcacttgtcatttttaaagaaatgatgacaatcctcttggcatcaccccaccccacattctccccgatgttcctctcctgaattctggattttgtcctacaagtctgtgccatttataagctaagttgagggttcagagggagacaaatatccccaagtgaaatatgttgcggtagagatggaatgtataaaatccgccagtagtgtgattgtttttcaatttttcccactttgaaaacttacacctaaaggcctgtaggcctctaactctttctgccctttcattcaaacctctccaaagttctttgtcttttgtcttcccttcctttccttttttttttttttttttatgatgattaagaaaatggaaaggatatggatgaattgtgtaaacttagatccttctcccttttggcccaaaagaacccttgatttagttccagaatccaaccagtttctttgttaaaagggtccttttgaagcaattaagtgctggtaagaatatttctctgttgttgccaggttaccttctgcttttaaattgccatcttgtaaagtgtatgtggttcttaagtgccagggagatcagccttgcccatgaaggttgcatatgtgtggtatacagtttttacctgaaagcctgagctttctcttattcctaaagtggtggcaaaagaatgaactgggtatgaccctgcccccttactgggcttggatattgaggaccagacgctgccaaatctaggacaagacagaccatcaaagcagacttttgtgggctcctctttggggtgaccactgctttcaaagccatctgccaaggctctccagggcaggacctgactggtggggaatgagtgttcagaagccttgggagaggccaaagagccattctagcatgatctgagaaaaccttcctgcagaggccagaaaccttgagcttaggtgcctggggaccagcttcgacattctctccagtttctgattctaatttttgccacgtgtcacaacttttccagtctctgagaaggtcccagcctttctcaaatattctgattttgaaaatatgtatccaaagtgggaggcccctgtgacattttgccaacttaaacgagaaaaagaccccccgcacccggcacactcccccttcctccagccccgcttcagccacatgctccagctgctgcccagtaaagccctgtgcctttttttcccctgaatactgcccaaagcatccccttcccatctgcctctcaggagttggggactttgctaggagattttttaagtgttccttactgggacaacgtggagccacgtttgcaggagctccatttgtatccctgctggtgttgacttctgtgtaggggccagttcatgtccctgactctcacctcccattagataaatgaagcccacccccctttctagagtgatgagagtcaagaagaggggatgtatgaacggccaaattcccatgtgagaggaagatgacctgatccacctagccttttcttctggatctgtcctccctcacccctttcacctgagctgtccacagtaggaaacataaagaaacaatgtcccctacatatccccatgactacataatccatcatcgtaggaaataggaaagcaaatttgattttggttttgtaaaacgtacatgcttcaataattcttttttgtgtcttaaatactcataggggaaaaaaacagctcacccaaggtgttaggtttcacatatatattcatcaactattttagaagatttaattctatcaaatcttgtattacctcagatcattttaaatagcaagccaataacgagctttgaaggctattttaccattcctgttcacaaaaggttctcatggtgcctgacaggttacccttgagggcttgtgtctactttttaaaagtcaatggttttttttcttgtgttctagtttccataataggagagaaaatatagaaatatatgcaaaaattatagttttctttagatcagaaactgatatttttgggtcagccatatgtattttgtttaaaggatttaaaataaagtgccgtcatgtagccctgtggaagggagcacataaccagctgtttggcatgacaggtgacttagtatatttgtaattggttttaaaaccaatacaccatactttctttctgcaaacagccatctttatacttagggaagaaaaattgttgggttctagacttttttaatataaattttgttgatatggaattaggtaagtttaagtgtctatgtgcatatgttttttatataagttttttctattcagtttcactgatccaactggcagtgggtaaatatggcataagttaataacacttttccccaaaatggtgctttggatttgaaaagggtctgatggggagaaggagaacgtatcatcctagcttcctctcttaataaacctagaaaaacgggtagtaaactgtggatagtcaggaaaacacccagcaagggacacagctgtcaggaaatgaatcttccccccaacccccaccatgcagatggatagacagaatctttcctgactagtcattaggatcaggggcctctgttggatttgtgtttcttgaagaatagctggcagagtggtataaaagacacgaatatctcctggtctataaggatactctgatttggggtttgcatttttcatggtttttatttcctgttccccctggagttttccattagtgagtttttgtgcaaggatcttatttgtgatgccttccctcccctagaaagattttgtgcaatatattaaatggggacagaattctaaatggataaaacaatggctggttctagccctgagtgacagtcttaaggctagatccttcccatagtatcatctgtcctctggaatgactctcctgtccctaaaggggttaagagagagatcacctagaaatccctctggacacttgtgggttctttagggtttgagtttcttcttccccttgagcttcagagaggagagttggcatggttaaatctgaatggttacctcactgctgaaaacccagaggggcgtggcacactcgcttgtgtggaaaagcctctaaatgcatcccttcctttctttcctgcttcctttgccttacaattgaagcagcccgtggtaccatcacagtatgcagagacttcctcacctttcatatctagggaccacccccgatgcattggtgagggtgggcacttataaatgcctgctattgttaagccattccagcctcttcctctgaatagaccagacgccctttcacttagttcagtgccagtccttttgccttcccaaccctgctgttaggcctgctgttccctttgctcttgattaggagagatggaaggagatgagctcccataactgaattggcctttggttcatgttttctccccatatgtatatatgccatatgtgaatatgccatatatatgtgccaacaaatctatctacgttgttcttttcaaattagcacgcagataggaattttgagtttcttcttcttttagtaactagtataacaagcactggtatttttgtacaaaaaagaaaaacaaaagattgactattgtggtctgcatgacataaacaaacaaatggtgatatcaaagcaacgtataccccagtccagtgtgtgttgccataatttgcaattcagcttaacagtgcacccaatctatatttgcattttgatattatttaagctct

SEQ ID NO: 4226 - DNA, 6000 bp, Homo sapiens
tttaatgagctcttaaatacgcctagtcctaaaccaagcatttttcattgttggcccaattaattctcacaacattacataagtagtagtattattgtcattttacagccaaggaaacacccaaaaagattagatgaactgctaaggtcagccaggtagtaatttagaacttgaactcaggttgatgttttgaacatgtgctttctgccttcacaaagagaacttctggaaagtttctggtgttagcaacatcatgaaaataacacatagttcccccatccccaccaagggactttgtggacttagatacataaattatttctatttaaaaccaatcttaagccaagtgctgtggctcatacctgtaatcccagcactttgggaagcctaggcagctggaccacttgagctcaggagttgaagactagcctggccaacaaggcaaaaccccgtctctacaaaaaatacaaaaatcagccaggcatggtggcatgtgcctgtaatcccagctacttaggagactgaagaaggagaatcacttgaatccagaaagtggagtttgcagtgagcctagatcatgccactgcattccagcctgggcgacacaatgagactctgcctcaaataaataaataaataaaaccagtttagggccaggggcggtggctcacacctgtaatcccagcactttgggaggctgaggcaggcggatcacctgaggttgggagtttgagaccagcctggcaaacatggtgaaactccatctctactaaacatacaaaattagcgggtgtggtggcgcatgactgtaatcccagctactcgggaggctgaggcaggagaatcacttgaatctgggaggcggaggttgcagtgagtcaagatcgtgccattgcattccagcctgagtgacagagcaagactccgtctcaaaaaaaaaaaaaacaaaaaaacacaaaaataacagtctaggccaggtgtggtggctcatgcctgtaatcccagcaagttgggaggctgaggcaggcagatcacaaggtcaggggttcgagaccagcctggccaacatggcaaaaccccatctctactaaaaacacataaattagctgggcgtggtggcgagcgcttgtaatcctagctactcaggaggctgaggcaggataatcacttgaacccgggaggcagaggttgcagtgagccgagatcatgccattgcactcaagcctgagcgacgagcaagactccatctcaaaaaataaataaataggctggacctggtagctcacacctgtaatcccaacactttgggaggccaaagcaggtggatcacaaggtcaggagttggagaccagcctggccaatatggtaaaaccccgtcttttctaaaaaaaaaaaaaaatacaaaaattagccgagcatggtggcgcacacctgtagtcccagctactcgggaggctgaggcagaagaatcgcttgaacccaggaggcagaggttacagtgagctgagatcatgccactgcactccagcctgggcgaaagagcgagacaccttctcaaaaataaataaataaataaatgtttgtttgtttgtttgtttgtttttgaggggagttttgctcgttgctcaggctagagtgcaatggtgcgacctcggctcactgcaacctctgcctcccgggttcaagcaattctgcttcagcctcctgaatagctgggattacagtcaggcacaaccacgcctggctaattttttgtatttttagtagagatggagtttctccatgttagtcaggctggtctcaaacttctgacctcaagtgattcagccacctcggccttccaacttgccgggattacaggcgtgagccactgcacctggccaaaaaacagtcttaatactttagaatcctgtcagaggcgtatgaaccagagcaactccatctcgaataggggctgggtaaaatgaggctgagacctattgggctgcattcccagacagttaaggcattctaagtcacagaatgagataggaggttggcacaagatataggacataaagaccttgctgataaaacaggctgtagtaaagaagccggctaacacccaccaaaaccaacatggccatgagaatgtcctctggtcatcctcactgccacactcccatcagcaccatgaccgtttacaaatgccatggaacaacaggaagttagtctatatggtctaaaaaggggaggcatgaataatccagcccgtgtttagcatatcatcaagaaataaccataaaaatgggcaaccagtagcccttgaggctgctctgtccgtgaagcagccattcttttattcctttactttcctaataaagttgctttcactttactctatggactcgccctgaatacttccttgggcaagatccaagaaccctctcttggggtctgcatcaggaccccttccctgtaacacctttctggcaaccactgaagggactatagtgcagaaacccccaacccaaaggctaactctgggtaagtgttggggtctggtaacaatcatatgtaacatccgaccccaaaaaatcatgaaaagtggttaaaacactagagcaggctgggtgcagtggctcacacctataatcgcagaattttgggaggccagggtgggcagatcacttgagcccaggagtttggaccagcctggctaacatgctgaaacctcatttctactaaaaatacaaaaattagccatgtgtggtggcgtgtacctgtagtcccagctacttgggagactgaggcaggagaatggcttgagcctgggaggcataggttgtagtgagcaagagcatgccactgcacttcagcctgggcaacaggagtgaaaccctgtctcagaaaaaaacaacatcaacaacacgagagcaatcggatttaaaacatacactccttggccaggtgcggtggctcatgctgtaatcccagcactttgggaggccaaggcgggcggatcacctgaggtcagtagttggagaccagcctgaccaacatggagaaaccccgtctctactaaaaatacaaaattagctgggtgtggcggtgcatgcctgtaatgccagctactcgggaggctgagacaggagaattgcttgaacccgggaggcggaggtttcggtgagccaagatcatgccattgcactccagcctgggcaacaagagcaaaactctatctcaaaaaaacaacaacaacaacaaaatacaccccatttcccaggaacgagtgttttttgttgttgctgttgttttttccccgctattatgatgaatcatttcagctacctactttttgttttagtttgtcagtttgattggattttgccccatggggaaggaaaggagagcaggatgaggggcacagccaaggcctggaatcctggcactcacctgcagtctgaggcaggtaacttgggcagctgcctctgaggtggtgatttccctgagatgtgggggcaggagagaattggacaaccagagggaagattggtctaactgcagcagattgggtagataagataagtgaggccctgaaatgatcacatgcaatggaaaagttctttaaaaaaaaaaaaaattttttttttttaattagcagtcatggttctgaggtttggttccatgtgccctttccgtgtactgccttccgaggtcctgattctcacagtcccttattggttccaatggcccaggaccccagtccttgccaccagcatgatggatcttgtgagtagtcctagttcctactcagacctgatccaaaggagaagtgggcagagacccaggttccagctccagcaccagctgcctctgagccatttctgcttcctaccaggtgaagctcctgggagggaaggggcccaggacctggaatgataaagctccctggaaagccagccatggccagtctgcagcccctggggactctgtgagagtctggatgcagacaggccaggggctgccacctcaggaaagctgaggacctcaatgtccactgggaagagatgggagggaggcatggttctaggagggtactgctggtctgcccttccattcatctgggaatccatttccttgtggaaagtgcaatcagagaggttcttcacatccttacaacagtcttagtggccccttctctttggactctcccaagatgcaaagagtgtttccggagattagtaggctcaagaagggaggggagttagcaataaattttgaacaatcttcaaacactttgggtagctcttaaggatgaacttgttcagcttctgagacaggtgtgtgacaagtaagactgtgactgatcttcagaagagccctgagaacaggagatcaccagcagccaggagctgtggaaggttgccttgggggagcaggggtcctgctaacccagcataacttctattcttaaggtagtacccagagcagaggttcccaaaacatgaaacacagatgagctccatcaaaatcacctgaaagctccatcaaattcacctggaaagcatcgatagccaaagcctgccccctctgcagcctccacccactgaatcagaagagggtcccggagatctgcatttcactctaaaaggcaacctccagtgctccttagacttgcttagaaaatactgtaaatctgaagacttatacaactctaagtgtctcagaaactcagggtgaagaatcacaagttctctactaccctgccccatttttaatcacactcatcacagaccacagagcacctggcaaacccaggaacggtgggttgaagatatgttttcttctagcagattaagagctgagcagagtttcctgtgccctgtgcttcattagcacattggtggtgtcgtttccggtgactgactctctgtttccattctggcaaagtggtttgctcttttcactctgctttgggtgttgaaggaagacgagcttctcacggagcctctcttgagcctcttggcagtttccccctctgtgcccctcacgtttccaccagaaacgtgaaggcagaggccacagattctccctgagccacctcacttggaagcaccatgtccggatgagatcgcacttcctgcagtgggcattagccacgtccaggtagaaccaaacctgttgcttttgtatgttgggtcaacttggcctgacgtttcagaggtagacacgagatagggagtttgttgcgggggtggggagaagtggtagacatgctggctaactgattatgattaagagaaacttagaagctgaagccagagagcatctcaaaggttcctgatacaatggatggtgtcactccaaccctttcgacaatcagagggaggaccttggagtccagcactctgcatgtgactccccgcagcctggacaggtgagtgactcagggtggtgagctccaccctgccctgatttaggcagaaggtcctagtccacccttaggagcttcttacacagcagtgctgccacctctcaacacccaggctcggtctactaaaccaccaaactctaggcttggaggcatttgctcaggggtgctagggggaaaggaaggtattgaggaaagaaagaaaatattgtggtagaggaaaaactgtgataacactggcccttaaagctagttgcttagactggttggatttctcacctctcggaggccctgaaccctatcatcagtctttcctaggtgtcaccatgacagaaacaaaaggctgagttttccaaggatgtgttttgagatccaaaaacttgtcatgaataaaaaatgtagtgatagatgtaataaagatacgtccttaggacgtaaaatcttacagaactaatcatgggtatgaattactgctactactttcaatctcatacaaacaaaattaaaaatccatccacagttgaaactttaaaaacattggcagctgactgggcgcggtggctcacacctgtaaccccagcactttg

SEQ ID NO: 4227 - DNA, 6000 bp, Homo sapiens
gcagacggtggggcagttccaccctttgcctccctcactcttggagcagggacaggtctgatacccaggcctagagtcaaggctggttaatggctattccaaagcttctctctcctcctctctaacttccccattcactgccccatctctcaaattccattccaggaatggaatttcacctacgtacagtggaagactaattctatgtagcttggggaggtctctgcatctggaaggtaaaagctctaacacatgcacatttccaagtgacttcataaactgagctctatggctggcccttggcagtggtgggcaagaggcaactcccaaggagatttttattttttaatttcaaagcgggaagtaagagagcagatggaaagatgctctccagcttggagttgggctgagtgcttcctttcctttggctactccccagcatggggggaagaaaattctaggcacttgagaatgtgacaggtgttggggggtgatgaggacctgcagacagcatggggtctccacatctgccactgctttggatcaccagcatgtgtgcactggccaaatgggagaaggaccagagccctgttcctggatccctccctccttcccttaatgctgtgtgcaaattgggatgcaactttcccccttggcctagggagagactagaagatgctgagggagagatgagataagagatcaaagagtctagtagcttcttgggggacctatgggaaattcctagtggtttttcccattggctttcactgcacctgtcttcctgccctcctgcattatggggggggcctatattcctggaactttctaaaatttgcccctctacattccttctgaacatgctactctgcttgcttttctgcatcctcatccacctgctttgctagagctcagcatgactatcactctgctcttgttcttcctcatgatagtgacacaggattgttcccttgaccccctttgtgggcaggaactggagtggctcatttcactcagcctgctgatggccactcctggcagaagggagtgtgtgagtgagtgcgggaaccagagtgaacgaatgctagaactagccggtcactcctctctggtgggagcaagctctgtgtgggccctgcagcagcatccaagtgtgttgcaatggatgctctttcagctctgctgtccagagatggccaagtgtcagtcagctcagtggaaggtcagggtggcagcccctgccctctcagcacccgggttcttgtccagtgtccaggaagaatcaggtcacatgaactgtttgaaaggtgatgagtgtggaagactttattgagtggtggttggctctcagtggaaagggagcctggaaaggggatgggaaggtaatctttctctgaagcctggctgtctccatctgggcccctctctgaagccacactgcctgaaattagccatgtctatccacagtctctgatgttcagttgcttctctgctcactgctcagccacttgtctccttgccactcagccacttgtgtttctctgccagctaaagtcttttatgggcaagggataggggcagggcaggccaaaaaggcaacatttgggaggaaaagtggggtcagctatatccacttagggccacagttccaggcttaagggtggggtttagccgggagcccagcccttttgtatcagtggcagagtttctgtcctttggcacttgttatacaataggtcggcgtaagggagtgttgtgcagtgggagagggtacaccctggagactctaagatctttgtccaactcccaattccaccacttaccatctacagagttaggaagcagtccctgagaccattcttacttctgaccaattgcaagctcaagcattcccaagacccctcttaggtcagtaatttattagaaggactcatagaactgagagctcataggctcataatggtggtttattacaataaaaggatacagattagaattagccaaaagaagagacaggtcaagcagagtccaggagagttgcatgtgcagagatcgcagttattctctcttgatgaagctgaggacagtgctaaagtctcccaggaacaatgtgtgacactgcatgcaaaatattgctaatcagggaagttcttccaatccttagtgtccagggattttattggggctcagtcatgtagtcatggctgaccatccaagtggttgaccttagtttctagcccctctggaggttgagccgatgcatgcccaaagaccccaccatccatcattgttagtatagactacctggttttgcccaagacccccaggtagataaagatactcttatcaggtgagataaccaaggactcagagatgacctcccaggagccaaggacaaaagtcagatctctctaggggcaaagctaacactgtaccacaccccatctgtgtgatgctgtactcttattaacctcactgggcatctatttcctcatcagtaaattggggacaatgatccccacctcactggggtttctgaggaatgagtaacataatatatgcaaaaggcctagtatgtgaaaggcttcaacaaaaattaggtccttcctagtaagcttaagggcctttgctcttatcttctaaactagcccagggcattattccctctttcctcttcttcccaccctgtctcccaatttgctttcccttttcccccagaaaaggataatacctttattccctgtatgtcattattaacttgctttttaaaaaacaaatgtgtgtgtgttatcattgttataatttttaaaactgtgctattgcatggattattacaatggatgtaatcattgtcctcttgagccgcactgagtatccttgtgcatacacatctttgtggattgggccagtgattctgcaggctggattctttgaggtggcattgatgggtcaagggtgtcattaaagtcttgatggtactgctgtattgctctcccaaaaaggccataccaagttaaacctccaccaatgatgcacgaatctgccagtttccccacacttcctagggaccagtgtggaagaggatggcttcaagtgcccgagactcatacctggggctttctcttggtctgagcccaggatgaggcagggcttatggaatttcattgggaggaatgaaacactagggaatgtgaaaatcctgtgacttgccattcaccatgacagaggacacagtgagtgaggtttcaggtctgggttgaaagtccatgcttgctgagggttccagccagaactagaggtgcaaacccagggaagaaaaagaagcaggaaggccagataaatgtcaggaaagaaaaagagcaaccactttctgccctcggtcctgagtgagtctgttcctgacacagcagcagaacagcctgcaaggtgcgtaggctcttcttagtccccagagtccatcaccagcagggggtgcctctccctccatcaggacttgcctgcagctctgggacaccaccgaggccaaggaaacaccttcaccctcagggcctctgggggtcaccatgctccctttaggcccacacttaatttctttatactaaggccatgaaacttgagtcccagttcagtttcaaccaccaaaccactgtgtggggtccatctctctagaccttcgtgtatttgctgtttaaaagtaatgaagaaaggggagggaaggctgaacaataattaacatttgtaaagaacagtttggttcagtaccttatctcattgatgctcactctatgcccattttacagatgggaaaaagaagacttagagaggttaagtgaactgcccaagtttaccctgctggtaagccaggactttcttggcaaatcctgtgatccttcaacttgaccatattagaagattctagtattggtgaaatctaaaacttgtagggcccatcttaaaatagcaaagtagttttaactaggcactgtcagatgcatctgggctttgaattattacttgggcaggttccttgaactttggtgttctcatccagaataaaagacagtggtgccagggtaggagctatgagcacagagaaagtagcccttgaatggggccacagagggatgctgcaggggactgtagttttggatgaggagctgaactagaagcttccaagtgctcttccaagacaaagattctatgattccctaactgggatctttccactgtttcaggtgataattctgagctcagatcctgtgcacagaacctaatgcagtcttcgtgtcagagctagaagagaccttgggcgaccacccaatcaacttttcatggttcagttgtggaaactgatgtccacagataaatgtcttgctatcatgtcagatagttctccagccacgactgaggcctgagtccccctagggcagaggaaatctcccatttctaaaagaaagccccgcactgttcatagcagtcacaacctctctcacatccctgaatcaggatccaacgacttgccaatcaacaaatgttgctggagagtttaccacaaacaagtctctgtgctaggccctgagaacacaagctgtccggcaacttcctgctccctaaagtcacagtctatggtggaggtgcaaacaagcgatcctgttggggcttcagggtacttcctcctgtgtgctttgcacgtagtaggtgctcagcgaacggaaacggggagactagttatcactctccaggcaagcccgcaaagaggcctcaggtgaaaagagaaaggaggatttttttttccggccctggctctgcgcaccgctccccagcgcgccaggcggggctgcgtccggagcatccttccctccgcctctgtcctggtccccgctcagcggccgctaggagcgcgaagggaggggcgcgggggcgcgcacgcagggtgtcgggggcgcgccggccgcccggggacgcgcacgggctggtctctgccctaatgcggcggctggcggcgagaggcgctgcaggggacgcgggggaagtggcggcgccggcagcggacagctcggacagcgcccagggccggagcccgagcccttggaggtaggcgagcgcgaacaccggagagatgggggtagagagtcatggaaacccacctagcgacacccccttgttcccgccctcgtctgtctccatcccctgacctgccccctccccctccgtccacattcccatcccttcccctctccacactgtcacctgccccgaatccatccgattctgttcgtatgcccaccccgtccccgtccagctcccagccccctgcccaccccaacaccctttctatctcgttggccgcgtcccctcccccttcccgcatcctcaaccctttccctttcctctctgtccccgcctcatccgtgagccctgcctgcccttgtacttctgtttacctcgacaccccactttggatgaccccatgcctcctgtatttcctaccgcacacatcagccccttcttgcctcccctattctcttccccatctcatgcccctaccagttggtgtcctgtctctccatttgctccctcagtttctgtcctcccctggttcccccttgcacgccctgtcccagccccttcccagctgcctcttggtgtcctcctgcatcacagtccctctcaagaaccccgccttctcccccctttggctgttagctggcctgacacccgtcaccttccctagctgcccttcctggtgctgtgtggagccatacagcctgtacccagccctccctcagtggcctctggaccccccttccctgggtggggatcttggttgtggaatataacccctttctgcatgttcgatcctatttgtggcttggggaagaatgctgggggttagtaggcctctctcttatgttcctctccagccatgcagccactctactcctctagctgttcaggtttgtttcctagatggattgggggagggggtgctaggcattg

SEQ ID NO: 4228 - DNA, 6000 bp, Homo sapiens
tgttccatggctgcctattagccaccccgggcaggcttagtaaagggcagacagagcaaaaggttatcgactcttcagcccagcccacttccagggtcacagctgcccccaagactgttctgtcatatcctctggatggcatggcttttaccgggaccaaaagatgtccccaccaggaacgtcctccttaaacccagatgacctggggcagtcaaggacagagctccaggcagggaacccacgcacccagtcctagcccagccccacctccactgctctgtgaccttggcccaatcatttcacctttctggctttgctttctttgtgactcaatccctctctactgtcctgccctcctgccctcccaccttccacaccagccaaattgtttcataaaaaaagaactcagggttctttgagctctttggagagaccacataaatgcagggcattattagcatcattactattaaatattaataatgacattagcatcatctattataagcctgaaaaaggagctgcaagagccctgggttgaaatggcaaagagaataattaggcccctccaggccacagacccctctgggccctcacatgaaattaggaaggcaaatgcagacagggcattgagatcttccttccagcacccctgctaggtcaacttggcttctccaggcattacacaaatcatggccttcccaggccccacatcttggctcctgccacaccacatgcccccatgccagaaacacattccccacctcctctctgtccatccaggctcaattcaagatgcacccacccacccccactgaaagcttcacccacatcctacctccctctctcctcatcctctgaatggttactatagctactctccttcattcattcacccagtcaacaaatatttattgagtctccaccatgcaccaggcactgtgctaaacaggagggtgggggactgggagaatacggactgatgagataatccctaccttttggactgcatagctgagggaatggccatcagtatttgatatggcactttgcaattcaaagtgcttttaaaaaccattatgtttaattcacatatcctcactaccatcctagataggagtaggatcattcctattttactggtgaagaaatggattatctgggcgattaagtgtcattctgttacttgcccagagtcatccaggtaggagtgacagagctgggacagagtccagttctcttgactacaaatccagagccaccccaaccacttgcagcccttactgctctgcctcatatccttgttttacagatgagggaggctaaatcccaaaagggaaatactgacatttattgagcacctgctgtgctagctacttcacgtgtaactcaacactcacatcaactcagtgaggtatgtgtcttcatccccatattctgggtgaagaggtatgtggcttgcccatggcctcacatctcctcagtagcaggactgggtgtcaaacgggtctgtctgcagagcttttccttatggccatatcagttttccccagagctgtggatggacagtcctgttaccactgtcacactgcttccaaaaaggtcactggcactttgaagaccgcatcccctggctcttggatccctacattccaggcagaggagctgctccataaatacatggcctcctgggaaaagggtctgggcaaagatgctggtggcgggagaggccaggaaaggagaggtgaggcgggggagtggtgaggaaagagacagcaaagctgcagcatcctggggccatggcagggtctcatctcctccccacttgtccccagggatggggcctagaggtcccttcttgatcggttagagacccactggattccattgctatcaatcttgtgtggctacagtaggaagaagcagatggtctgggcagggttgggtggccctcaaaatgctttctgatccccacccaccaccaccaagggagcaccacatgtttgcggacaaatttataagccatttgactagccacctgattatcttcactggccctttcttgccctgtttgaaagtctgtggggactcaactttgagatgtggagtcccagctctggacaacatggagtcatattgatcagccacagaaaggagaggtggcccttatggtcagctgcactgaagattgtgggctctggatgtcaccaaagaagaagaaactgttctgccccctattttgcccacctcaaaagaacagacagtaggtagctggagtccatggcacggtggctaagccaggatgctggaggccgatcccaggcctcactctgtcatctaggctggagtgcagtggcacgatcacagctcactgcaggcttaacctcccaggctcaggtgatctttctacctcagcctcctaggtagctgggactacaggtgtgcactgccacactggctaatttttgtgtgttttttgttgagacggggtttcgccacgttgcccagggttccacttgtttactatttcttttgagcaagttccttactcttactgagcaacatctgaaaagtgaggataataacaacatggacctcttgcgcaagtaattcaggtaaagcatttagcacagctcccggcatgtgggaggcattcaaaacagatattatttctgttattatcaagctaatgggccccacaagcaaaactcagcctgcacccccaaatgcccaccccactctctcctcaggaacaggagcatctcagagactgggagtgcagatccccctaatctccccaaactcattcatactagacttcactgagagcttcagacaagtgagaagatgagactttgggaactgtctccccatccaagtctaggcttggcaaatgttcttgttttcacttattgtgtctgccagagtccacatggagcatgctggttgcattgagatctgagagtctttaagacccaagtcacctgtgctaacgaccctccccagagacccagctcccaccacagggcagcagctgtcctaaaatagagtcacaaagacagctgtctccgtctaaagcaatccttgcaagcatttccagactgttggttcctgggccagcctatttcctggcccgtcagccccctgcagcagacatagcatccttttcttggcaaggacttgttcctgccgttttctgctaggagagaacttgcagagcctctctttggagcccaggctgacttgaatggtgccaaagagcaaggttcacctcaggagctcagagccaatgtgccagccctcagacatacagataggcaaggacagtgtgggcaggggaaggaagggaaagatatcctggcaaggggttgatgtgtctgtctatataacagcattcaacattatttaagaaacatcattagcaaaatccaagtcctccccatcaggaacaaagaagactatctctcaagttgggcaagccctttggaggggctcagaaggaaaggaggggagcgcatgtgggacctgggcagacattccagccttggaggctgagcagcagaacctccccgactccttctccttttccagaccctctcattctggcccaggtccccaggacctcctccactcagggagacatggagccatgatccaggcttgacaggtatagccatttaaaactgggaggctggcctggccctgccagctgttgcagcatctggactgctcaccggtcttgcctgtgcaagctggacagcaggcagatcagaggggggtgagacaacagtgacagcctgacagggccgactggtgccgcagatggctggtccctccgcctccgggccacagccttcctgggcactcccccacgtgaccggagcagggcaggagaaaggcatcgctgacaagggtgagcacttagaatctcagagctggcaggactgtgtccatctttaatcccttcaggtaccagcgaggctcagagagggcagggcacctagccaagcacacacagccagtcggttgtggagcccagagtatgcttcagacacccagacccctaatccagggagcttttcatgacatcacactgctggttgcttaaaaatgggattggatccaaacgtactgatgcgtaaaagtgtccaagatcagttacacagttaaaagtctttggccaatcctactgttttatgtaatcacatttgtgtgaaataaccctactaacccatgtaattgtatacacgaaaataataaacctgggggcatgtacttagatttattaagagtagtggttgagggactttcactatgtatttttaaatgtcctctaatatttagatattttgacaaaaagctcaaactacttttgaacaagggaaacaataaagaggaacatggggtggaccgggcaacagagacagcccctccctgccacttgccccacacagcaagctgggatttctgatttggatctcttcctcggataggggatttctggggaaaccaggagttttggctccatgggtctccagggtttgaggagtaagagccactttcttttccctcttcaccccgcccctctcctgccccttcagccctgggcagggggactagaagtggggctgggcaggatcgggagggcaggcgggccagacagcgccccgcggcctgtccatgagcggcccatgcattatggaagacgcgcgctgggctcgctccctggtccttaaatgacagcaaatgaggtaaagccaggagggtggggacggaagtggggtgggaggggggcagaaggaagccatctccagggcccccgagcgttggctgaggaccagagccagccagtgagcggagcctgggagagggaggagcacatcttgatgcagagatgctgcagtggctccgggcgcgctcacacacacgcgccctcacccgccaccgccgccgcggccgccgccgcacccggacagcgagcggctgaggccgccagggcccaaaggacagcggcccagacaggggctggcggcccggccggccccggctcaccgactcgggcagcatccacctgccccagccaacacccttctctcgccccaggtaggtgccaaccgcttttgtctcctccaacccagggacttccctgcgtgctgttatgggccggggctcccggctcagttcctgtaaatatcccccttgtaacttgggagggaacagggacaggaacactggcaggctggggccgttctgacttctcccctcagccccagggtgggtgctggggctcccctccgccctgtctacgtgggcggcatcccgcagggctctctcaggccgagcctggccgaaaagctggaccccaggagtgtgtccaggaattccagttggccagcgggcagtggcagctgcctgtggagagggcagtttctcctgggccggccctgggcacccggtccaggacaggaccagtccatacagccaggccctgggccctggcctgccccagaagtccctgcatggaattgagccggagtccccagttttgaggtcacccagggtctacctctgcagggtgacctctttgcaaagtcttgcttcagctggatggagaggggggctgtggaagagagaggggagagtggagcacaagtttgggcaagggcctgtccaggaactgggactcggggaggagagtcctgaggccagtcacatcccaaagggcgagaggctggggctaccgggctgaaattcctttccttcccttccccctcccaaccttagcttctcctcaaatccctcccccccatcctcactggtgggagggaagaatttgcacaaagtttggctttccagtaaggaaaggggctggggccagaatggtatggggaagggaaggggcagagctggggagttctggaaagagagggcaatccttctgcccagcaccgtggggcttacataatgggctggaggtggggggcagccccagccagtgag

SEQ ID NO: 4229 - DNA, 6000 bp, Homo sapiens
agaaatgatcacaaagttagtaatctgggtttgcttactcctttaaaacattgccagtttgggccaggcgccgtggctcacacctgtaatcccagcactttgggaggccgaggtgggcggatcacctgagatcaggcattcaagaccaccctggccaacatggaaaaacatttttagtctctactaaaaattagtccgcaaaaaattagtcaggcttggtggcagatgcctgtaatcccagctactcgggaggctgaggcaggagaattgcttgaacccaggaggcagaggttgcagtgagccgagatcacgccactgctctccagcctgggcgacagagcgagactccatttccaaaaaaaaaaaaaaaaaaaaaattgccagtttggtatcagagattctgtgttttgaatgaaataatgtatacaatttctgcataaatatagtaatggcagctttatttctaaaggcaaaaaatagagaaaattatgtcaaaggatgaagtggatagtatgttaaaccatgatatcttcagttgacagaacattaagcagtcatttaaaatgtttacttaaacatatggaatatggctaataatatatggaataatatgggaaaatgtaataatgttgaaaatgctgctgagtacatttcaagtaaaaaataggataaaatttagtttaggctaataagagctttctccaatcaggagtgatatagagccttcctggtcctctcttccttttacaatagccagtaaaaagcctgtatttaggtggtgggattgtgacaacatcaacaatccagacaatcttcttaaggattatttgcatagtttactcttcctaatccaacagaactcaatttcttttaaggagtgcactgcgtggaagtggtcatctccaacaaaaagggaagagaattacattaacaaaggagtatatgcaatgatattggtatcaaaattcagtgagcaaaattattatatctagtccctctagagagtacttttacctttgaatcactctactcagtatgttaaatcttaaaatagcgcactgacaaccacttatccatttgatgtttaaatgtttttttaagtattgctatggaataggacatagaattgccttggataatctgcaagcttcttactattggcaaaaagagaagccttttatttttcagacctaattgcttttacaaaaagaaagaaaacaaaacaaaaccctactctacactttgttaatcttggcaccttatcctctataatgaaagcttcaaccatttatcaaactaaatgaactgggtgttgacaagagagcaggattccataattctgccctttatactccttgtgtgtatacttattggtttagcaaatttgatactaccagagtgctccctttcattagtttaactgggatttctgttcacaaaaagcattcagcttattgggataattctctttctcatatggtatatggggggcttggacaagttaattatttttgtttcacttagttttactgcacatataccatgtgtcaagcattttcacgtgcattatctaccttcatcctcacaataaccagtgaagatagatagtattagccctggtttatagatgagaaaaccgagggtgaaagaggttaagctcacaagaagtaaccgaactagaatgcttacatgaattttctgacaccaagaccaatgttcttcccactaaatcatgttatttccttgtaattaactaggtgtgccaaaacagaatggaaatgctactcctacatagaaaatataatcacttgcattgtgtatctgcaaacttttgtctaatcttgaatatcaaaacataatttgtgcctatattttcccaaagaaacgtagaatgatagaataatctaatgccgtaaacaaaatttcaaccaaccaaagtactttcaagttctgattttcttaggtgctcaagaatttgctgcggctaatgaaaatttgccattggcttcaaactggtggttataggtcactcaggtctctacacagacttctcagccaaacttctttggcagtagcacacttattccataatatgacactcagtgaaagtcagaaattggtgggacacatttgaactcctgaagatagaagcattggagtgaaatgtgcaacacttctgaaactggatgacatctgtggttatagctatggccctcattctttgctaggcaatgtccaagtgctttacatatattacccaacaccctgtatggtaggtactgtcattatccctacttccaaataattcagaaactggagcatgaagaggttagataacgtgtccccactcacatggtcagtgaagagcagagctaggatttgtcccctatctggccatagagcctgagctcttaaccattatgctatgatgcctctccaaaatggaatgtaaagtattagctgattttatgaaacacaccacagacttttttgctgacctgaatcacaccttgcaaatatgacgacaagtagaaaatgtggctgtcatgctgtatgtatatgataatataaaaatcaaacttaagaccaacttttatctagtatagaaatgaggcataattcaaaattataatgctctctgcttccttaaacgaaaccaaatcccttccttaaaccaaatcccttcactttccttcggcttcgagtcaggtcatgaacatgtgtcaatgcatgctcaccatttgctggccaccgcgtgcccctcaagacttgctcagggtctttggggccgctgcacttatctgggccaagtcaggcagggagcagtatattcctctgcttgaaaccttgcaccatgggaacctgcccccaccggttctgtctagtcctgcccacggtctacactggcatcctgccatcccctcaccattgaaaatgctaaataaaggcttatagctttgtgtttccacattgtgctcgattctttgtggtagatgtggggggtggttccacattcccagcccatcctaaattcctatcttctaaaagtggagctgcctagtttagaaagtagctgcttggctgaagtaaattcttaacaaattagtctcttctaggatacacattaaaatgagtggttggaatgggaagaagacagaacagaaagtcaagaaactccgactagtgagactgaagtgaggctacaatggcatgatgggtgcgaaagagattggtaaactgtaaaatcctttagagaccgtgtggccccttcactgtctaggccagtggttctcaaagggtagtgtgtgtcagaattacctggagggcttgtcaaaacacagatttcttggctcactacttctgattctctaggtctggctggtggccaagaatttgcatttctatcaagttcccgtgtgatgctgaagttgctagtccaaggatcacaatttgtgaaccactggttgctggatgagtaaaatccattgtgtccacaggaggcatacaatagacactcagatggggttgttattattactactctccatatcttggtaaccccaacgtttgctctcttctgcttccagattactcagcacagtttggctgagatttatgcaaagagagacagcattccctttccacacatctatatgtagcaacctcctgccattaataccctttcttatttaaaagctgcttcacagtttgtaaggaactctcacatacgttattgtgtttttatatgaaattcttcccaatttctgagcataaattatgccaagtaaagtctcattaagaaataatgcacttaaagcgggggacggggcgatgaggagagaacgccccctccccttggcatttgcagctctgaatgtaggcatagatttaactcagaccaagtatcctagaggggataggtgtctcccttatggctagaaggtgcaaagttaagagccccaaaaagcagtgataataaacatccctcttgtgctccttctcgccaaataaagcgaatgggtggaggaaatcctgggcgagccctcctcggcagggtccctcaagctggagccgaaactgcgactcccacgcccgccgcccccgcccctgaactgcagcccgctctctgcaatgcaaaaacgcagcagcatcgtcctccagccctctcctgggggatcgcacggtgcaaccaaccccaaaaacgaagctgcgcgacgccccctcagccccgcgggcttcccattggccggttgccgctgtcactccctcctagcctcgccttcccgctcccgggcggaggcagccgggcggggtaggttgcgcgctcgccgcgggctcgggccgcggtcgcggctttgcggcaggctgcgcgtcaggcggggagcggggcgcgcgggccggggagggggccgggcgcgctgcgggctccgcggccggaccatgcggggcaggggccggttgcagggccgggggctgcagccggcgccgatggcggccgactaggacctgcccggccggctgccccgcgccccgcctcgccccgcagcccggccggccgggagggatgcgctgtgccgcccagctcctctccgtcctgcccatgccctgaagcagaaagtttgggggccgggggttgtctcccttctccctcctgcaatgactgcccaaggactcttgctgcccagcctcgactgtgacctgtcttcgctccccaggtcgaaatgaactattccaagctataaccaaggctcccccttctcgcccctccctcacccgcctttaagaattttttttttaattcaagaaattgtggtctgccatctcccctccttgttaataatttagaccccaggcctcatatgaatataagagggggtgcggtcttccccaagacggcgcgctggaaggacagattccccttgccgacccacatacaccatgaagaggtgcagatcggacgagctgcagcaacaacagggcgaggaggatggagctgggctggaagatgccgcttcccacctgccgggcgcggacctccggcctggggagaccacgggtgctaactctgctggcgggccaacttcagacgccggcgctgccgcggcgcccaacccaggtccccgaagcaagcctcctgatttaaaggtgagcgcagaccatccccccggcaagcccagcccgcgacttagctctcgccaccccacgcagaagtgctttaacaggataaaagtgaggggggaagccaggcaaaggtcagagaggatgagcggatgctttgctggcaccccaggggggacgtcaggtaccatttatgcctctgtctttcagctccgtgtcaggtctctgtgtttgttccccattattcagcaagcgttttagtgactcacccatccgagattgtttgaataatgtgtgaagtgttattcgcagacaaagggctggagaaatccaagatgctaaccaaaaagtggacagcaggtgaccattagttttccttgctgagtaagtctctacccattgggatctttgtgtgtgtgtgtgtgtgtgtgtgtgtgtgtgtgtgtgtgtgtgtatgtgtgtgagacggagtctcgttctgtcgcccaggctggagtgcagtggcgcgatctcggctcactgcaacctccacctcctcggttcaagcgattctcctgtctcagcctccagagtagctgggattacaggcacccgccaccacgcccgggtaatttttgtatttttagtagagacggggtttcgccatgttggccaggctggtcttgaactgacctcaggtgatctacccgcctcggccttcctaagtgctgggattacaggcgtgagccaccgtgccgggccccattgggatctttgagcgctttcctggatgaagctcagtttgccgatctgtgaaggggcgggggggggggggtggtggcgggggcggggggggaaggtggatttcctgccgttaggtggagccagaggttaagatagtgc

SEQ ID NO: 4230 - DNA, 6000 bp, Homo sapiens
gatgcaatggcaagggagattttctggaggaatgttgcctggccagtctaacagaggtgttaagatcctaagcactagttctactgccagcaagccatgtggtttggggctagtttcttaacttccctaaacaccagctggttcacttgcaatgagggtgataatatttgctcacagttttgtattccttggctttcaagaaattgcacaatcctctttcctttccactaccttctcctttccctttctctgtcatttgtactttctaacgtggggctcctcaagtctcacaccttgggcttctctatttccacatgctatgctcccttggttcaaaccttgcctgcagtcacatctctacccactccacctcaatcttgcctccgtttcaatcgcatgctggacatttccacgtagacactctgccaaggcatttgaaattcaacaagtgtaaagctgaatatggatagttcttttaaatagggctgctaatctcacaaactccaaacttccgagtcctcttcaacatctttttccccactgttccttatctaatcagttgccaaattctgtggcttattactttgaaacttgtttggtcagagcaggaatggaaattcaaaagtctataataattgtgtcaggagttttacagagcaacaggactggaactccttaatatagatttattaattttaaaactaaaagacatttttgttctctaaacacctggactgttgtaattagctaaattggatctttgcttacacagccattcccattccagcatcttagatgcaaattccaaattacccaggtgcttcctccttacaagtgtcaaccgtcctttaatgcttctgaatggtgtaaaaggcacaggccttgcctttaaggctctctcaaatctctttccagcctctcttaccctcttgttccattgccattgcctcaattcagttctccatactctccctaaactaaactccttactattcctggaatcaacaggactgaccccaaacctttgttcgtatctcatctcttttcctatttttgccctattgcattgacacttgtcatatttagttgaatcactgggcctttagccttccccgctccaattaccacactcccttctttcctttctgaagccccataccactttggttgtgatatttgtatagcatttatcatggaaaacctccctactagattgtagattctcaaacacaagtattgacacttagtgggtttctgtatactagggaagtttattaaacagtctttgatttagtcattgtatggttcctgggataagagtaagaaccgtggtcccttgctctgtcaaaatcataaacctattttctttgtattttgacttaattacataagcttgttttggattggaaggtctatagagactattttagtgccaaatgctatttaatcaatgcagaaataagcccttgagaggtgcagtgactcagctgaggacacactgatagtttctggtagataagtatgaagccttggaactacttctcatatcataagcccctgggttcccaaatcacctccccaagtacctaattcatcatcctctgcatacaagaaatttttgctcattccaataaaaagaatgtagtacggcaggacaggagaagtacaggttttggaatcaaactaggtttagattctgacctggtcgctagttagtgcatgggctttggtaaacagcctctcagcctgtttccttgtctgcaaaatatggatagttatcttcacttcatgaagttgtgttggtgaaatggtataatgtgtataaagcaactggaacacaacaaatgaggccatttatttaaaataatctttagtaagttataaattcacatatttgcttttttctgaggaatgcttagattttatcatagatctcttttctaaattgagtaaatacatagtggatttctttgtttccttcccctcagaatgttgaaatttggctgattgtaactattacttaagactctatccagtaattgttcgtaaaatttcttttctttttttttttttgagacggagttttgctctcgtcccccaggctggagtgcaatggcgcgatcttggctcactgcaacctccgcctcccaggttcaagtgattctcccgcctcagcctcccaagtagctgggattacaggcacctgccacaacgcccagccaatttttgtatttttagtagagacggggtttcaccatgttggccaggctagtctggaactcctgacctcaggtgatcctcctgccttggcctcccaaagtgctgagattacaggcgtgagccaccacgcccggccaaaatttccttttaaaaaaagttattgccaataactaagtatgctggaaggtgaatgcttaggacatttagtgtcactgagctgtgtgatagagataatatttttgacactttgcagagctcattgttttctctccatataaagctatgacattcacataataaacatgtagagagctttaacagacttcaatgttaagtcttctaacagctgcataactggtcttgcttgaacctgtctttttcataatgctaccttgcctttcacaccaattctgtgagcccaagcaggaatgaagattacctatctctaatggcaggacagaagggagtggtggttaaggttactggaggttattgggggaataaatgaagacctcatgccacttctaaacactgccaggacctaacataccttgtgtttttatatccaatatgggagtaaaggttagatattttaacatcaaatatgaggatgacactagatggttttaaaagccccccaccataacttctaaactccacaatgttcgaatattgttaggtttcagtgaaatcctacagtagtcccttgcttggaatcactgtaggattggctccagcaatgggcaacacaaggtttggttctatacagtaggtatgggtcaaagaaaatgctatgattgaaaaattgctgttttcctcctcaaaaagctcataccaaccaggaaagagctatcagaaaaccttcaggaaagaatataatgataggatataacaaatacccccacagctggtccatagaccaaagtataattccaagtagggaatttcacttaacgaggtaaggcatttaagggaaaaggaatctaggctaggactctgctagccagacccagataaattattacagggaagcatgttcttgaggctattctctatgaagaagggcaacccaccttgccatctatatcctttctgttttcgacaggggtggtcctaagctggatagatctttactctgaccagtaccatataggtctgtggttctcaaacctggctgcacagtgtggcactttaagtaatcctgatacccagtcccatccccaaagatgctgatttaatttgtctaaggtgcagtttgggcctctggattggaaccaacccatatacccatcaatgatagactggataaagaaaatgtggcacatatacaccatagaatactacacagccataaaaaaggatgagttcatgtcctatgcagggacatggatgaagctggaaaccatcaacctcagcaaactaacataagaccagaaaaccaaacactgcatgttcttactcataagtgggagttgaacaatgagaatacacagacacagggaggggaacatcacacacgggggcctgttggagggtgggggttaggggagggatagcattaggagaaatacctaatgtagatgttgggttgatgggtgcagcaaaccaccatggcacgtgtatacctatgtaacaaacctgcatgttctgcacatgtattccagaacttaaagaatatatatttatatatgtataaatatatatgaatatataaatataaatatatatataagctccccacgtgattctaatgtgtggccagtcttgcaaacctcaggctatttattctaaagggtttgtaacaagccttcctcttaaaatccaccccaccaccattcagcgttttggggtctgtttgtttttattgttatcccaccccacaccgccccgaggcgcgcgcgcgcgcgcgcacacacacacacacacacacacacacacatacacacacgcacactggtgaatttctctctacagtcagtctggagtaatcccaaagtggtgtctttcgtaaataaggagaacccgggtgaagaaaatgactcccacccgaacaaggcatgaacaatgttcactccctactgtgttattcaacctgtttccccaggtctctgttttcacattagagagtgttctaggagatgacgcccttcctccttagttatttccccaccctcgtgctggcctttgacagacctcccagtagagggcccaagacgcgggtagagcaccgcgtctcagcgcctgagtctcagcccccgaactccaccgcacctgcaggtccccttggcagcactcaagcgcggggatgctccgcttagacgaactcacgtgcgggcagcaaggcctgcgatacttgagcacccctccccctctcccgtttacaccccgtttgtgtttacgtagcgaggagatatttaggtttctagaaggcaggtcatcgcaggccccacccagcagtggagagagtgagtcccagagggtgttgccagcgagctcctcctccttcccctccccactctccccgagtctagggcccccggggcgtatgacgccggagccctctgaccgcacctctgaccacaacaaacccctactccacccgtcttgtttgtcccacccttggtgacgcagagccccagcccagaccccgcccaaagcactcatttaactggtattgcggagccacgaggcttctgcttactgcaactcgctccggccgctgggcgtagctgcgactcggcggagtcccggcggcgcgtccttgttctaacccggcgcgccatgaccgtcgcgcggccgagcgtgcccgcggcgctgcccctcctcggggagctgccccggctgctgctgctggtgctgttgtgcctgccggccgtgtggggtgagtaggggcccggcggccggggaagcccctgggctgggtgggaggtccaagtcggtctctgagacacgcacaggggccggcgacttggcaggtggggagcttggcccgcggtcgtggttcccgccgtcctgtgcctttaaggctctcgccgctcaccagcatttggggctcctgctgtgtcggcccccagctgacttggctttaggggtcggcgtggagggttaaagaggccccggctgggtttgcggagcagccaagcctggcaaaatcgaaagggagggctcaaagagactgtatccttaacccccaaaaagctggtctaaaaggatgggaggccagaccgctgaccgttccccactctcgacagagtccagccgtgtggagcacacgatgctgcaaacttgcatgtcatctctttcaggtgtggcatttcaagggggcttgtgtcttgaaaacagcaactgtgaggacacttgatagtcatttccttcagttctgcttttgtctccctaggtgactgtggccttcccccagatgtacctaatgcccagccagctttggaaggccgtacaagttttcccgaggatactgtaataacgtacaaatgtgaagaaagctttgtgaaaattcctggcgagaaggactcagtgatctgccttaagggcagtcaatggtcagatattgaagagttctgcaatcgtaagttcttcatctttttagaaaagttctgggaatggaatgtatcttaaatttatttttatatacctttggagtgactagtaattgatagttctctagcgttactaaaccccagggtataccctgttggcacgtcacactccagctaattgaagacatttaccaccctgagtaggtcctgctgcttcattaagagt

SEQ ID NO: 4231 - DNA, 6000 bp, Homo sapiens
tgcactccagcctgggcaacacagcaagatactgtctctaacaaaacaatacaaaaaaactgaaggatggttcctctgaagaagaatgtgtttccttcagttagaagccagaggaccacaacagcactcggcttaattcaagtatcttaagtcaaattgcctaccttgtgcaactccctgcatataaagcttagtcaattgtagtaaaaattaacacaggacaacctcctttgtgtacacctacaaatcactgctccaattttagttccatttacctttttttcaaaattgtccccattggcaccaacatgtatgtactctggattttgtttattataaacaactacaaaatccttttgatgtatgtctaatgtcttaagcatattacaggatgaaaactctgtgcagaatccccattttctcatgagatttgtgtatttattcattcaaaaaatttctatgaagtgtctaccatggatcaggcaatattcatggaactagggggctcgaacatagagaaacagacagacaaaaaaacaaaatatttccttcatggatcttacattgtaagagagacaaacacaaatgaggtcattgtaaaatatataatgtgttcaatggagctaagtagtaagagaagaaaaatagaccaaagaaggggatatgaatggaaagggaggtaaaagtgtaagaggatatctaggaaagatctcactgagaaggtatcttcgagtaaagactagaatgaaatgagggagctggccactggggctattcaggagaaaaacaatctggacagagcaaacaagaccctccgagggcaaaggaccccagtcagagtgcaaagaatactagagcagcaaaggccattgtggccagagggagaaaagaaggagaaaagggtcaaagatgaactcagagaagttaaaggaaagcagatcacattggactgaatggatcatagttatgacattgccttctactttgaatgagataggaaattattggagggtttggagcagaaggcagtgatttcttttttcctgacaaacatgtaaacaggatcactgcaagatactagacaccaacacactcatctacagaggagttgagtttttgtgttgctgagaagtgtttattaataaaaatatatttgggaaatttatgagggcagacaagaataagcatgaaaagaatcatgaatctaactgtaaaataaatgaaacaatacacgtgcaagaagaaaacatggatgaattattgtgtaacctggagaatggtttttaaaaccatggctcctaatccagatgcaataaaagaaaagatttatcaacttgactgcattaaaacagacaatgcttacaaggcaaaacgatgccataaacaaagtcaaaagacaactgacaaactgggaggaaacatttgcaaaacacatccagaataacaatcctaatatatataaataagtctcaaacattgagagaggaaaaggcaaatatacatgataaaaatatattttataaatgttcagcgttactcatagggaatgcaaattaaagctacactgagataaaatgtctcatttattagactgactaaaatttaaaaccatgatgacagcacattagattaatgaggtgctctcacacagttttgtaggaatatatgtggtacaactcttattaaggaaatttggcaatatctaacaaacctacatatgtgtttaccatttgacccagcaatcccacttctaggaatttgaactgaagacatgcttctaacagcagaaaaataaatattcacaaagttactctttagagcattaaaaacaaccaaactgtccatacatagggagatggttgaataaactatggcatatccacacagtgaagtattgcatgcaactgtaaaaatgaatgaggaatatttgaatttgtaggaaatagtggattccagcatatttgttaagttaaaaaagaaatgtgcaaaagaatacctatagcatgcttttaaaatgtaataaaaaaggagaactaagaagacaaatgtgtagcagctcatttgagcaaaactaaggacaaaccagaaactactgaaattgagtacctatggtggagaggatagaggtgatggagagaagtgacatttcccttttattgtgtctttttatatcaatctgacatttgggactacgttaatgttttatttaagcaaaaaaaaatcaaaaagattgaggggaaactaaaatagaatacaaagagaaacaaattaacagtattttgaatgaataacaatcacactgaagagggggaataatctgagtaactttggaacacaacaatgctgtttttatattttcgggctataaacaaaataaaactttaaaaacgagtagatttgatttccatcatagtatagaaatagcaattttaaacttctttctgtgtattctaggattaagcaaataagtaaatatattgtggatctaggtgtctcactgttgaagaagggagttacacatgcagaaagagggaaggacagaatgaactctatgctaacggactgaaattggaagaatcactgtgaattcatgacatatataaatatagatatgggaatggatatacatatatatatataatacatatccttgctctgtctgctgagagggtgcggaaacaatgatactccaataaaaatgaacacacttagcatccaattctggcatctaaatgccattctctgccagaaagaaccagcattccttggagaaacagcaaattccagtgtcaggtctagaggtgagtctggagcatttttttttgtgtgtgtgccagaaagtaaggaagtgctcaaagaacaataagaacaagtcaaaatgacataggaactattttgagggctcccactggcccgatcagggagaatttaagcatcaaaataaataatggtagccatgaattatgacccattgagtaaataaataaaattcatattgatatagtttatgctgatatagataaatgaataaataaatagagaagggaaaacttttatttacagtaaaatgccaacagatgaatatagaagtaattattaaattaggaaaaaacaccctttgacaaccatcatagtaaaaattgattcaagaaaggatcatcaatagacgctaaaatttgtgggtaaaaatttgatgaaaaaatgaggaatttacatagttttaaagtatctccctataaaatacttattaattacaaagggaaaaatactgagtctacactaagaaacatggcaggcaccatcttaactaagtgatcaaagttaccaccaccagtaataggacaaatagacaacatatgcctccccgtaaggataagacatcctttctggtattcctgtcaaataattagattcaataacctgaatctatcatgaagaaatgatagacaaatccaaattgtggggtgtgatcctgtctcctgacattaccatccacgtatactgccctcctacactgaaaagggctgatctgtacaatcaattggatattctggagttaacatattgtgatttctgaggacaggtcacaaaggacattatggcttcttctttcttgttctcagagacgctagctggcatgtcacgaggacactcaacacacaagcagcgagccctatggcaaaatccacgtggtgaagaatgaagcttccagccaaaggctggtaagtgagccatcttagatgtggattcgcctatcccagttaacccttcagatgactgcacctccagctggtgtcttaactgcaatctcctgagcgatcccaagccagaaccacctgaccgacccacagaaactgtgagatcataaatgtttattcttgctttacaccactaccttcagggtaatttgttattataatagataacggacttaaaagtcattctccaaaaataattgtggtgtattcgtcaaaaatgtaaaggtcatgcaataccaaaaatgctgaggacatttttccagaataaagaactgggggtggggggaaggcataatgatcaaacacaatacatgatcctgaaatgattctggaccaggaaaaacaaaggttggtttctattgttgttattgtttttaccataacacaggttattgagatgattgtcaaaatttaaatacagatggtagcttatagtcttgtgtcaatgttaagttcttatttttgatcattgcactctagttatggaacagaaagtccttagtgaaccatttagaataggaataaatgctagatggttccaaagtaataattatataattataattatataatcacatatatgtacatatatgtctatagagaaagaatagagaatggtaaagaaaatacagcaaaatgttaacatgcagagaatctgggtgacaagtatatgggaattctctgcagtactcttgaaacttttctgtagagattacttcaaaataaagaacagagcagaagtggctgctgttcctaaattccctaagtaaacttacactgctttttcaaactgggagatgaatccactaataggttttgaaatgagtttggtggatttctaataagaataggatagcctagcctagtctagcataacacagcatggcacagaggacgaacattgtagattactaagggtgagtactaacttgtgaaagttttgtttaagttctagtaagagaaacaagtgagtgtagtgggttgcgtggtcaaaaaagtggggaagccaccgcaacgaggggtgagtctgagccaaagagtggctcagagctccccgcccacctcgtgccgggccgtccctcccgcttgtcccaccctcaccggcgccgcgtcagcccccaggccgcctgcaggtgtgcgctcagaactagcacgtgtgccggacactatttaagggcccgcctctcctggctcacagctgcttgctgctccagccttgccctcccagagctgccggacgctcgcgggtctcggaacgcatcccgccgcgggggcttcggccgtggcatgggcgccgcgggcctgctcggggttttcttggctctcgtcgcaccgggggtcctcggtgagctgggagggggagcacggaggtggggacgcgtcccgggcagggaaagtttctgtgccgcgatgcaaagcagggggccaaaagcgagacggtgggggcagtgctcgacgcgtgtccgcctcccgctagctttgagggaccactgcaataaaccgcctggtcctgattgtccccactggcccctccgggagctgggacctccagaattggaggctgcgccacagaggggcgctgtctggtcggcccggtgtggctggcggcgtgcgggtgctcgcggtctcctgccgggctccccgcccccaggattctgcaggtgctcatcgctctctggccggcggtcagcgctaccgctcgccacgggaaacctacccactgcatgaggcaccagctagccacgtgaggctgtttctgtacacccgaaccgcgctcttgcccagcaaaagcggcagaacctcggctcccttccctaaataagagtaagacctggttcccaagcatgggtctcagattttctgaactctaatgtgatattggtagagatcctaaacattaaccatccgtagttatttttgagacatggattaaaactattgttttcttcttgttattaacctactgtaatggtgtggacgtccgcaaaggtctcattcaccgtttattatatctttttttcctccagattggcttgattttaaagaaagattataattaagattagcgtctcttggctacaggatgggtctaagtttctaattatctccacggtaccgtgcattcctagtttataagacgtttactgtgtgcagacctcaataactgggtgacttttggcaagtcatttagctccctgatcttcagtttcttcatctgtaaaatgaaactagtgattaactg

SEQ ID NO: 4232 - DNA, 6000 bp, Homo sapiens
aagcatgctgctgacttcttcctgccttctggggaggccttgggaaactcacaaccatggaggaaggcaaaggggaagcaaggcatctcatacggtgggagcaggaggaagagagagagggggcaggtgctacacacttttaaactactagatttggtgagaactcactccctacatggtaccaagctaatccattcatgagaaatccaccttcatgatccaatcacctcctagtaggcccctctccaacactggagattacaatttgacataatatttggatccaaaccatatcaggttgtttccatctctttactattgtgaatagtgcttccatgagcatgggtgtgcagatgtcttttcagacattgcctcaattcttttggatccatacccagaagtgggatgctcttcagcaccttttattcgtgtacagtcagcaacactttcatttccccacattgtctgttcactcacctcgagccatctactctattctacattcattcattcttccttctattaagggatgatgaaaacatccgaaggtaattctcttaacttcctctccctccaccttccatcctatctacatccactcacccttaccctcatgtctgtcttccacttttcacagcctatatctttcactcttcatccctttctgtcttttccaggacattgttccttcagttagcccctctctcatcattggctccttcgttccacctccaaaactcctgaagccaagacctgctgagctgcatgtgacagaaatccacctcacactggcttagaccaaaaatgaattttgctaaatcacatgacagaaaagtccaagcatgtagctggcttttgtcaaaacaggaatagtcaaagggtgccttcaggaatatcttctccttctgctttgcctggctggcttcattctctggaaaaaactccctaaaaactggcaaaatatttactgatgatgcaacatgcacgtctcatcagcttagccttccagtacaaagagcctctcgtccaataagtctttcaaaagtcccttcaatagctttcattctccaaatagggttacatgcccccaaaggaaacaataactaggagcaggacagtgaaataaacacagggcaaggcctgagttgcctgcccagccttggagatgggggtagggttggtctacctcattggttctcaggtgggatgattttgccctcccaaggacatttggcagtgtctagagacatttttggttactacaactgaaggacggaagggcttccagcctctagtaggtagaggccagggatactgccaaacatcctccaaggcaaaagacagccctccagaacaaagaattatctggtccacgatgtcaataatattgaggtcgagaaaccatagtcttccagaatcacactgaactatgggaaagaggggatttcccagtggaaaaatctaggggcaaatcccagaggaagggacccatttagagcaacagatatccaccttcacctccatctgaaaaaaatcttcccccaaaccatctatgtttctcgtttaaactacctctcttacaccaaattttctgaaagagtggttggccttagctgtctcaaccactgtagtcattcattcaagtgatgataattatggagctccttctgtgtgctaagcattattttaggtcatgggatttggcagtcgtaaactgacatgttctcatgcagcttttattctggtgggagagacacacaataagcagattttcagttggtaataaaatgaaaaaatgataagtataattttttaatctatatgaaacaggcaaaaaggaaaggaagttctgaattaatgtgcaattttaaatagtggccaaggaaggctccattaagaaggtctcatttgagccaaataactcaaggagatgaggtagtagccatgcagagcgatatctgggcaaagagcattctaagcaaaaggaatattaaatgggaggaaaaaactgaagagaaaaatacacctgctgcacttggagaaataatttgtttgcaagctgatggtaaaaatccagcagaaagaggtgtatgatagtgctggaggaagtgagaattgctggtttccttgagtgagtgagagcaaatcgaatctagggcacaagtggagagatcacccttagacttagactgtgaacagtataattatattaacaggagagacggaggtttcatgggccaaatacaagaatttgggtggagtgatggtagaaaattgtagatctatttgattgtttctattttctcaataaagaaagaaacaaagccattcacagaaattaagaatgttggagaaggtgtcagaaataaatgtcaaaataaaaatatgaaatagtcatttaggagaatgggagaataaatggattagacaaacaatagtgggaatgtcaggcagaagtataatggtccatttgaaattatttgttactaaagtaaggctagtcattgtggctatgtgtcttttccagccacattcagtttcacaggtatgagagcaaaataatggagaattgattctaaccaggaatgttgttttgtctaatggctataataacccaagagaagggtgagggagctaacagtgggtgcaagatggtgattataatgacagagtatggaatttaacctggtagtgatgaaagtgaagacacaaaggaggtgagaagctgagagagatagcggtaggatcaatgggctgcaggcactgagacagacaaagattgctggattcagtttaacgttactagggtaaaagaaaagagttggattggtggttagagagtgggatcattgaaatcactgagaggttgaaagtgacaagtctccgagcatgcacatgagcattagagtcagaggagagtggaggacaagaccacaggcagagaagaggtcaaggcactggaaggccagggatttgaaaatactattgctgtgaatgttgaaatcaccaggaactgtggcagaagtaacagtggagaaggtggccatgagccaggagctcaaactttcaaggaatgagggagaaagtagatactaggagatggataccagcagaagtggtaaggagtggcaccttctgatagcatgtgatgtaaaactggggaaatgagccttctcctcttctcttttcctaagcctactacaatctggctgctactcccattactctgttgagaataacttgaaatgatgatagcaaatccttaaaagaatgtcactggatgtactaaaaactgtgataagtgatatgatcaaagtagacatttcttccactagaattttgggaggaagcctaatggaaaccaatgcgcacagaaagacaaatgctgtatgttattagtcatatgtggactctaaaaaactcatctcatagaagtagagggtagaatactggttaccagaggctggggaagggagagacaatgggagatggagagagattggttaaagggcacaggatcacagatagataggaggaatacattcatccttgaatacttaaccctctgccctaaatctgtcagtcctacatccatacttcttatttcagtaagtagcaccaccattcatttctaatcctggggctaactcttttttttttttcttttctgaatcatgtctccttttaatggttaaggaaaacaagtttaacataaaattagcaacaacaacaacaacaacaacaaaatcaaggtttaaagtcaaaattattttaagagaaaaacccaggcaaaatagcctacctacaggcaggcagtacatgtcagaaggacaggccacccccaataaaaaagataaaatattattttttctaccttttttaaacttaattatttaattatttctttcttttttcttttttttgtttcttttttttattatactttaagttttagggtacatgtgcacaacgtgcaggtttgttacatatgcatacatgtgcgacgttggtgtgctgcacccattaactcgtcctttacattaggtatatctcctaatgctatccctcccccctccccccaccccacaacaggccccggtgtgtgatgttcctcttcctgtgtccatgtgttctcattgtggaagctggaaaccatcattctcagcaaactaccgcaagggggctaactcttgattgctttcttctcaccaccaaccttaagaaaggaagtaaccaaaatccaatacatgagcaactgttcattccatctccaatatctttgttaattgtccactttatccacccagtcagggccgccatcaaacctcacttggatgtcggcaaaagctcccctgactggtcttcgcagtccattattgccctattctaatctaccttccatactatacacagatttacattttttaaatgtgtatctaattgtccctcccttttaaaaaatcttacaatggcatgacgtctcaattcagggtaaggaaattgtttcttcacattccctgtacaccgtacacatcgcctgcaattgcccttcaacacggagagcaggcatttcattagctgaccttcccacacacattcttgcaaagaggaaaagttaagcagggtgtttggaggcgagctgccatcatccaccgcctttgtctggaagcgcagggcctcacacgcgggatccatcggaagcccgagcattgtcaagctctgctgctgcacctgggtcagcaaggtgggctctgccagcgaaactcgttagaaacaatgcaaatggggagtaaacatgacctcgcccatgaaggggaagctgtggtcaaaagcattttgtcccggaaccccgcagccctccccacactctgggcgcggagcacaatgattggtcactcctattttcgctgagcttttcctcttatttcagttttcttcgagatcaaatctggtttgtagatgtgcttggggagaatgggggcctcttctccaagaagcccggagcctgtcgggccgccggcgcccggtctccccttctgctgcggaggatccctgctggcggttgtggtgctgcttgcgctgccggtggcctggggtgagaggcgggcgggcgtggggaggcgcccgggcggacgaggaacccggggccccgcagagaactcgcgtgcagcgctgagctgcgctgctctgcgcgcccgggtccgaaggcagcgcgatgggtgggctgagcgcgcgacccggcagggcggcgggtgtaggatccttctgcgcactggagaccctcgctgcttctgggtaagcgtggagttcccaggtgcaggggcttaagtcgtgacgagcgcagtggaaggcgcagatgctgagcgggtgccgcacgaaattccttgcctttgtgtattcacagcctcggctggctatagccaagacgtggcgttgatcctagtgaaagggaacttggggatccgacaaacctgagttctggtcctagaaacttaactgtgaggcaacttagcacacctgagtctgtttgctcttctgtaaaatggggacactggtatctctgcatcgtggagttgctgcctcagtggcattaagcctgtcgagtatctaacacagggctatgtgtccccgagtccatttctatcccccaaccgttacctctgtactttgctcccaatggtgtttagacaagcagtcctagggatgcaggtgttacctgacaactgccccgcatggaactgtcctcgccccccacaccaagccaccacggccatcatcaccatgcacttaattgacagcatactttaagacagatgcatgccaggcacttgcggattagaagagcaagggaagccccagaacatgcaatgtaaccgttgcaggtagaagggacagtagatatgtttacagttcgcattttagtgatgtgtttagtacaaaataacgcctattataattattatggaaattttgaggccacatctcttcctttttcttaac

SEQ ID NO: 4233 - DNA, 6000 bp, Homo sapiens
ggaggtttccttttatggggaaataaaaccaatgaacttcataaatcccaaagggaaattgtgtatcttagaaagtaaaattttagatggaaattatctactacaccacacttgtgggaattgctatactcactctactgtttgtgatagggttatacatggtagcaccttctaactgaaatattggacagaaagtttccattgctgtatatgttgcttaattattatccttataggagggataatagttactgacaagaaggaagcatcaaagttttactgagtctgctaggactttttattgggattagtgatgcacttctaaataaaacatgctgcttctggattaacacctctactaaagtacaggaaaacctacagttacttaaagatcaaatcaaaatcattaacaagctcaggaaaaatgcaggctttagccctgggtggctacagtccctctttaatgaattccagtcttctttatggaattggttaaaccctttattaagccctctcttgcttatatgtcttgtattaatacttgaaccctgtatactcaatactgtaactcaaattgtttcttctcctctagaagcaaccaaattccaaatgggtgttataaactggatcacgcgtggacacgccctatttccaagaacccttagacagaccccaggaagagccctagctgctgttccccattcaacgtccattttcagcaggaagtagccagaaaaagtcgtcacccaataaccccctaacagcaattaggttgtctccatggggggctggggggaatgtgataggagttactaagaaattattttaggcagatagagaggaaaagcggtccttggaaagttttcatttcttttaaagcagctccagaaaagtttcttgtcaagaaggaaagcccaggcccttagagccaagcaggcaaccttaggtatgcagataccggccattagaaattgggtctacccaacatgatgattcccatggttgtcctcttgcccttgcgctgacatgtgcctggcaacatggccccacctatccccacacgggtagaacatcatggtgccctgcatttgcatattaatagactagggtggcaaggccagttttttcccgggctatgtgaatgacatgcctactgaaaccaatccgctgagccctatgcaaatcaggcaccgcctcctccagcctatgtatacctggctggtttctgccccacttgaggtctccactctcagctttggagcccccgtctctgtctctgtacaggggagcttcttccttctttcttctcccttcttttttgcctactaaactctccactccttaaaaccactccacgtgtgcccatctcgtttttttccaattcaatgcgagatgaagaacctggtgttccttcacacattggagccctatcagcaggggctggacaccaattgctctctgaagctattcctagccctaacattctttgttttgtttgctgttttggcacactaagtgtgtaaagtttatgaggcttaaatgaaattttctgtctctaccattacaatgagaaaggagtaaaatatttttattttgcaaatctacttatggaatatagtttctaatatacttatgttttaaaagccttcaaaagccaagaggaaacaaaatactacccattccttctgagaaatgcacttctttctgtacctgattgttctcataatccctgtgttgatatgtaatgccacaaaaatgctcttgatagtaacaggaaagaggatcagacacagctaaccgtaaaggtcagttggctggcaggtgcttagtagatgcaaatagaggcccattcatgctactacacctgctcctgaaaagcataatgcaaatacagtatactaatttaggaggcaaagaaccatctaacatcaaactttaaaagagttggccacagtttaatgacatccctgcacaccagcctccacccacactgcccttcataagcccctaaaaggagattccatagttctaaacctggtctacaaacacacatatcctcattctctccttttcttctctttggcagtttggcaaaatctttagggggagttggaggaaacattagtgtttaatctcctaaatccccttcattcaaagctttggcttcaagttctacccctgttaaggcctcaggaagttcactgtcgacaccctccctttgaactcagtcactaaaatgatctcaaggctaagggatagaccacagctccacttcacaagtaagcttgcaacacctgatttaggaaagtttgctgtgcagacagttgtagctcatcccttttacagaccaatcttgatttgtttcctagggttaaaattatttaaatcaaaatctctcagaactttgtgggcatttggtaaattcatgctgggggagaactggcagagacatgttaaatgcacttgaccacaagaaccatttatttcatccaatatttaccagttattcattgtacacctactatagattttggcactgtagatatgagaaaatgctatccctgactcacgaaacttatccaaaaagtagagaacaaggctcagccattcaaataaagcctcagttgaatcaaataaaaataagttttaaatatttaatgtgaaagtcttcgagtatgttaagaatggcttaactcagggatagaaattttactgattgaaagaaaatttcaacaaaataccaatctttgaatctaatttgacacccgaaactaggcaatcaaacattagcactattttttcttctatagtttataataaaatttctcatgagaaaaaaagacatttttcttccaagcctgaaaatggatggagaatttttaatatttattgttgctgagaacagtaaatagactatccactttcacaaatgaaggctggctttgagccacagaacatatctgttatatcactctttgacaccatatattaacagaaataataattttcccgcattgagtttcctatttaccatctctttaattatacccgctttaattgctgtcatggagtgttgaattttataatccaagatactaagatgtttatctgatataccacctccacacttaatgtcttataatctctgccaagaatttaaaaatttttgttggtcggacaggaagaggaaattccatggtttggtgaacccagaaattgttcagtacatctcggttataaaactgtgttaaatacacttaaactctataattctataagacccattttaggtttatacactgagcatccagttcctcaccgtcctctcataggttaaccctgtgtaatacaagttctgctcccataattctatgaacaaaacagcccttgatatataggtttgattttttaaatacattttctttactttattctaaatgtaacataaggtcaacatagaaaactgaaaagcataaggaaagtgaaatatctgtaatcttatcaaccattgttaattttgctgtattcctagtttctttttatacatatcaatatggtacttttgttttaataaaaggactgccaaaaggcacatgccagtttggactctgctttttccacttacaatgatatcatagtttctcatatttggtattcttttgcaatatttgctgcatagaattccatcacacaaaggtaactgccagaaattctttattacttttgctagacacttagggtttacattttttcaaaaattaatcacatcagagttttgatcacatcagagctttgatcacagctctgatgatttctctgggaactgagagcctaacacaagtcatgtccactttaagacttttaacatactgaaaagttatgttacagagtgctggtccccctgcaacacgttcactcacattggctgacgttttaattctttgccaatctgaggggaagaaatgtcaactctttgtttgctcttttaatgtcagtcatgtccttttccttttaccggtcattccggtttactcacaatcctacaaatcaatcctgctcattcttaattttccagtattgttcctcagattgtttcaccagaaaagttctcccccttatccactcttcacctaacaatttctacccatccgaatccttctgcatttattgcttccaggaatttggcacttaggacacccttgtccttacattgttcatgcatgtatatttcgtcttcaataaaaaatttagttgctcaagggcaagggccccatagagtctcaatattctaattgcctggtgttgcttaataaattagattcggaagggtcccctccagggaggggagcaaagggcaaattaccttaggggctgggagtgcagaagccaaacctttgagattgtgaaaacaagacggccccgagacgatccagtagcaggcattcaagcaagaaaaactcaaatattgttcccaataatgcctgactaatgccaaataccaagtaagggcccaggcagtcctgacagcctgcagtgccccaggataaaactaaccctgaggggtgctagcccacggtgaccccctgtctagactctggatctctatttttaggtcgaagtgctttattcttgactcccgaattcccggaaactattaccaaagcagcttagttttctctccaccctgcctgggtcacaaatatgacggcgagccagtcctttcccgcaggacgcctcaggcttccgggatggtaggccaagggcttagcaagaaaaaaggcggcctcggggaacctgttctgttaggttccgccagggcctccccctgacctctcgaaggccaagggctgcccatgaacgccgaggctccgccccgcggcccgccgattggccccagccgccctggtgactcgacgcacttccgccccgggcgcggctcgggccacgcccacctgtcctgcagcactggatgctttgtgagttggggattgttgcgtcccatatctggacccagaagggacttccctgctcggctggctctcggtttctctgctttcctccggagaaataacagcgtcttccgcgccgcgcatggagcctcccggccgccgcgagtgtccctttccttcctggcgctttcctgggttgcttctggcggccatggtgttgctgctgtactccttctccggtaggaccccggggcgggttcgcgcgtccgcggcgagactagagctctcctcagtcgggcaagagtcgcggggcggggctcacagcaggccgtgcctgtttggggacagggttctctgaggggtgcagtgctcagatcccgggggtatgtggcggggaatgcggggaccacgcagagcccgaggtgaagcttgtttggtggcgtcgtgtgcgcggccagcatttacgcaggatctggctgcgtccctaaaaaaagcgtgaatcgtgttttcgggattgagccagtcggccaggggagcgcggactgggcgccctaggtgagggcttgttctggagtgcacaggtgcgtgggagtgttgctagggcccgtgctgtgtccgtggtgagagtttgccctgtgttcccttggtgccttggtgagtggggtgttcattagggcttggacagtacccgcggtaagggttgcagtgcgtctgctgtgccccatgtgctgggctgggcgagcaggggcctggccaggtgttgctgggagcgtgctgtgcgtaagtggcctgtgtgcagagttcactgtgggcaagacagctcaactgtttgctttgaatggagtgagcgcggactctggggctagggagggcatgttgagtgagagcaggctctcggtgcctggggttagagaggtggtaagggcgcgccatgctttttgtgccttctgtgaacagtctccgtgttacctgagctcctattagtttgtaaatggctgcttttttggggggtgggtgggccatcgagtcttcttcctgttcccaaccaata

SEQ ID NO: 4234 - DNA, 6000 bp, Homo sapiens
ttctaccctcagagggcttatcatctaagcggcaaccctgacatgtatcataccaattttaacccaagcagagtagggcaggtgccattgcagagatgcaagagctttggaagaaaagcgaaagagtcatcatttgcctgtagacccagggaaggatgctcaggagaggagagtttttaaagatccagctcaaataaaagatgaacatctcgcaggctgcaggaacaatgttgtccaagacacagcagtgtaaaatatctattcctggaaatactagcagtctggtgtcttatttttaacataaataaatactaaagcagcgagtcttgcattgattcatgcctgtgagccagtccatctctatggtcctataatttccattccctccctccagccctcattcgctgatcaggagcacattctattctctgttatccaacctccaactggagatatgttttgaaataagtgatatttgctctttggtggcccctcttcctcctcattatctgtcctatcatgccttcaaggccttgcacgatctgctccttttcctgcctcaccagctgcatttgggctactctccccactactctacctgcccagtcacaatgcactactctgtctttccccagtaggtatggctcctttccaccccagggcctttacacatgcaattttttggttggtttttctgacttctcatgtagccaattctttctcctgattcattttcccttccctcttccaccctggcacatcaccatgtcttgtcatttggctgtccagaaagctcaatctggagatctaattaaatgtaaaagacaatacagaaaggaggtgacgcaagaatctgctcttaaacagaggaaggattgctctgtcctcatgagcgcatctcccttttctcctccttataccaaaccttaagaggaccgcttattttgtttacttggaggggtaagcgtggtcggatgggagtggtggatataactatcaggttctatatggccactttcccctttgccaatgtcacctgtgacattgcaaagctgtctcatcatttccagtatggattttgtgtaggtattcaaatctctgtgttttcttaattctaccacacccaccactgacgcctcccgaatctggtcccactcatccttaatatgcagattctactttttctataaaacctttcctgatatctccatcctgcagcaatctttccatgacccctatctctgggaacaacgtaaattaataataccttatttagctattgaatgatctccaattgttattctgtagcttgtcttgtctcctgtcctgggcacatagttgatgtttaataaatatttggtcaaattgtcagttgagaaaaacatagagataaggccattaaaagaatatgaactgggcaaaactgcaaccacgcatgtgcacgtgcatgtttttgtgtatgtgcatgcttatacctgtgctgtaatgacaaaagctctcttccacgtccttgagagacattactaaatgccccctcagttctctagtcatctgttctaatatttgagcaatgggtgctctgcctcctcgctaggcctccaatgattagcgtatggcccggtcagtgcttgcaaggagatctggcttctgacctcatcattaagaggcaatgctttctcctctggcaccagacatctgctgaacctatttctgtttccacagcagagaattcattcctggttctgtggcttgtccagcccagcagggtgcaggtgaattggagggaatgggaaagaaagaggattctggtggtctgatgacaacaggcaattcctttccgattcatcctttcatcagagtgacttacaaggtgcagagttgactgattcatacacttggacagtaaaaattgtatgaacataggaactaggtctggtttcagatccccaatacttagtatacatcagcatttgataaatatttaaggaatgagtatatgtatgtgtgtgctgggaaagtcttcagagaagcagaattcagcttcctctagagataaactttgtaatgtgtgtcaatgcccatgggcattatttggcggtcttaggctatgataaactccccagctccagagtgtgcaaacaggaggaggacagcagcttagtcggggatgctctacccagagagtctaggcaataaatgggatgttgtatcaataacaataatatgctattattcctactttcaatactaataatagttaccatttattaagtacttacttatgtaccaataattagcaaatcatatcttacttaattatgatgactatcaaaggcctttctacccctgagggctgataaatctatcaggtccaataaacatttgcagagccaggcacaggaggaggatggaggaaagaaaaaagaggggcaagaaatacaggcagaatcacagcccttaaataactatcaatttaaaaaaggagacaggaaacaaactagaattcaaggcaaaaaaagattaagaactaagaagagttgtagacaaagagttttgggaacactccaaagggaggagtgatcagttgtcagtgggggaggaaatcttagaaggctttctggatgtggaatttttgaatctatagaatttctataggtggagaatgaggaaagggcattttcttaaccaacagatcaggataaacgacggtcaggagttttggtgtgagtgttatgttagaaataagtgtttcatatggtgtggctggagtgtcacatgggtagaaagagagatgcagtggaggaaggatagctttgtgctagatcctggaatgctttcaatgatgggctgaagtgtttggattttattctgtagacaatgaatgtttttgatgaggaagcagtatgttttattgaggtaattctagaatgaaagttacattgtagactgtcttagtctattcagggtgctgtaacgaaataccataaactggcaacttgtaaacagcagaaatatatttctcaccattctggaggctggaaggcccagcaaattcaatgcctgatgagggttcacttcctaattcgtagaaggcaccttctctctgtgtccccatatagtggaaggggcagtgcagctctctagggtctcttttataagggcactgattccattcacaagggctccacactcatgacttcatcacctcccccaaaccccatgttttaataccaccacactggtgattagctgtcagcatatgaatttggatggggacataaatattcagactatggcagataaagaatgatcatagctaaaatttattaagtgcttaccatgtgcaagccactgttctaagcagctgcattctgtctcgctccaccctactagtgtgtgaaataagtttaataattatgccattttacagatggaaaaactgaggcatagaaaggttaagccactttcccaaggccacatatctgtcaatggaagacccaggaatccaacctagaagtcttccccagagccacttttaactatcctactgcaccatctcaccctatcctatcacagttctacctgggtgggaggttgaaggcctgaactgagatcatagaggtgaatatttgcttgtatttgcataaagaaataccataataaaagtggtcacctatagagggcaatgtcagggtcaagggacagataacgagtagaagggggtaacacatctcaatgtatgccttttaatatggtcattttcttgccaatatgaatatgttatttattcaaaaaacaagatgacacaaaagaaatggtacaagttaaaagctaatttcaaggaacaaatggaagtgcataagagctggatgggtttggaagacaaattaaacaggcaacacaaacaaagcaaaccctggagtttctcagttgagtgtttggaagatggtagctcattagcctagttggggaaaacaggagagtgggtttgagggtggccataacacattcagccttgtttgtaggtgacagtgggcatttggatgttgaggttgagcatgataacccaggtggggtgttgactgaggagattcttatgaagatggtaatagactctgtgagtagatggtaaccttaaggagagagtagagaaggagaaaacaagagagcagatgacagagtttaaagaaatctgcactaaagggactgccccagagaagctaagatggagactgtgaagccttggtcaagggccaggttggagagatgagtacaggaaacagagggagcacagagtttccggaggaggggaatgatttcctggggtctcataggttaggactgagacaggtttggggaccagaatgctgagcttctggaggaaaagagacatatcaaagatactgagtgagaccgtccaactgaggggccccttttgggacatccaaggccctttctcccagttctgtaagagataacaagcaaggtggacactgtcttcagtccctacatgtcagccagtgtagatgttctgtttttcagggaggtgtttttagacaacatacaccagcacctgaggggttaaaaaggaaactgaggcagacaatcctagaaagcttctctgatttttttctgtcatcacccattcaggataatgggaacttataatttgatgtttttgtttttcattcttccgttctgtctttccatcacacacatcaatgcaaacacaatttcacatacacatgcacacagactcacacacacacacaccaggcaaaaatgcacaagcatttttctggataagactcattactgcacgctgggagggagggtgagcagagccgaggaaaggaaagagagatgcaagccaccctagctacttttactcccctttaaggctgcgtggttacggtcctgggaaagaaaactcctgcattcctcccctttaattgggtttattgttaaagcactggagcagctaatcctcacagacctgtaggagctggagtgggagctcaagcaggattcttcccgagtccctgggtaagacaaccctgcttcttttcttggctttagagggtctccttgcttaatgggaagcgtgcagcacctagtgagtggatttgaagagccactttgtaagcaacttgggcatttatttcagccccagttccagtcttccctgactcttttggcatcaagggtgagttatagctgtcttggaaaataagtctgaatggggggtccgggtggagctatctgtccgtcactcctgggctggctttcatggaagcattttgcccttctgggcagggaaaagggagaaaaatatcttcatgtgcccctcctgcaatgcctgcattctagggacaaggctctgtgcctagagggaccccgtccatctgctggggtgttaggacctccaactctcttgcacccctccctcctgctcaaccttcatctcttaacctctctgaccccatccatcaaataaagtatgccctctctgccgacctctttgggttattgggaggattagcagaaccaatggcaaaaagatttgtaaacagcctgtggctctgcaagcctaaggaagacgagtcagcctcagtccctcctggaggagtctgtggacaggcttcaggctccctatcctcagccgcgttaagatgcagaacgcagccgagctatcgctgtcagtcacaagacagcttccttcaccttccccaggggcgcgtctacctcccttctgtttttaaacttccctagtttacctctcaagtgaagatcttaaaaggaggtctggattcaccaccaccaccacccccatccacaccatggccccttctctccacgtaactttgacgcacaaacattaaccctgaggctcccggagatggctgccagggctcacgctggtctggctgcagtgcttgtctggccagcctcttgctctggagtcagataaattgatcatgaggaaagcctctgagaagg

SEQ ID NO: 4235 - DNA, 6000 bp, Homo sapiens
gtcaaactttaaagctccaaaatgatctcctttgaatccaggttacactgatgcaaaaggtgggttcccatggtcttgggcagatctgcccctgtggctttgcagggtacagcctccatcctggctgctttcatgggctggtattgagtgtctgcggctttccaagcagatggcacaaactgccagtggatctaccattctggggtctggaggacattggccttcctctcacagctccactaggcagtgccccagtagggactctgtgttgggtctccaacccgacatttcccttccacactgccctagcagaggttctccatgagggccctgccctgcagaaaacttttgcttgggcatccaggcatttccatacatcttctgaaatctaggcagaggttcccaaacttcaattcttgatttctgtgcaccatgtggaaggctcaacaccacgcggaagcttccaaggcttggggcttccaccctctgaagctaaagcctgagctctaggctagctcctttcaggctcctttcagctgggacacagggcaccaagtccctagcctgcgcatagcacagggaccctgggcccacccatgaaaccactttttcctcctaggctccaggcctgtgatgggaggggctgccatgaaggtctctgacatggcctggagacattttcctcatggttttggggattaacatttggctccttgctacgtatgcaaatttcagcagctggcttgaatttctcctcaaaaaatgtgtttttcttttttacatcatcaggctgcaaattttctgaacttttatgctagttttcccttttaacatggaatgcttttaacagaacccaagtcacctcttgaatgctttgctgcttagaaatttcttctgccagataccctaaaaaacctctctcaagttcaaagttccacaaatctctagggcaggggcaaatgccaacagtctctttgctaacacataacaacagttacctctgctccagttcccaacaagttcctcatctctatctgagattacctcagtctggaccttattgttcatatcactatcagcatttttgtcaaagctattcaacaagcctctaggaggttctaaactttcccacattttcctgtcttcttctgagccctccaaactgttccaacctctgcctgttacccagttccaaagtcacttccacattttcaggtatcttttcagcaacagcccactctactcgtaccaatttaccgtattagttcattttaacactgctgataaagacatacccgaaaccaggatcaaagagaggtttaattggacttacagttccacatggctggggaggcctcagaatcatggcgggaggtgaaaggcacttcttacatggcagtagcaagagaaaaatgaggaagaagcaaaagtggaaacccctgataaacccatcagatctcgtgagacttattcactatcaagagaatagcacaggaaagaccagcctccatgattcaattacctccccctgggtccctctcacaacatgtggaaattgtgggagatataattcaagttgagatttgggtggggacacagccagaccctatcaattctcatgtaatgcaaagatcctctcctgtttcaacgttgcagtgttattctcccaggaaaggcagaacctctgaacacagtgtttacctactttttactctgaggtttgcccaacaagatttcattttcaaatgggagcacttgcttaacaaatctactaaatagtcatgaaaagcactacagctgccaccttctaaatgacaggtgtttctttcatgatcaacgttttatgccaaatgcaaggaacttcccctctggctgcccctcctcacatttttgccatctcctatcagtctccccagatctggcccatccttcacagtcccattcttgttcattcagcccctatgttcttctcactctgttgcttgtgcttgattccatttattctggtgagaatgatcaaatcagagagaattcctggctgggctctaatactcacctccagcagtgaaaagcccattctgtgcaggtaggctccaggtatctgctgaaagcctgctctggaatgggaatggtcagtgtattacaaaggagggtgcaaggagtggagtgaactgttcactgtttttctatggaactttaattcaatcagggaatacttgacttgaaacaaatgctagctgaaacagttgtatttcattttgtctttattattttttaaaactttgttgacaaccccagaaagaagatttgggggatgggattgatctgttctgaccagaatgctgaatcccagtgatttccccagattaaaccaggctccaggaagacagcaattttctcattgctgcagtatctcaaaaacactaaaacagcaagtttattgaatgcctattttggagcaaggctagtgggaaatggaaagagacaaagatgaaaaagacataatctatgtcctccaggagtttacaagctaatgagagaaccagccatgtaaatatggacacaaagtggattagatgtttattatataatatggtcaaagtgtggtccccatgggtctctgagaccctcttgaagggttgaaaggtcaaaactattttcataattatactaagacattacctgacttttccagaggctacaggatgtatgctaatgccactgccctgaatgctaatggaatgtatgcttatgtattcttgagctttagaaaaaaatcctcagtcttaatttctaatgcataaattgcaatagcaatatcaataggtaaaacctacacaggcaaaagttctttgaggtccttggaaattattaagagtatacaagggtcctgagaccaaaaatttgagaactggtaagatttaatgcatcaactaccattacacagtgtccttgtttctcatcaatgcattttatatagcaattattttatctaatcccatgaaactcactttattggatgcttttgccatatccttattttctagcatcgtagctattaggtcatctaattattaatctgtttgtgtctttgggtttaaatgtgtcttttgaggccacacaatgttggacttcattttttaatggagccaacaatcagcaattgttaatgcatttgctttgtgttctattactctgcagtttatcttactcattgttatttttgctttctttaaatttatgttttcttaatggactttaaaattctttatttattttttatgtcagacaataaacatccctagtctgcccatctttctatcatttcaacatcatcatatttccaaataacttttcattgtttcctataattttactattaatagtataggattaagaaaataaaccttatctgggttctggctggcactgccttccctctagggatgaaaatggagtgtagtctgtaatatatcctggtatcataaatatatttataaaattatacaaatgtagcttgcagttctaaaggcatgtaatctaatttttacttgaattttatcttttttctctttttgtccttcatagacctcgagctctgtctagccctcaactgttctcaaatctccattgttttctacaagtgaccctcacagctgtgggcctttgttgacaaattgtttcatctcctctgggtcttaaattattttctcttactctaaagtgaaaatttgatgaatgtttccagatactgcacttggaatcataacttaatttcccttaaccttgtgtaaattctgtccccccactactcccaactcctatccctcctccaaagcactgatacttattatcacatttaaattttttccccgctctactgataacttacagaatgcaggactgcattgtgatggggtaatttccatgagttgattggttggttttgagttgaaaaacttaacaatgatacatcttaaattctttctttgaggattattccttaatgaattcgtgctacggacatactgaggtggttatttttatatttccctgataataaattctaaattgctaagggtttcttaccaccctcgtccttttactgttactagatctatttttagctggtgtgggcgtccccagctagtttcacttgcctaatgctagttcttttttcttctacatcaggtcgcctcttcctagcatcttctccatgtttcttgttgctctacagcatttacaagacccagtttaatagtttagtgccttttttgtcactcattatttcttctttgttctctgttaaaataataagtgtatgatccattgcacttgccttagagtcttgaaccagtcttggatttcccgccatctgggttctggctggcttgcaatttctcctttgatgttgtaatactttttcattgaacttgagtgtggggcttatagagcttctttgctttcattattttttcccaaaatgtgcacattttttttcttaagcttattttgctgttttgtgctgttatttttaattgcttcccactgggtgggggggtagggggactgagagtgagatttggcttgagtttggctctctttgctattactcacatttccccccagaagccctacatgcactcctctctctctgtctttgacaaattacttttgaaagatcattgatccctggcgtaaatggtgttaagagtaagatggactcgggtagggatgctcaggaatccagtcctgtacagtcatgagcttggccatctggaagtctcctcttgctcaatgaaatggagtaaacattgtccattatgaaatccaccacacaggctgccagggacgaatgggatcccacccaaagccaatcgctgctctgacagggaaattggctagcactgcctgagactactccagcctcccccgtccctgatgtcacaattcagaggctgctgcctgcttaggaggttgtagaaagctctgtaggttctctctgtgtgtcctacaggagtcttcaggccagctccctgtcggatggcttttatgaaaaaatatctcctccccattctggggctcttcatggcctactactactattctgcaaacgaggaattcagaccaggtaagtacccatgcgtctcattttggaggaataggtttaaaaaacacaggggtgcttgagtgttcctgaggaccaagatgtgttcttgatcctcaaagttggtgaaaatgagggaaccctgagttaagatggtatttttgtgtcctccagctacaggctgtggacaggggggactgtgtaggaagggtaatcgtgtagccaaaatctagccaaataggccatgctttatttggcacccttaatggaaagcagtttcaaatcttctacaaaaatgagagtaatacccaaattcacaactcagcagctaattgggctctatgaagagactgataagtgggaggcaaaaaaaaaaaaaaaaaaaactggagatgatgactacatagaagtgagggaaaatccctggaatttctatgaacacatgtgttttgattccttgttaaatgtactttcaattgagcaaaattgaaagagtccagaaatgtctggaactccagcattttagctgaaccatgacttttctggcttcatcctatgatctctttccatggaggtttttagaaatgacagtagggaggctgtcagcccaaacctcccacttcagagcatgtttatgaaagacctggcctgttcccacagtgatttacggagtttgtgacaaactgatctgggctcataacctttaagttacaaattgcgataagcatgcctatatccagagagggagaaggaattttgctgccaacttgggtatggtcctcacttccttttggggttccccagagatgctccaaggaaagaaagtgattgtcacaggggccagcaaagggatcggaagagagatggcttatcatctggcgaagatgggagcc

SEQ ID NO: 4236 - DNA, 6000 bp, Homo sapiens
gtactttgggaggccgaggcaagtggatcacttgaggtcaggagtttgagaccagcctggccaacatggcaaaaccccgtctctactttaaaaaatacaaaaattagccagcatggtggcgtgtgcctataatcccagctactcgggaggctgaggtgggagaatcacttgaacccagaggcagaggttgcagtgagccaagatcgtgccactgcactccagcctgggcaacagagcaagactccatctcaaaaaagaatgtgattttttagccacaaactaggagtcctatttattggaaaactcacacatacactagggagaggagggtggtgcttcggctgagctctaaaaagcagtaatttttcatttataaaagggcattttatgagtagaagacaagtcattatgatatttaactcaggaacagccctatttcatattctggcaggagtcaagggtacagaacctcaaatgaaggataaagaagagaaatgaaagctctctgaagattaacttgtggtttgtcctttccgtccaaatagagatgggtgcctgggaggcccccctttttctgttctacattactctttccttttctgtttcctaatatacatacactcctacctctatacctaccccaccttcacccccaagcctgaggctgcagcctgtcaaggcccttcaatgtcacagccagtgagaccacctttcttatgagcctacaacaaaaagtaacttgtcccttgctcaatgctggacccacaagaacggatccacagttatttgagccttatggttaggcctttcagattcttagaatctaaacaacagataaatctcttgctaatattgaaagtctcttacagcataaatttgaggtttcattacacgaaaaggctctctaccaacaatgatgatacaaagcaagcaaagacaagaggaggacttagaactctgtcctgccacaaatgtacagtcataactcgacagagcagcaaccttgcaaacgtaggagtcaaggaaatacttgtcttcctcctggtgagtttagactgtatcatctctgagaatgaatatttgtctttgggatgtttgtgtggacatctgagtaaacagttaccagctagacacttggaaaactaaggaggagagtctgcaagtcacctgataaggagaacttgaacttgaatgcgaacagacttaagtatgcctgccctgagctgttctgcaaaatttggagtgccaaggccgctgtggactatcctattaagagtgtctgcagcactattctagaatgaataacttagacttgaggaatgcggtgctgaagaaaccttgtcaggagtgtagggaaggattctaaggcaagaacaactcttatgaatgaggttgccatttcccagaagataggtaggagtcaccctgtagagtggaaagaggagtgggattagaactggtaacacccatgaggggacccccataaagtgtttaacttcatggtggctcatgcctgtaatcctagtactttgggaggctaaggcaggtggatcacttaaggtcaggagttcgagaccagccgggccaacattgcaaaaccccgtctctactaaaaatacaaaaaattagccagacgtggtggtgcatgcctataatcccagctactccagaggctgaggcacccgggaggcagaggttgcagtgagctgagatcatgccactgcactccagcttgggcaacagagcgaaactccatctcaagaaaaaaaaaatttttttaactccttagtgctgtctcttggagtatgggagaagtcatattagcatatagtttagttaccccaactgtacaataaaatctgataatcttacacatgcttgtgtggtattgtgaagcaaccaggctataaaggaaagggtagcttaccccatactcatcgcctcatgggggactacacagggcccagcatctatcaaggaaactgtttcagaatatgaccatcaaaaaagggagccgttgttcccattgaacctggaaatgatgaggagaagcaaaggatactggccactaaaagcctggtgcccagctcaagagcagcctgaattaaaccctctattggaggccagctgatgattacactacaaatctctacttgagcttaatttggtaaattcattttcttaaatccattttatctagattttaaaaatcattagcatagttacacaaatgactctctataattaatttccaccgtatcgtggctactttccatgtatcattcctaaacttttataatgtcttttctcttttttaaattgatttggctcgctgatattttattttattgattttgttttctatttgtatgtctaccattcctccccctgccagatgcacacacaaaactgaattttttttatcaattttaaacaggattctaacttattatatattctccttttatcatttcaaaattctcacctcctttttttctgatcattttttagcaattcatttgaaaataaatgaataggaaatttatttttaatcttcttgatttaggtaatgaaaatgtttaaagctaggaattttccttgcattctgcttggccatacctcacagattttcctcataatgttgccactatcaccgttttcaatgcattcttaattgcagatttgaaattccctctatcttttcagagtaaatgggaagaatttttttccaagaagttaaagtgtttctttcttccatcttttgttatttatttcaattgtattgtactgtggtcagaaaatcctgccataatagatcaacttttcaaaacatatactgaggtttactttttgatccatatggtcaatttttttaatgtctcgtgggcatttgaaaataaggtatattttctattctcaaagttctgtgtgtgtgtgtgtgtctttttcaatatagatagataggtatgacaaccttattaattgttttgttctcagaacacaatgttaagggctcaaacctactgtcaagcaaacctgggtccaacactttctgtgtgatcttgagcatatcattgaccactctaaatcccagttatcatgggattagtatcccaatgactgcggactttgtagacatttctttctgatgtttaatggagtccaaatagtaggtctctataggaactcctattaaaatctcctgtctttctttacgctctaatgccctgaactcccagaatcttctcactcttctatgccaataaaaattctctggccaggcgtggtggctcatgcctgtgatcgcagcactttgggaggccgaggcaggtggatcacctgaggtcagtagtttgagtccagcctgactaacatggttgaaaccccatttctactaaatacaaaaaattatccaggcatggtggcgtatgcctgtaatcccagctactcaggaggctgaggcaggagaattgcttgaacctgggaggcggaggttgcagtgaaccgagatcgcgcaattgcactccagcttaggcaacaagagtgaaactccgtctcactctgtcgcccaggctagagtgcagtggcacattcttggctcactgcaacctctgcctcccaggttcaagcgattcttgtgcctcagcctcccaagtagctgggtttacaggcacatgccatgacatccggctaattttttatatttttggtagagatggggtttcaccatgttggccaggctagtcttgaactcttgacctcaagtgatccacccacctggacctcccaaagtgctgggattacaggtgtgagccactgtgcccggccaaaattctctttttctgacatcttgggctccccaagccctctgtcctctactcattcccatctctatgtgtcaagctccagacacagggccttgagctgttgtctctcatcctgagtaaatgccacttgtcttcagtcctagtgcttgagaatccatcctctgcttttccctgccgattccttgtcctttttctcctcaaagaacagagaaagaagcagaagcagagaaaatggtgacaaactctccacatgttaataaatgttatcacagctatttttaagtctcattacctgcctcacatgtgtcaaaccttagaattccaaagagccacatacatcacccaactaccacagtgagtagcatccagacaaggtgaattttacaaggttacaaagctgctcagttaacttgtcccaatccagtttcctctccactattttagcctgaacttcttgggaatttcctggctgcatcatttgtgatggcttcatcttaatgcatgcaaatcagttccctttagtttttccctaaatttcctagtccggttgaccagataaaaaaatgtgtagaagactctgccttctattccttccttcatcccccagctacccacctttacactccctcctcattgctccagaaaggagcaaatccagagttggtctcattccagaatctgagaaagacaccacctacttcagaagagcagaaactctttacaacaccaggattgggaagaggtggctaaagaaaaaggaaaatccttacacaaagaactacctgatacacatgaaagcctacactgagaacatctcatctaggtcttaccaccaaaaaggcatttttttccctctcatagaaaccacaaaggtctgaatctgacccagaggactatccttttctaatcatggaaaggaatcttgacttgaaactgtccaagagctccgaccaatccagtagcaagagaaagggtggccggggtgcctactgatgggaggagctcctgagcccagccctggaggcctcagagttcaggggcccacttagatgataccagagagcaagagagaggaactggggtttgcgaaccttgtggctttgtctgtttcctgtttcagcaaggctgctgtgcaaaaagaaagacggtaccaagaagggacgtgttaatggggcccagacctatggattgaaagcgtgtgctttacccatctgctgtcttgctccatctgagaccagagccaagatctgcccaggactggaatgctttcccgagtggcttgagttggagcctgggactaggaggtaactgagaaggaggatgcttttgtgtccaggtttgggaactccaacttcggggtagggcagaagatgctctaccatcccagctcccctgggtggagagtgggtggcatagtttaagggtgtcaggggtttgggtaaccaagaaagtatcctgtattggtttcctgtggcgctagccatggcacagggtacagcttgcaccactcctctgttccagtagattagattacattagattaggagtgagtcaaacgacttagagttcaggctacccagtgatatgggcatgaattaaatgaccttttacagttttcttcaaagcagggatccctgaacacaagactgccttcccagcagcttaagcgcaggcccctctcccctcagttcacactgagagctctgggccaggaaggccaacccatgcaggaagccattcattgtctccattacaaacatggccaggaagtaaaagcgagactcagaaaggcatgtcaagccacagtcaggtgaggagccatgccctgttctctctctgcagcctgagagaccaggctgagccttcccagccagtaaaccttcttcctccaagctctaagtgagcccagtcatgctgccaggggggaacctgagagatgccagaaagcctgggcagtggccaagtgatctttctttgaaccctacagggaccagttcccttttctttagcagcctacccctgtcagccgtcccacataccttcttgttttcaagcaagtcagtagggtccagatatcccagaaacctgggtagggttctatgcagcatgctgcaccaaatcctagcaggtgtggtagccaaggcatctgggaacactcccctctctaaggagc

SEQ ID NO: 4237 - DNA, 6000 bp, Homo sapiens
ttgagcataacaggtggaaattaccaggaggcaactgaaagtaatagtctgatatttaaaaggtttagaaatggatcccagtggaaatgttatgcaaacattacaaaggacaatgtagttgttacattttagattgagagtttgaaatttagtagcctcttgaacaatggtgaattcagttggattaatatttaacaatatagacataaactcaatcaagtgtattttggttgggtgaggagtgtgggtggagaagaaaacaaacatggcttagcatctagcacaggagtacatttcccctctgtaaattcataacaatcagatgcagttaacagaaactagtagaagtagcaggtaccctaactgctttatctcatattttctatatcaccttttctactgaaagctaagcaaggtcgggtgcggtggctcacacctgtaatcccagcactttgggaggctgaggcaggtggatcacttgaggtcaggagtttgagaccagcctggccaacattgtgaagccccacctccactaaaaatacaaaattagcagagtgcatgcctgtaatcccagctgcttgggatgctagacagaagaatcgcttgaacctgggaggtggaggttacagtgagccaagatcatgccactgcactccagcctgggcaacagagtgagactctgtctcaaacaaacaaacaaaaaaaactaagctaaatatttatgcatggagttttaggagacaaactggattacttaagtacttattatcaagagttcatttaatcagttttttagtattttaaaaattcagtatcttcatgaaatgaaaactttaccatagcaattgaaacatgaattgtgcttggagtctcacaatgtacttccagtccttaatatatcatttacaattcaaaattgtactcttacaagtcattctataattgattttatagtctatctttctgaatccttaaaaaatgttccataattcctttagtaaattgctccatgttaaaatagaaaacactaataaactttctgtcagattatggcatgttataccatgttaaactattaagttttttccctttccttcataacagtaagtaaatacttaagcaaagagaaattctgtattaggaaatgatgattaggaagatgataatgagaaatactattttacataaagagttttcaataatccatttttagcttctctttatcacaatcatcaatggctattttatccaatttttgtgtagatgtatgcatcagagtttaagaactacaattataaaggatacatgacaccaagcctgttataatttattcatttaacaacaatttattgagcacctatttttatacaaagaacaatgtttgacagcattgtatttgaacagtgtaagcaataaaagatcttagtgaccctcatagactctctggtctgatcaagcccattattttacctcctttttctaaatgatgccctaatcatctcttttccagattatcctaaattatcttttgctttgactctccttcctctattccacacatcattaccctgtccaaatttgcaattatataaaccaagaagagttgaataatgtttttgcagcagaagaccattttctcatctaactcaatttattctaggtgtaaaattcaatttctttcctgtatatatatattctttagggcttctaaaagttgcttccgctttctacatgataggtggctgtatttactggtgggtgacatatttatgtcatgtaaaaggtgtgtggcacactttttgacctctgagtgaaagtcactatataaatgtcacttgtcattatcatgggaacactcagctgtgaaaaaaggttttaaatatagtcaagtactgttacctagaacaaaataataacttctttgttgtgaataagaacacttagttacagtagcctgtatcctactaagcatgtacttgttgatcattttgtgttaaattggtctatatgtttaaaagttctgttcactcctacgagctgacaggccagtatcgtgctgtgttattattcttttgaaaaacctctgtgtactgctctatgcagctagccaatagcaataacttcagtgagcaataagaaaattatagcagattatacaggaataatatcatagttacagaggaaaaggaagtgtagttggcccttctgtctgaatgaaacgcttagaagataccatggaaggaaagcacaggataataaattagtgtccgtgctatttgcttacttctttcttttctttgctagagcttgtgttacttctaaagctttaggtggcaggaaaaaaactaccatttgatctaagtgaacaaaaataattctagaatatttcatgttagtttttccctgttataactgtgctatctatagtagagtaaatgacaactcttgaggaaaatatttgctggaggaaatggaagagaaaacaaaattattctgatttctggttatttttttccatctccatctttaactacctccacacagcatgatggatatatttcttaacagtgtcaggtcattagatagaattgccaaacatgggaaattgctgctattcttttcccactacagacattacagtttatctcaccaagtgctcattaaataatcttctttcttagttcctggctgaacactaccatgccatttctgtagctctaagtctatgctgtttgatatggcagacaatagccacaagtggctttttaaactttaaactgaataaaattaaataaagctaaaaattcagttcctcagttgcactccctacgtttaaagtgctcaatagtcacaggtggctacgggccactgtattggacagcacaaatacagagtgttttaatagttgcggacaattcttttggatagctctgctgtaagggaactgcagggaagtacgatgaaaggcaagtgcttgcaaaagagttagaaggtagacaagaggtggatgtctagacagtacagtacctttgtagttactacttaactcatttatccctgaggttgcaatttttagaatttttgcaatcagaccttggcgatgaccttgagcagcaggatgtaaacaactcccgcgtgcttagcgttccaataatggaacactaggcataagttaagttctttctgtccaacaacctccttctaggaactatcttccttcttccccagttcatccacatgagtctcctggacaaataagtctcctggacaaatagtagcgatgttaatctaggttatggaaactcacataatctggttatttacttagtaactatgtaattggtgaggaaaggatgaatacatttttcgggctttcaatatgaaattctttaaaagtttgaacaattgggttactcagaactagccagaaaccacaacttacaactgtggtgtcaagttcagatcaatgtcttggagttcaagactgttttaagggaggctgcctggggaaaatgtcattaaacattttacccgaatcctctagatgtccatcataaactctctcatggagctttcctaaagtataggcattttaatgtttcctgagtaaaacagtattttctttgatccttcaataacaattcttgcttgtagccagttttcagcacagtgccggcttcacagatactcactgaactaaagaaaatggtaaaggatgaatgtctattgagcataaaatgcgactgagggagaggttatataaaagcaatggaagacagtttctgctctagatttacagtccaaccttacttacataagtgtaaaatattttcttctttgtttcagtccctaatatagctattttgctctaggaattagcatttcctccacaagagagaatcactaaactccctatttctcaatgttgtttatgccgttgattgtccaggttctcaaattactaaatgaagttgagagttgggtaaatggttgagcggttcaagtatcttaagtaaaaactaagtggccaattgttgttgtgctcagggttggcctgggactgttcacaatggtcacaggtttacaaatttttaaaaacctgcgtgtgacatgctttccaggtcctttgtcaaaacgtccgtctgaccctgacttttgtgtggcttcaaatgtgcgtttgcaatgtgtagacaaattccaactcagagttccaagaggtaagccaagctctgtgtggcagcaaggcttatcaagagcgaggctaaggggtgaagtgagtgtgtgtgtgtgtgtgtgtgtgagagagagagagagagagagagagagagaccactgctgtgctcaggattcctctctcctttttgctttttgccaactagctgtttctccacagcggagatctgagacgagtatgtggctgattcgggcaaaacaaaacaaaataaaaccaaacgaaaccaaaacagacttactattaccaaatctgagagtcagtgggtgggaatccttttcaaccaaggagacctgtccatggtcctgaccacatcatttgccactcgcctccttcatggacaccgtttgctccaagtaccggacgggagggcgcccggcgccaggaagcttgggcttgggcccccacacgagctcggcgcgcttcgggcgggtctcgggcgcgggcccgtggctctccgggccgggcacctgtttcgaatcgaggcgcgaggcgcggtggggcggtggggtggggtggggtaggttggggtgggggcggggtggcgtcacgtgccagcggcggccccgggaaggttccatttcttccgcggcccgcactcgcggcgctcggggcccctccctcgccccgcccgcggcgcccctcgcggccgcacagccgggcgactccgggccgggccccgcccctctcgctggcggactcagcgcgtcctccgccagccctcgcgtctgctgcccccgccatccagttggtgcggtccatggcgagcgcatcatggcgattgaaggtaagtggaggctgacagcggggagcgaggaccgggaccacccagctggcggggggctcggaggtgcgccggcaggccgaggcgctgacggggccgcctcctgtggtctggagccggctgaagacgcgcgggggtcctggccgcgtctcgggaggcgggtgggcggagcggcgccgctgggacgccgggcccgactggctcgctcgccccggccttcgtggttttgccggcctcccggcggccgcacgcggggcaaagcgggctggcgggcaggtacagcgtccgggccgccgcctcctgccggccgcgcggagtggaggtcggggtgaggccctgcagaccccacgggacgggctgggaggagcgaggggccacggggggctcaggctgccctttcttttctttccccggccgcggcaaaccatccttccgcaatacccaccttcctgccaaactgagagtccagttttttgtcccattcctaacccttccctgtgcccgctcgggctgatgctgggttacactctctgcccgttccccttctgtttgctgttgtagggggtccaggaaatttggggttaggttaatttcctcctcaagtggttttgttccccgccaacactcaaaactgtttttctccatgaaaagaagtaaataacgtctttacaacaagcacacattcttagaatcctgcaaataccagtctatgaagtgttatagtgccacaatgctcatatttcgaaaaacagcttaataaaaattaagttcctagataaggtagttgacactaaagtgtatttttctcttgttccagaaacatgtaactgggaccaagtgtctatattttgccttgtttttaaggaagagattgtgagaattaatttcacacgtctaggatatttatgtgaaagattacatcttccaggccctgtctcttagattaactcaaacagtgaaagtaatttgtaaattttccctgtgt

SEQ ID NO: 4238 - DNA, 6000 bp, Homo sapiens
tgtgtaaacaaacaagcaagcaaagagaaaactaatgaaaactctacattttaactggcttaccccactttttaacttttttgttgtttctatttatatcttattgtattgtttatgtcttgaaaagttgtggtaactattatttttaattgcttcctcttttagtctttttactcaagatatgagtagtttacacaccacaattactgtgttaaaatattctgtgtttttctgtgtatgtactattaccagtgagttctgcaccttcagatgatttcttattgctcattaacgtccttttctttcagattgaagaactccctttggcatttcttgtacagggctggtgttgatgaaatccttcagcttttgtttgtctggaaaagtctttatttcttttatgtttgaaggatgtggctcgctgaatagactattctaagataatttttttttccttcagcactttaaacatgacatgccactctctcttggcctgtaaggtttcccctgaaaagtctgctgccagacgtattggtgctccattgtatggcattttttatattttttattttttatttttttatttttttttgagacatagtctcattctgttgcccaggctggagtgatgcaatctcagctcactgcaacctctgccaaccaggtttaagtgattctcttgcctcagcctcctgagtagctgggattacaggcacccactaccacacctggctaattttgtatttttagtagagacagggtttcactatgttggtcaggctagtctcagactcctgacctcaggtgatccacctgcctcagcctcccaaagtgttgggattacaggcgtgagccactgtgcccggccaggaacctttctttatccttgagccttgggagtttgattatttaatgtcttgaggtagtcttatttacgttaaatctgcttggtgttttataaccttcttctacttggatattgatatttctctaggtttgggaagttctctgttattatccctttgaataaactttctacccctatctctttctcaacctcctctttaaggccagtaactctcagatttgccttttgaggctattttctagatcttgtaggtgtacttcattttttaaaattattttttcttttgtctcctcccactgtgtattttcaaatagcctgccttcaagctcactaattctttcttctacttgatcaattctgctattaaaggattcagatgcattcttcagcatatcaattgtatttttcagctccagaatttcgggcttaattcttttcaattatttcatttgcttcattaaatttacctggtaggattctgaattccatctcatgttttcttgaatttcattgagtttcttcaaaagagctattttgaattctctgtctgaaaggtcactctgggattgatgccttatttagtttgtttggtgatgtcatgttttcctggatggtcttgatgcttgtgaatgtgtgtcagtgtctgggcattgaagagttaggtacttattgtagtcttcacagggtgggcttgtttgtattcatccttcttgggaaggctttccaggtattctaagggacttgggtgttgtcatttaggtttgggtcactgccatcatatctgcattagagggcacctcaagctcaggaatgctacggctcttgcagactcagaggtaccaccttagtggtcttgcataagatctgagagaatctttccccagctgctgctgtaggatgagggaggggtagcgtctgcaattcaagactgtcttctctacgcttttcagtgcctctttcagtgatatgaagttaaaacttggtactgcaatggcccacttgatctttggttcttattaaggtgttttttgttgatagttgttcattttgttgttcttgaagggaggacaattggtggaagcttctatttggcatcttgccccacctcccttagattttgataaattttaagttttcatactgccaaattgcttacccaactaaacattgtgtgtgagtgctatcacatagcacccatgccaggctgtaatgttatttattaattttttgccaacttaatgtgtgaaaattgtgtgttcttgttttttttttttttttttttttttttgagacggggtcttgctcagtcacccaggctggagtgcagtggcacgatctcggctcactgcaacctctgcctcccgggttcacgccattctcctgcctcagcctcccgagtagctgggactacagacacccgccacgatgcctggctaattttgtttttgtatttttagtagagacggggtttcaccacgttagccaggatggtcttgatctcctgacttcgtgatccacccaccttggcctcccaaagtgctgggattacaggcgtgagccaccatgttcttgttttactatgcatttcattgagctttttgcaatatatttttgtttcctacttttatttccctcctcctttttctagtgggttgtctataaatgtgtcttgctcatctataattgatttctaatgttttcttattgattgtattaactctatatataattttaaaattacactttgcaaatttcttgcaaatatcccagtctattgcttatctttaaattttggctattatggccaagcatggtggctcacacctgtaatcccagcactttgggaggctgaggcaggtgcatcacttgaggccaggagttcgagaccagcctggccaacaaggcaaaaccctgtctctactaaatagccaggtgtggtggctggtgcttgcctgtaatcccagccactcaggtggctaaggcacaagaattgcttgaatctgcagtgagctgagatcatgccactgtgcttagcctgggtgacacagtgagactgtctctaatacatacatatatatatatatatatatatatatatatatacacacacacataaattttggctatttttatttgatgtttctgattgcctgtgtttaaatctgcctttatctcctttgtgttcgccggtgaatttaaagtgcatatgtagacaggggttaagtgtaaatcacactgaacctatattaacaacagcatcttttagaaataatataggagctgttatcacatccctgtccctgagtttgacactacctgagttgagttcttattctgccactccctctgccaaacccttggatctagagttgacagataaaatacccagttaagtttgattttcagatacccaggatgtaaatttgaatttcagatataccattttttttttttttttttggtagagatggagtttcatcatgttggccaggctggtctcgaactcctggattcaagttatctactcacctcgacctcccaaagtgctgggattacaagcttcctgtaagtacttaaaaaaaataagtatatcccaaatattgcatgggtcatagtgatactaaaaagttacatattgttcacctgaaattatttacttatttttttgagacagagtccggctcagtcacccaggttggagtgcagtggtgcgatctgagctcactgcaacctctgccgcccgggttcaagcgattctcgtgcctcagcctcccaagtggctgggattacaggtgcaggccaccacacccggctaatttttgtatttttagtagagacggggtctcaccatgttggccaggctggtctcaaactcctggcctcaagtgatcctcctgctaccgctcctaaagtgctgagattacaggcgtgggccaccgcgcccagcctgaaattcaattttaattgagtatgctgtatttttatttgctaaatctggcactcctatttggggctagtttactaacacctgcttactgaacaccatccagtaccaggttttggggtgagtgggttggggggaagcagaaagaaaagatagctccagctcttggagagttcatactctggtttcctggagaattctaaaatcattaaaataatcctctcgaccattacaatgactgctagatgaaatttctgagagcacagcttccgagtttccctgctgcctagggcagagttatccaccttcaccttatcatagaaccacctgagacgcccctgccatggacagtctgatgcttttggtttggggagggatccagaagcccgaggttttaatgagagccacgtgattctgctgagataagtctggagaactctggcaagcctgtctcttggctcaggcttggaggcctccgagcagcaacatcgtcccaattataccccgttggagcatcttcagatcttccactcttttcacaacgcaatcaaaatcttcgtacccattttgcagtagtgatctctgtaagttgctttacaattcataaagtttattctatttgatcttcactctaatttacaaagaaaagcagggaagtctatttctgttttacagaggtgtacagggaggctcacaggggctaagttcacacagtaagccctcgaagctgccagggctgcaaagcccaccctctttccaccgcaccgaactacctcctttcgcctacaaaacgtaggtggggaccactggtgttggaatgacggcccacctcgagtttcaggtgacttccactctgcaattaacttgcaggcagccccagacctgcaatgaacacacgggtgggggagagatatgcacgccagggtcagtgggaaccaacagccgaggggtgagcggggctaggggccccgggccgccggcggggcaaacgcggttcagaaacgcaggccgcgctctggcccgccccctgcagcagcacggcctgctcgccatcgcccggagagcgccgcgggttcccgagtccgggcgcggagggcgcgcgggcacggcggcaggggcgtgctcggaggacgcgcgctgcgctgctcctccaaagggcagctccgggggaaagagggtggcgtcccggggaagcccgcagccgccgccgatgtcgctgggactcggaagtgccgaaagaggggtgttgggaactcgcggcgcgcgtgaacgttgccgtcgccgccgcccgggacagcccggaggttggtaactggtgaccatagggggtcctggggaggttagatgctgaattttctgcgtcagtttactctgttaaaaaaaaaatgcacaaaacgctttccgtttcctacccaagttcccgtgtgcgcgcccgagggcgggacagaggaagttcccggtcgggcgaagaagacaaaagcggcgggggccgcgcgcgcagtgcgcccgggcaaaggcggggatctaggcgccgggacaagtccgcgcacggccctgcccacgtcctctctccttggcttcgtccccagcttccggaactgctgcggggagttgcgaactctggtcctcttggcagtatcggcggtgcgcctgcctgcctgctgtgactccagggactctaaagttagagacttcctttgcgttctatcttcaggactcagttttcttcctctgttctgagtctaaccttcaggtggcaggtctttatgcggaaaaaccctcccgctaatcctcaccagaggtactttacgggtagcattggtgttaagaaatgtgctgctacctgtgtacattgctcttggatcagggttgtagggctagggcatttggcatcctcagaggtttgcattacgtgggagtgagacattgcttctctttctgtttttgttgttgtttgtgtttttgaggcggagtttcgctctggtcgcccaggctggagtgcaatggcacaatctcagctcactgcaacctcagcatcccggtttcaagcgattctccagccttgcctcctgagtagctgggattacaggcatgcgccaccacgcccacctaattttgtatttttagtagagacgagggtctcaccgtgttggccaggctggtctcgaattcctgacctcgggtgatc

SEQ ID NO: 4239 - DNA, 6000 bp, Homo sapiens
gaaacaagacaaaaacacaggagaaaaaatcctgggactcttttttttttttttttttcaggaataaatatatacaaataaaatgtctcaatggagggaagaatacatgtgggaggattctgatttccaaccttctcctctactcctccatttccaacttgatcttttcacaaaatagaaccatatagcctctgctgatcaggtggacagagcctgatgctagtaggagtaaactgaaggcaaggttgcccaaatctacccacctccccatgaaacatcatggattgcacatccaatagcattgttctggtttgcatcttaacctctgaggctcgtaaactgtggcaaacctttgttcagggacagctacatcactcctattagcatcttggaccttggctcctggatgctgtccagatctcatattgctgaagtgttacttattcaaatctctctgacttggcattccacacccataaagtagctcaatctcatcttgactcccagccaaacgatgctcccagtagtatcttttttgacagagattaaggttcattttacgttatacatccaaacatttgatataaataatgactcatgtttaaactggttaataaatatctaccactgaagccagagaaagaagacaagattaagaaattagaatggtggccgggcacggtggctcatgcctgtaaccccagcactttgggaggctgaggtaggtggatcacctgaggtcaggagttcgagaccagcctgaccgacatggagaaaccctgtctctactaaaaatacaaaaattacccgggtgtgggcacctgtaatctcagttacttgggaggctgaggcaggagaatcacttgaacccgggaggcagaagttgcagtcagctgagatttcatcattgcactccagcctggactccaagggcaaagctctgtgtcaaaaaaagaaaaaggaaaagagaaagaaatagatttcactccctccttcccttccttctggaagtttgcaagactttttttgtttttgtttttgtttttgtttttttctgagacggagtctcgctctatcgcccaggctggagtgcagtggcgcgatctcggctcactgcaagctccacctcctgggtttacgctattctcctgcctcagcctctcgagtagctgggactacaggcgcccaccaccatgcccggctaatattttgtatttttagtagagatgggcttcaccgtgttagccaggatggtcttgatctcctgacctcgtgatccacccgcctcggcctcctaaagtgctgggattacaggcgtaagccactgcacctggccaagattttttttttttaagaaacagatttcacgtggtggtgggcgccttaatcccagctacttgagaggctgaggagggagaatcgcttgaaccccggaaacagaggttgcagtgagccgagatcgcatcactgcactccagcctgggtgacaagagcgaaactccgtctcaaaaaaaaaaaaaaaataataataataatttaaaaaaagatttccttccttctctcctccctccttttttccttccttcctttctttttctctctttctttctttctctctctcttctttctttgtctctttcctttcttttctttctaatttggcacacaaacactttatttaaatgcatatctcaattcctgtgcggctggcaaataaaataaaggagcagatcatggcacagcattctcatggaccaagtggtcgaacccaacatccaagacccagtgagcagccaagctcagtgcaacctccaggcctctcgctctgactccaacagggtgagcacatagcccttgcgcatggggtcttttacactgtggatgatggagtggcttgtgtcttccataaattcccgcatgcactgtccctgagagctggttctgcccaggaccttggtgaccctggctagctagataggctgcacatggctggtgtctgtgatggcgatgcagcagcagttgggcagagagaagaaatagatttctttacaaagcaagtaattatttaaaatattcacggtaattcagtattcattagctgtactcagtaaatatttattgaacagctactatgtgctaggtactcgcacaaagtacactggttacaaattcttgaaaaatagtagcggtagcaaaaagcaacaaaactttcagccctgcccttatggaactcacattctagtgggcagggagaaaataaccagaaaaaggcccagcacaatggctcatgcctgtaatcctagcactttgggaggccgaagtgagctgatcagttgagaccagtctgagcaatgtggcaaaaccccatctctacaaaaaatacaaaaagtactcaggcttggtggtcagccgagagagagagagagaaggaaagaaagagagagagaaagaaagaaaagaaagaaagaggccaggctcggtggctcaggcctgtaatcccagcactttgcgaggctgaggcgggcggatcacgaggtcaggagttcaagaccagcctggccaatatggtgaaaccctgtctccactaaagaaaaatacaaaaattagccaggcatgatggcgcgggcctgtagttccagttactcgggaggctgaggcagaagaatcgcttgaacctgggaggtggaggttgcagtgagccgagatcgcgccactgcactccagcctgggtgacagagcaagactgtcaaaaaaaaaaagaaagaaagaaaataaccagaaaaaaaaagtaaaaatataggacattttaggtgaaggtaagcactaggaaagaaagaaaaaaaaaagcagggaagggatgttggccggggcgggcggagggggggatttatacagtttggccaaggaagacattataataatgcacttattccttagtttagaacatgtagcatttcacctgtaccgagagatgcctgatatatttcatacatgaccaaaataataatgtaagaggcaataaaaaagtgcagggttttagggttctagatatcagcacattttaagattaaatgcatggtaagaacttttgtactatatacacctagtttgaacttaaatttaataacaaactctttggagtctctctctctctctttttttttttttcccaaacatagcttcccaaggagcagaagggctgaattttctctagttccaggaagaccgcaaggctactgtgctctggatgtctcgtttttatttttttatttttttattctccagatctcaagacggtgtctggcacataccattcaatacaagtttggtacctggaacccactgaatatgcatgtccagtaactattaactacatgtgttggtgcaagggagaaggtcgagcaaccggatctgctccatcatagcccgtctcagtcgcttcattcaagtcagcggggtgaggttgaggggattccaacttcacaagggcagatttctcatggactctctttctctggttgtactggaacactttctggcgttattcctctgctgggacagcatgaacttatgaaacgtggtcctgtctgccctaaagccagggtctcaccgacaaggacagcgatgctggggcgagaaataaagttcgtcctgggcctgcgtacggtacagcgcccttgggaagcccttgtggagttaagggtgatgcccacttctttgtctccctcattctgtttcggtggctctctcgttcccagttccaagctgcccacttgttagaggagccactgcttaccaggcatctggtttaataaaacatggctagagcgactgcatgttaaagtgagtaactaggcactcacaaggcacctataaggttaatgctaaaggtctgaaaatagccgcattctaagctgaccaacaattataattacacaatatttatggccatacaggacatctcccaccaagtctgcggaattgtccagatgtcctgagttttttttttttttttagacaaggtctcactttgtcgcccaggctaggctggagggcagtgtggtgcgatctcagctcactgcaacctccgcctcccaggttcaagtagttctcctgcctcagcctcctgagtagctgggactacaggcatgcaccaccacgcctggctactggcttttttttttttttttttttttttaaatagatggcatctcagtatgttgcccaggctggtctcgaactcctgggctcaagggagactcctgtccggcctcccacagtgctgggattacagacgtggccaccgagcccggcccagccctctactcagagataacgtcaatgcgcaggcttaggttgaaggattaatggtcattagtgcaccaacagcccctacctttagtgggcacatcagcacattccacgattaatcacagctcctcacagctgcctctaagtagtgacactaccgaaggacgggagttcctcctcctgcagtctgaggacttgcactctctaacggagtagattccaataaacttgcttccttcactgcgctctgtgactcgcctccaattcttccctgaagtagacccaagaaccctctcttggggtctggatcgagacccctttttccagcaacacaacccgcggggccgcctcccgcccaccctcaggtgcaggagaccccgggccatgcatccttccgggcaggaaaatgtcagccagcgctcgccggccgctttcctcccccgcctcccgaagttctcgcccggtagctccccgactggctctcgcgccggacaaaggcgcacgctgattggccggagggccgtagtcatgcaggacgcgcgactctaggggcgggaccagacaaggggtgactgccgcgcggcgcgggggaggagaccttcatctgttcacgcggtagcgcggattgcggttcgcggcgcgcgccaccggggaaggagcggtgggccgaggggttggaggtggggccccaggaggacctcgggctgtgggccgggagagcggagtcggggagtggggcgggggagcgaggtggcgccggggagcctgggatatggcgcggccagacgatgaggagggggcggcggtggcgcccggacacccgctcgcgaaaggatacctcccgttgccgaggggcgcgcccgttgggaaggagagcgtggagctgcagaacgggcccaaagcgggcaccttcccggtgaatggggccccccgggacagcctcgctgccgcctcgggagttctgggcgggcctcagactccactggccccagaagaggagacccaggcccggctgctgcctgcgggcgcgggagctgagaccccgggggccgagagcagcccgctgccccttacggcgctctccccgcggcgcttcgtggtgctcctgatcttcagcctgtactcgctggtcaacgcctttcagtggatccagtacagcatcattagcaacgtcttcgagggcttctacggtgtcaccttgctgcacatcgactggctgtccatggtgtacatgctggcctacgtgcccctcatcttcccggccacctggctgctggacaccagaggcctgcggctcaccgccctgctgggctccggcctcaactgcctgggtgcctggatcaagtgcggcagtgtgcagcagcatctcttctgggtcaccatgttgggccagtgcttgtgctcggtggcccaggtgttcatcctgggcttgccctcccgcatcgcctcagtgtggtttgggcccaaagaggtgtccacagcttgtgccaccgccgtgctgggcaatcaggtaagtactggagtggtaggtgaaagtcagatccttaaaagaccggaaaaagtcataggccgtgagaactatggcctgtatggatgaactgccccaggaggtatttgtctataaaagaggagatgaagccgttgaataggaggccgtcttggattgaagtgggctataaatttctttgt

SEQ ID NO: 4240 - DNA, 6000 bp, Homo sapiens
tcaggtgatccacctgcctcagcctcccaaagtgctgggattacaggcatcagccaccgcatccagccttatgtcatctatttcttgacaccaataacagacaactactctagtcagtaattagttgtcaatatatatttttcttacttaaaatgtattatttaaatataaaattagcacatgtaaatttatagttaaaacattcatgaatttgggccaggcgctgtagctcatgcctgtaatcccagcactttgggaggctgaggcaggtggatcacctgaggtcaggagtttcgagaccagcctgaccaatatggtgaaactaaagtacaaaaattagccaggcgtggtgacatgaatctgtaatcccagctactcgggaggctgaggcaggagaatcaccagaactcaggaggcggagattgcagtgagccaagattgggccattgtactccagcctgggcgacagagcgaaactccatctcaaaaataaaataaaaagaaaagaaaagaaatagataacataaaattcttacgattatttgcttgaagtgaataaagaatgttttctgtattactcttctatgaattacagtagtcaataccattcaatctcaactgttatcactattgaaatggcctcaaaaataaactgccctttcaaaaatcaagcagatggaaaaggaaaaatccatattgatttcaaaagtacagctgccctcatctgaaaactacttcatcttaaatttcctaatatgatcatggctggctgcgattcaccacagcttccaacagccgactggagagcgtttttccagaataactagtatgtttgcttcaagacaaattatttgacaaggttaaggaaaagatgtgaaagctagataatccattaagaatctttttttaaaacttcaaggcattttatttatacttcttttttttttttttgagacagtctcgctctgtcgcccaggctagtgtgcagtggtgcaatctcagctcactgcaacctccgcctcccgggttcaagctgttttctgcctcagcttcccaagtagctgggattacaagcacccaccgccatgcccagctaatttttgtatttttagtagagacggggtttcaccatcttggccaggctggtcgtgaactcctgaccttgtgatccacccacctcggcctcccaaagtgctggaattacaggcgtgagccaccatgcctggctatacttcttagcttacttttttattacgcgtatatattaagaacttttaaaagtccaaattaaagaagcatgcctagacatcattaaaatagctatcaatgcccatgacaatcctgtagctcaaatagtttactttagaatgtcaaaattgattttgtaatagtcaggacaggataaacagtcgctatattaagaccatgtacgtgtccctagacctagttctttccctacgtctgtttttataaatgctggtgataaaccaggtctgattaatatataatcattttgtgtgattatgtaacggctataattctaggttatctttggtcaaccttaagaaaaatggcagtatatgtaatgacttttgcaaatgatcagtgctaatttgcagacttttgtttaaagagggtttaaacaaaataagaaaatttcatgattaccagttgctattaaatgaattgtaactttttttaaaaaaaaagaatgtccaagccaggtgtggtgctcatgcctgtaatcccagcactttgggaagccaagaagggcagatcacttaaggtcaggagttcaagaccagcctggccaacatggtgaaaccccgtctctagtaaaaatacaaaaagttgctggacgtggtggcacacacctgtaatcccagctactcgggagggtgaggcaggagaatcgcttgaacccaggaggcagaggttgcagtgagccaagatcttgacactgcactccagcctgggcaacagagcgcaactccatctcagaaaaaaaaaatggtatatccagattcacattttttttcaaactctgcatttttctttctttcttttattttttaatgtttttgagacaaagcctcactctgtcacacaggctagagtgcagtgccacaatctcagctcatttctcagctcattgaagcctcgacctcctgggctcaagcaatcttcccacctcagcctcagcaataggtgggaccacaaacatgggccaccacgcccagttaaattttttttttttttttttgagacggagtcttgctctgtcgcccagtctggagtgcagtggtgcgatctcggctcactgcaagctccgcctcccggtttcatgccattctccttcctcagccccccaagtagctggggctacaggcgccccccccaccatgcctggctaattttttttgtatttttagtagagatggggtttcaccgtgttagccaggatggtctggatctcctgaccttggagaccgccttggcctcccaaagtgctgggattacaggcatgagccaccatacccggcataatttttgtattttttatagaggtgggtttttgccatgttgcccaggcttgtcccgaacccctgccctcaagcgatccccctacctcggcctcccaaagtgctcagactacagacgtaagcctccgcacaccttttggactggtgtgccagttcacacatgcctgtgatagcaactgcgttctgaactgcagggatacatttacttgtcagcacctgaaaacttcctcctgagttgagtccaattatcagcttcatgtgccatctgccaatccagatgaaacttggcaaatacaaagctgtccttttccaggtgacactccccaccttctttttcctccaccatttcattaacaactaaaaagctcctgcatgatcagacctgtgtatctatccatcatcaaatcccactcctttttcgagactgggaccctctggaggctgacccagccacgcatttgctagcatgccctgcagacatgaccctcgctgggctctgatcagccttcaggcctccactccaggtgtcactgttctgtctcccctctgctctcacagccttctctgctagatgtctcagccgtgctggccctctctatttcagaagtgaatgtactgagagggtcttagggacttattaataatgctcctggggtcggatgtagtagctcatgcctgtgatcccaatactttgagatcacttgagcccaagcgtttgagaccagcctgggcaacaaggtgaggccccatctctatcaaaaattcaaaaaagtagccaagcatggtggtgcacgcctgtgatcccagctcctcgggagactggggtgggaggatggcttaagctcaggtcaagactgaagtgagacatgaggccaccactgcactccagcctgggcaacagagcaggactctgtctcaaaaaaaacaaaacccactataaccataatactattatcacacttaagaaattcataattccttaatatcatcacatatccaattgatatctgagttcaattatttcatgtcaatgtttttaaactatttcaatcagaatctaaatgaggtcaacacgttgcaattggttggtatgtcttttaaactccttttaatctacaggtttctctttttttgccttgagtttcatttattagagaacccagacattgtcccatatagtctcccagagttggatcttgctagtttcatccccacggcctagtttaacacattcctctgtcctttctattttcttttttttttcttgagagggagtctccgtctgtcccccaggctggagtgcagtggctccgtctcagctcactgcaacctctgcctcccagttcgagcgattcccctgcctcagcctcctgagtagctgggattacaggcgcctgccactacgcccagctaatttttttatatttttagtagagacgggggtttcaccatcctgatcaggctggtctcgaactcccgacctcaggtgatggacccgcctctgcctcacagagtgcaaggattacagacgtgagccaccgcacccggccaaatgtcctttctattttctataaattaacagtcagatctaggggctcgatcagatttgtgtgtgtgtgtgtgccgtgtgcgcgtgcacagcatgttctttgactaggaggcacacctgctttggttatcttctttttgtaatctttaagttgctctttgatgtagacgtggtaactaatgttgaaacaaaattagtttcgtttcaaaacctttctttcaggaagaggttgtggttgattacttctgcgacaggtagatgcaaggttgagcaatcatctcttaacagaagtggtcacactagaataattcaagcacaacaacaaatcccacatcatcaccccctcttaataatggtgttttctttttacttgattagcttttaattgtcacgcactctgcattttttccctgaggtattatttccagaaggcagcgaaatatgactcaatggctaatttgctttttaaaaattaaacaaaacttaggccagctgccatttaagaagggctccggggcctccagactcggtgtgaccgtagccgtgcccggtgctcccctcgcggaggcgttagggcggcaggtttatctcacttgagaccattccttcctttttcatcttctccgggctccggcgcagcaggccgcaggggcgggcactcgcaagaacgcggcatcctggatggtggccgagtcaccgaagctcagaaccccgcgtcccagaatcgctgagagccggccccgcacgggggcctgggagcgccacgcgccctccacccagagaggcaggcgggcgggccggggggggcggggcctcgggactccgcccacgcctccgtctcctccgcgctccgccacagccggccgacaccacaccagccggggagccgccgccgccgccgccacctctgagcagccggctgggagcgagagccgacagctagtctgcaagccaccgctgtcgccatggggagccgcgtctcgcgggaagacttcgagtgggtctacaccgaccagccgcacgccgaccggcgccgggagatcctgggtgagggccagcgggcgccccgttatgtgcgtgcgtggcctcccggcgccggggcgcgctctcccctcgcgggccctgcgcggtcgtgggcgccggaggcccgttagcagcctgctccccgtcgcgtcccgtcgccgctcgggccgccagcccgcgggtcagcgcgggagaggctgggcgaggagcggggggagggacgggtcctcggagccgcgcagctccgacccttccgcgaagaggcgcaggcgcgtccccgagcgcgggagtccccgccaggcccacgccggccggttggggcgaagggtgtccccggctgtgccagccttgagtagatcttttcgctagaagattcctgtgccctcaggtgggcgccctttcctctcaccactccctctcctccggagcgggccgaggtgagcgggtgccggccttggggctgcctgagtgctaggcagggtgtggtcctgggcatccttgggcctaccagcgagccctgctcagggtgtcgggcgccggcgggcagtactggcgggggcggccgcagtcccggccttgggcccgttaagggggccggcgtccctccatatgccccccggggcttctcggacttgatgggccctggtcggttcacgccgcttgtcccattgatcctcacgacaagcctgggacgtaagaacggcggattcgtaggcatttttcatccatctcggttttgtggatgaaaagactgaaaatggaagacttgccaaataaggaaaatatgtggcgtggcctgctggtcccctgacagctaattgagaggccttaactctccagaggattcgggccttctgtgttacatagagaatgctcatctctccc

SEQ ID NO: 4241 - DNA, 6000 bp, Homo sapiens
agtggacccgagtgggttgccactgctcgctggggcagcctgcttttattctcttatctggccccacccacatcctgctgattggtagagcccagtggtctgttttgacagggtgctgattggtgcctttacaatccctgagctagacacaaacgttctccacatccgcaccagagtagctagatacagagggtggactggtgcattcacaaactctgagctagacacagggtgctgattggtgtgtttacaaaccttgagctagatacagagtgccgattggtgtatttacaatccctgagctagacataaaggttctccaagtcccgaccagagtagctacatacagattgtcgattggtgcattcacaaaccctgagctagacacagggtgctgattggtgtgtttacaaaccttgagctagatacagagtgccaattggtgtatttacaatcccttagctagacataaaggttctccacgtccccaccagactcaggagcccagctggcttcacccagtggattcaccacgggggctgcaggtggagctgcctgccagtcccgtgccgtgcgccggcattcctcagcccttgggtggtggatgggactgggcgccgtggagcagggagcggcgctcgtcggggaggctcgggccgtacaggagcccacggaggtcggggaggctcaggcatggcgggccgcaggtcccgagccctgcccggcgggaaggcaactaaggcccggtgagaaattgagcacagcagctgctggcccaggtgctaagcctctcactgcccagggccggcggggcccgcggggccggctggcagctcccagtgcagggcccgacgagcctacgcccacccagaactcgcgctggcccacaagcacagcacgcagccccggttcccgcccgcgcctctgcctccacacctccccgcaagctgagggagccggctccggccttggccagcccagaagggggctcccacagtgcagcggcgggctgaaggactcctcaagtggcgccaaagtgggagcccaggcagaggaggcgccgagagcgagcgagagcgagtgagggctgtgacgattgccagcacgctgtcacccctcagtgtgactggctaagcacataaggaagatagttgatgagtattttttttcaccttaagataactgagtatgtaatgaatattctgatagagatatgtacaaggtacaatgggagtttggtaatagctggtttaattaattagataatctgttaattgtatgtctagctttaacctgtgaaccctttatgaatctatgaacctgtactgcatcaggcaaatccagttgggtttttgtgttttttgttgttgttgtttgcttatttttttgagacatagtttcattttgttgcccaggctggagtgcaatggagcaatctcagctcactgcaacctccacctcctgggttcaagtgattctcctgcctcagcctcccaagtagctgggattacaggcatgcaccaccacccctggctaattttgtatttttagtagagacggggtttctccgtgttggtcaggctggtctcgaactcccgacctcaggtgatccgcccgcctcggcctcccaaagtgctaggattacaggcgtgaatcaccgcgcccggctcagttggttttgccttcatagtaattctcctgttctactctccatgtgatctccctgctgacaaacttgtttccctttcacacattcagtgcgctaaatagccagaatgagattttaaaaatgtaaatcagattaagctacttttttgcttagaactctgcagtggtttctcatcatattaggataaaaatccttgccaagggtctacagggcccatataaccttaccctgcctccttctcttcctctcagcactctctcacccttttcccctgtgctttagccacaagaccacagtagtctttttttctattcctttaacacatcaagcctctatatacaactgggcctctgaaattattgttcctactttctgaaacattctgcccgcagaccttcacatagctattgttcaaatttctacttaagtgtcatttcctcagcttggctttctctgatcactccgtctttccccatccccttccaagtacttatgactgcctgtcattagtatatttattttgtcgtctgtctttctcactgtaatgtaaaccacaggcttgtggggacttttcccaaggtttggaacagtagctcatatattctggctgctcagaaaatattggttgaatgaataaataactttgacacaaccgctcacagagcttatcactgcttgaagttatctttttcccatactttgttatactttattgcctgttcctcccactcaccctactagagcagcaacttgtttgccttgtttatttttatatctctggagtctagagcagttcttggcctatagcaggtgtgttgtcagtaaatacagcagtctcatccacagttttgctttcactggtttcatttacctgaggtcaatcacagtcctaaaatgttaaatggaaaatttcagaaatatacaatccatgaattttaaattgtgtgccactcttaggagtgtaatgaaatctcctgctgctcacttcatcctgcctgggacatgaattatctatccccttgtccagcatatccatgctgtctatgccacctacctgttagtcacgtagtagccatcttatcagttatcagattgactgcagcagtattgcagtgcttatgttcaagtacccattattgtacttaacaatggcccaaagttcaagagcagtgaatactggcaattcagatatgccaaagagaagccatgaagtgctccctttaagtgaaatggtcaaagttcttgacttaaggaaagaaaaaaaaaccctatgagactgctaagatctatggtaagaaccagtcttttatctgtgaatttctgaaaaaggaaaaaggaatttgtgctagttttgctgttgcaactcagactacaaaagttatggccacagtgcctgataagtgcttagttaagatggaaaaggcggcacagcacagtggctcatgcctgtaatcccagcactttgggaggtcaaggtaggtggatcacttgaggccaggagtttgagaccagcctggccaacatggcgaaaccccaactctactaaaaatacaaaaaattatctgggtgtggtggcatgcacctgtaatctcagctactccggaggctgaggcaggagaatcgcttgaacttgggaggtggaggttgcagagagctgaaatggcgccactgcactccagcctgggtgacagagtgaacttcatctcagaaaaactaaaacaacaaccacaaaaaagatggaagaggcattacatttgtgggtggaagacatgaacagaaaacatgtgccaattgatggcaacgtgttgagccagaaagtattgagcctatacaaagacttcagtgagggattccctaaaacgagtgataccaagccacttactgcaagtaatggatagttacatgaatgtaagaatagatttggactgaaaaatataaaaatcactggagaggctgcatctgtctcttcatcttatcacataggcattttatcatcatacatcatctcaaaaagaagggtcagtacaataagatattttgagacagaaagaccacatttacataacttttattacagtataattgttctatcttattattacttgttaatctcctactgtgcctgatctataaattaagctttatcataggtatgtatatataggaaaaaacatagtacacataaggtttggtactatccatcgtgtcaggcatccacttgggggtcttggaaagtagcccctgcaaatacaactgtatttgttaaatgaatgaatggatgagtaagacatcgtattcacttcttaaagatcttaaaatctagagaggagagaaacattgctgtaggagaggataaacaaaggactgtgaaatctctggagaaattgaaatcaggaagggaagggcaaatcgcaaaagtcaagccaggagcattaagttagatttgtgctttgagatgaaaaccccttacaaatcctaagtcagggaatgcaatggttctagagccaactctaaagaaaatttcacacatgggaaatacatcctactggatatccggattaaaagcgttcagtagagactggtgcagtggctcaggcctgtaattccagcactgtgggagactgaggcaggcagatcgcttgagccgaggaattcgagaccagcctgggcaacatggcaaaaaccccatctctattaaaaatacaaaaaattagccaggcgtggtggtacattcctgtaatcccaggtactcaggaggcggaggtgggaggatcacctgaggccaggaggtagaggctgcagtgagctgtgaccatgccactgcactccagcctgggcgacagagtgagaccctgtctcaaaaaataaaataaaatgagaaataataaaataaaattagctgggcatgtcgggaggctgaggtggaaggattgcttgagcccaggaattcgaggtcatagtgagctctatcacgccactgcactccagcctggacgacagagcaagaccccagctctttaaaagaaaagcgttgagtaaatacttgttgattaattccatttctggaaataatcggatttatgaaagaggccctgcccacctctttgatatggacttgtactaatgaactacaattcccagcatgcgtcagaattagggccgtagagttttttaaaatatggactacaactcccggcatgccacaccaggattcgaggaccacacgcctcagccagccccggcaagggcctatcaggggtgggtcggggcatccgagcgggtttgacggaaggagcggcggcgacggaggaggaggatggaggcggtggtgttcgtcttctctctcctcgattgttgcgcgctcatcttcctctcggtctacttcgtatccttgcctgaggcaggcgaacgccttgccgggggacacggctgagggtgggccagttgggcacccgggcaggtgtgtgggactagggaggcgcccggcggcgggcgtgggctccctgggagctggcctggccggggcggtggcgcgggccccggagcgggtaggagaggctggctgccctacccgacgggccctgctgccctgcacgcacttgccctgcctgggttgccggccgcccctcactcgggtccgagtgggcctctccgggcgcgccccgtctcggcctgcccgcctgctctccgctcgtccccgcggcgcccggaccagccctgcctgagccacggccgccctcgggagagaagcgtcgctgtttttctgggagaggccctgcgccgtgctcttcgtcggatattgggggtcccaagggcggtcgcttgcgacagtcgggtgccgggataagtgcgggccatttgcctcctcctgttccccacgcaacacccccggcacccgcccctttgttctggcgggtgttagtacttgcagggacctttcacatccaggagttgactcattcgccaaaggagcgaagttgcttccttcactgtgccgttttgtagtgagtgttggaaaggagttgttttaacaactgtctacaaagtgattattttggttgtccccggtggttgcagatctgtaaattcaataactacatctgctgtagttcccaatcgtttctcagcttttaaatttttctatcgatccatgttaaaacttaagttgcagtattcaaactgttttccagagcaataaatggtggttgaatttagcactgcagtagccatgtcggctacaactcttcccatctcttgacaaagcatctaggcttagttgttgcccaatgttgtattgcaccatccaggtttaagtaattaaatataagaaa

SEQ ID NO: 4242 - DNA, 6000 bp, Homo sapiens
tcctggctgcatggtgggtggggaaaaaaatcaagtaattggcttttcaatgtctacagtagagaaaacaatgtaggttggtcactccactcaacatccattcccaatcaccatctcccttgccttcctctactgtgtcactagtactttttgatttttttaaacactgccttgtgaaggaattaccgcctcaccaattagactagaaaccttgtggatccctgacagcgcccagaactatggacactaaaatattttgaaataacgagcagtaactgcctggggttcttattttctgaagttttgcagtaacctttgccgagatattgttctgtaactaataaaacaaggcaaagcaggaccaggtaaatggcaagaaaaacagtggctggatggagacttgaaagtcacagtggtaggataatggattccatttttaaatttgaaattttattttgatgtagagactcttggttctggtgatgctgtgctagtgaattcagaccggttctcccactgagcacaacttataaagctgaatgaaatacagtaacatcttcttgaaagcatcaaagacctaataagagagtacggaattactggggtcaaaagctgagagtgattcagaatctagaggggttggtttagctcttggggccagtttttttttctaggggcatttcttaatcttgaggaggtggctgaggtatgcttttaggggcatttcttaatcttgaggaggagactgagctatgcctttagtactctgtggcgctaggggcaaaagtcagagtccaaggaccatcaagggttgggacttgataagccctgtgttttgacttgggatccagaaggacagctccatgtgagtaaggctgaaccagaaataaagcagccctcacacagaccacagttatcttggtcatcctggaaaatctcaaatgctgaatttggattaaggtaatcctggagcactaggttcccctagatacctggcaaaagaagttgaaaatcctccctggagaaagataacataattttaggcctcaaatgactgtaagaaaacttttcaaaacaagtttggcacagtaaaaatctactagatggataagaagcgaggactccgtaaacaagaaccagcagaaacaaaagatcagagaggtcccaaagggactcagaattttggtgtcacgaaattttatacagtacaattactacaatgaaaagaaatgatctatataaaataaaaagcaaaaaaacagctagaaagaaatacaccaggattgtgttggtggtatctgagagcagcaaactgtggtgtttatctttttcatttttatattttccaaattattttatatttttgagacaggctctcgctttgtcacccgaggtggggtgcagtggcatgatcacagctcactgtgccttgacctcttgggctcaagcaatcctctggcctcagcctcctgagtagctgagactacaggtgtgcaccaccatgcctggctaattttattttcatttttgtagagaccgggtcttaattatgttgcccaagatgatcgcgaactcctgacctcaagtgatccacccgcctcagcctcccaaagtgctgagattacaggcatgagccacagtgcctgacctccaaattttctttaatgacaatttatactggaagaaatacttctgtaaaagagaaagcaacatagggtataacccagagcagggctagatttgtaggcattcaacttctacagctgtccagggtcttgtgctcagaagggcctcatgcttggcttaatgttctgctgttgctgtcttgaaattattaatttttaatcaagaagcttgatatagtttgggttatttgtccctgcccaaatctcatgttgaaatgtcatccccagtgttggaggtggggcctggtgggaggtgtctgggtcatgggggtggatccctcatggcttggtgctgtcctcgcaataaagagagtgttctcacaagatctggttatttacacgtgtgtggcacttctccacaacactctcttgctcttgcttttgccatgtgacatgcctgctcctgcttcaccttctaccatgaataaaagcaaccctgaggcctcccccgaagccgagcaaatgctggtgccgtgcttgtacagcctgcagaacggtgagccaattgaacctgttttctttataaagtacccagcctcaggtttttgttttttttttttgagacagggtctggctctattgcctaggctggagtgcagtggtatgaacacagctcactgcacccttgacctcctgggctcaagcaacactctcaccttagccctgcaagaagctgggactacaggtgcatgccaccacacccggctaatttttgtattttttgtagagatggggtttctgccatgttgtccaggctggtctcaaatacctaagctcaggtgatctgcccacctcgacctccccaagtactgggattacaggcataaaccaccatgcctggccaggtatttctttatagcaatgcaagaacggcctaatacaaagtcccacattttcattttgcacttggccctccaaagtatgtagccggtcctgacccagaggcaataaaatgtagatcggttcattgctctggtcatcagcctctggatttgctctaatttctccacttctcactgaaaggcatctagtttctaaactggagggagatatgaggccaggcactgtggtgcacacctataatcccagcgctttgggaggccaaggctggaagactgcttgaggccaggagtttgggaccagcctggccatatattgagacctatgtctgcaaacaaaacaaaacaaaaattatctgggtgtggtggtgcatgcctgtagtcctagcaaggagtttgaggctacagtgagctatgatagcaccactgcactccagcctgggcaacacagcaagactgtcttcaaaaaaataaaataaaataaattgaagggcctggagcggtggctcacgcctgtaatcccagcactttgggaggccgaggtgggtagatcacgaggtcaagagatcgagaccatcttggccaacatggtgaaaccccgtctttactaaaaatacaaagattagctgggcgtggtggtgcgtgcctgtagtcccagctactcgggaggctaaggcaggagaatcgcttgaaccagggaggtggaggttgcagagatcacgccactgcactccagcctggcgacaaagtgagactccgtcaaataaataaataaataaataaataaataaataaataaataagtaaaagatgtggccaaatagctgcaggaatgttggggcatagtagaaagagcccaggattaggagtccgcagacaggattccagttctgtcactagaaagctgtatctctatcttgctggaattcatcccttccagctctcaaggcattggaatcacatctgtgaacaggaaaactagcacaccagagtcagaatcaagcaatagttatttatctagttcccaccctgtgcaaggtaccaggtgctctaagattcactccaatccatgaagtgcgtctactctttcaccgagatttgccagtcgtctttcagggtatttttccttgctttctggatttgatgacttgtctgaaactgaagttctctctggaatgactggacctctttcactgcagcgtcaggaatctcttgcaaagcaagcatggtgaacttccaagatgctgggccactgggggaaagggtgcaattaataatccctaccacttattgaacgtataccaagtgctaggttttttacttatgttcccttttaatcctttgaaatggcttgactctactcttatttatgtttttctgataaggaaactaaggattaaagaggttaggtaacttgcagctagaaaacggtctaccttcaaaagcatcctcttgacaattccactaggaccaacaccaataccaccgagccctcgttgctgcctcttcagcgcagaatagcccaccaagtccacgtttccctagtcccaaggtcggatggctggggagggtagaggatgcaacggaaggacgttaatggagaattttgcagggtctgggagcagagcagtaaacgcagccctaagcactgagtatgctacagtttggtaaaatccatccaagcagctttgggatccaaggcttgcactgtatccccaaccaacactaggcaacgccccaagtccccacacttcccactccgataggcgaaactgcaagaaccgggaggggcggctgcggcgtttaggcgcgaggcacacaccatacccttccgcagcttcccacctcctccagacgcacgtgtttaaagagtccctgctccaaccggtcccgccccacctccgctcggcctccagccctgcttgtactgctggcttcaagtttcctccgagaggcgggcgtgcacagctgcagtggcggcggcagcggccaccaagcgcccggcggcgcttcgccacccacctttcctcagcccccggcgctgcagtctccgcccgccggggagggcgcgctcagcggaacaggagtcgagggtggggcgccgagaggagggaatcccgggtcgcaccgctacagttctcgcagtggcaaaggcggcggcggcggcggcggcagcggcagcagcaggtggagcgagctacagcgtttggcctgaaacccactgctgcagccacccgggctggagttggcccgttgggtggagccagtgctcgccccggtccgacccccggtttccgggacacttgggttgcggaggccggctggccggagtcacggttggggacgggcgcgcctcggagcgcacggctgcgctggaagccgcgtctggggcgcaggaccaacgggacctacctcctcccggctacctaaagactccttctctcgggaaagagcgctgcccggctctgggatttgggaggagctcggaggccgctcgggcacctcgctggacactatccgtttgcgccccggtggcgcgggagggtccggagcggagcgctcgtctctcctcagcggtttagtggagaaaagcagagagctcttcctggggcgaatgggacctcctccctcggtcctccgtggagtcgtcgcatcgcttgtcgtgttggtctcgaggggctcacagcttggcactaatttgcaggtgttcgctgctgatttggtttcttcttcgatttgcggacggttccctccagcgactctcgacacacgttttcctgtcttcgccggagggccgggtctggggtcgccggagcctgcgggaatccagcgcttattcgctgaccctcgagtcgcttcgctagctgtgcgccctcctgggcactagcctggagaggagcgtgcagacgcggctccttggagggagtgcggtcctctagggaggcatcgggctcctaggggcttcttggcgtgtgtggtgggattggggtccgccggccatggccttcactttcgctgcgttctgctacatgctgtctctggtgctgtgcgctgcgctcatcttcttcgccatctggcacgtgagtaacacgctttggtctctcttctttcgccccaatttcgctaaatttccccgatttcaccccactttttccaccttgcgggcgtgggcgaaccggaaggttggaccttctgccgctccactgtcccggggcaggaggcagttcgctgcatcccgccgggcgcgccttcggtgccctggctggaggcgaggggccgctggtgcccaggtaggacaccctctgcagggcccgactgggcgtcccgggtcccgggcgccggggagtggcggctacaaccacaactaaccccttcctctcccgccccgtcctctcctgccggcgggaggcgaaggagaagcgccgccgtcggtcccggcaattagtcaagtagctataataactaaacatttaaaa

SEQ ID NO: 4243 - DNA, 6000 bp, Homo sapiens
taggcgcctgtcaccacgcctggctaattttttgtatttttagcagagacggggtttcaccgtattagccagaatggtctggatctcctgacctcgtgatccgccggcctcggcttcccaaagtgctgggattgcaggcatgagccgccgcacccgcctccccttttatattttaactcccttgttttgctggattatatcctctagtaagtacccaagacaaggtgcatgagaagtaaaaacgtttttagtccctgaatgtctgaaaatacctttaatttgtccccacattttattatagaattgttagaaatacttttcccatagacatttcaaggccttgctgcactactttatgacagccagtgttgctcttgagaagtctgatgatctttgtgttgacctttttgaaaatctttccctctctctagaagctgttaggatcttccctttttctttagcattctgaaatttcacaatatgtctcattggtacgggttttctaacttttgagcgtgcctttttgatctggagctacttgtcctttggtttgggaagtattattggattatttctttaattatttcttttgtttggtgttctcttcctctctcatataactcatattagtctgggtgcttcctggattggtcatctgattttcttttccttcccctacccactgccgcccgactgtccatctctttaatttgtgttctgtttttctgggagaattctcaattctatctcctgacttttctgttagaatttttatttcaagaagtattatctaattctctgaatgttcctttttttcaaattgtccctttttcatagatagaattcttctcatatcttcaagggcattgtgatttctttgaagatttttctgctttttgccttgtctctgttgcctgtgagcaatttttctctattttgggctttgcctttcatgtcacaggctttgcccaagtgtttggtgatccttcagtatttagaaatgagacactaaaacatcaattgaaagttctgtgtgtggtgggtagtaaactgattggcctcaatggcaggtgatcaaatagggagtcagctgttttgttatggggcctctgaatgtcattagctgtagataatggtaattaatggcagtaaacttacagtaaagttgcaaaactcccatacatgtcttacccagacactaattgttaacactttgctgcatttgctttctaattcaatatctctgtgtgtgtgtgtatatatatacacacacatatatacacacacatatacacacacacatatacacacacacatatatatacatacacacatatatacacacacacacatatagttcctatatatgtgtacacactgaaacattttaaatttcaaacatgattccttaaatattaggttggtgcaaaagtaattgtggtttttgccattgaaagtaatggcaaaaccgcaaatacctttgcaccaactgaatacttcagtgtacatttttttaagatcagtgacgttcacttaagaaacaattcagttttcaaactcaagatatttaacattaatataatctattattgaatctacagaactccttcaaatttccccaattgtcccaacaatattctttatataaattttttttctgggccaggatccaatctagaacagagagcactgcaatgaggtttcgcagctcttttgtcccccttaatcaggaagagcttctcagtctttccatatctttcattacattgcccttttttcacactgacatttttgaaaagtgcaagccagctattttgtagattttttttttttttttcgagatggagtttcgctcttgctgcccaggctggagtgtgcaatggtgtgatctctgctcaccacaacctctgcttcctgggttcaagtgattctcctgtctcagccccccaagtagctgggattacaggcatgcaccaccatgctgggttaattttgtatttttagtagagacggggtttctccatgttgttcaggctggtctcaaactcctgacctcaggtgatccacctgcctcggcctcccaaagtgctgggattacaggcctgagccaccgcacccagcctgtagaatgttaatgtcgggtttgtgcaatgtttcctcatgattctatccatattgtgcatttttggcagaaacaatgttgtttcctttttgttgaatcaggaattgatctacaatttttatccaagattgcctcccacacattatttcattctacctgatgtacctggaaactctccagatgtttatgcagaacaacagccttgctctgattttttacacaatataatttattctaaagagcacactgtacccattcttttgccccgtaaacctttcaatggcttttagccaaaagcagtgaaaatctgtctaaattttgccctgctgagttggactctgatgcatttgtttctacactgcccatatgtagactgtacttagaaatatcttgcactattttagatttcgcagcccaacgctggatggatgattaaccaagtaggagggtattaggatacaagaggttgccattttaatgcagtttttgaaaaacaacagctttggccacacctggtggctcacgcctgtaatcccagtactttgggaggccagggcaggcaaatcacttgaggtcaggagtttgagacccacctggccaacatggtgaaaccccatctctactaaaaatacaaaaattagctgggtgtggtggcaagtgcctgtaattccagcggcttgggaggctgaggcacgaggatcacttgaacctgggaggcggaggttgcagtgagccgagattgtgccattgcgctccaacctgggcaacagagtgagactgtatctcaaaaacaaacaaataaataaataaaataacaactgtattgagacataattcacatacccataaaactcaccctttaagagtgtaaaatttcacgggttttggtatatttacagacttgtagtgatgtaaccatcaccaatatctaattttagaagagttttgatgcagggcagctgagaccccagattgggtctcagcccagcagggtttttagctttgtccaggaaagaattcaagagagagcccgtggtgtgagacagcaacttttatggaggtggcggtgtccagcagcagcagagggggcctgctcctgcagtgcagggctgccccacaggcagtgtgctgagagcagcagctctgggcgattctgcagtcatgttgatacccacttttagttacatgcagattaaggggcagtttatgcagacatttctaggaaaagggtagtaacttttgggtcctcgggtcattgccatggaaggggggtgataactccaggggcgtgccctggtaaactgacatggcacactgatatgatgggcatatcttatgctcatcttccacccagtccctgttttagctagtcctcaatttggtcctcaatctggtgtccaagccccacctctggcgttaagtcctgactcctacctgtttcaccatcactgcagttttaagagtaacgaatttgggtcccctggtgaagtggccagaggcagagcttctgtgtgaactatttggaggggaggggaaagaactctcccagactgcaggttctgaaaggaatacagagatgtcagagactgcagttgcaagagaaagcttttataggagggtgtagaattaaaggacaagaggactctacatgtggatggaggagggcaccctgtccggcagtactgcaagagcaaaagtttggaggtgggagtgaggtgagtgcgtctgccggccagaattcttgggccagggtgagcagaaaggttggaggccaagggaaggtgggtggtggtgaaccttatcctgaagtgtgcaaggtgacagtcagaagcttagaactccagccacgggccctgcatgtggcctcctagctgtagtctgtccaccgagatcgtgaggatgctggtggttgaaagaactgcacctctgagcaggtgaagagagaagctaaggaggggtgatggcagaggcgatgggacaggctttctaacgatgaggggctggggatcaacgctctcacggaagctaaaagagccccagcaaccacccgcctgggccctgagctctctccaaagcgggaggggattcactaagaggttgctcccctggcattgaactcagcatcctatactggtcctcaccatgaagacccccaagagtgcttcagaccattgcttctcacattctctgtataaagacactaatttgtttttagatttccaagcatgtcacggaccaatatgtttgttaaatatactaagaatgaattgctagaaagatgaaattaaaaagacatacaccgccaggtgcagtggctcacgcccataatctcaccactttgggaggcggaggtaggtgcatcgcttgagcccaggagttcaagatcagcctaggcaacaaagtgagacccccgtatctacaaaacttaaaaaattagccaggtgtggtggcgcagtctgtagtcccagctattctggaggccgaagtgggaggatcgcttgaggctgcagtgagccgagatcgcaccactgcactccagcctgggtgatagagtgagactctgtctccaaaaaaaaaaaggacatacatcatgcaagtttggatttttgtttttagattcaactgacgaagttacgggatcaaactgctgtaggagctgccaaacgcttctctccatttctggccgcggggccgcggaccgccctttaagtagcccgttttatccctggcagaggtggagccttaggcaggcctagagactttcccgggtcctccaggccggggaacgccccgctcggaggccgggcttgggcggagactgcgccggggctgctgaaaactagccgaggagagccagggagccggagagatcgcgcgcctgccgccgccggagcctgcgagccgagaccgtaagcgcccggggccggccgggcccgcactccccggacgcagacgcggttcgggctccgcgcgggctcggccgccggggtgggcggcgggccggggcgccgaggggtcggggctgcggtcggcccgcaggggtgcagagggacttgtagttggtccgcccccagctcctgccccggccaggagactgcgcgtgccgcctactgggggaaggagcctgcaggcgaccgcggacttctcgcagggaattccgcgtcccagactgtgggcggacgccgcagggagggaggctcgcgaccccgagagcgcaccgcgtcccctggcctgggcgagctctgcttccagggccgtggctcgctcggcggtgaaatgcacttaatttgtcacccaagtcggaacactgattttcatgcgcgtccgtgtgaagagaccaccaaacaggctttgtgtgagcaacatggctgtttatttcacctgggtgcaggcgggctgagtccgaaaagagtcagccaagggagataggggtggggccgttttataggatttgggtaggtaaaggaaaattacagtcaaaggggggttctctggcgggcagagtggggggggtcacaaggtgctcagtaggggagcttttgagccaggatgagccaggagaaggaatttcacaagacaatgtcatcagttaaggcaggaacaggtcattttcacttttgtggtggaatgacatcagttaaggcaggaaccggccatctggatgtgtaggtgcaggccacaggggatatgatggcttagcttcggctcagaggcctgacactgatcacaccttttagttgaaatgcgctttcatctccatctgctgccgcagccgccgcccggcaccccctcgctctggtctcgggattgaaggccagccctctcctcttgtagaacaggaaacttgcccgggagttcaccttgtagttgaagccagg

SEQ ID NO: 4244 - DNA, 6000 bp, Homo sapiens
taacagcagcaaaaaaaattagaaggcataccaagaaaaaaagaaaagtataacccattcacaggaaaaagaaactgacagaagccatccgtgaggaagcctagacattgaacttgccaggcaaagagggctggactgttcagccctaccccttgacctcctgggtcaatgattttatggccaatgatgttgatcaatcaatggtgcctacgcaataaaacttccataaacacccccaaatggctacgtctggggagcttctgctaacttcaggtacatattatcagaattgaattgaattgtaggacacacacttggtgtctggagaattgtttttgtgtggaataaaaaaaccacacacttggtgtcagaagtgttgtgagaaaaaatagttcagagaagtattccctcctcttctatttcttagtagagtttgagaattggtgttaatttttctttaaaggtttggcagaaaattcaccaagctgaagccatctggtcctgctttaggggaggtttttgattactgattcaaccttttttttttttgtttgtttttgagatggagtctcgctctgtcacccagactggaatgcagtggctcaatctcggctcactgcaagctccgcctcccgggttcatgccattctcccgactcagcctcctgagtagctgggactacaggcgcctgccaccacacccggcttttttttttttttttttagtagagatggggtttcaccgtgttagccaggatggtctcaatctcctgacctcgtgatctgctggtctcaatctcctgacctcgtgatctgcccgtctcagcctcccaaagtgctgggattacaggcttgagccatcgtgcctggccttactgattcaacctcttattggattcaatctctttacttttcctagcttgttcagatttatttcttcctgagtcagttttggtcatttgtgtacagttgttcacagtattcacttaaaatgcttttttttttttttcctgtaaggtccatagtgatgcccctactttcatgtctgattttagttatttgcatctttactctttatttctcagtctagctaaagatttgtcagtgttgttcatcttttcaaaattttcatttcagctattgtacttttcagctccagaattttgatttggtttatttttcataatttgtctctttgctgatattctgtttatacatttattgtttacctggcttcctttagttctttgtccatggtttcctttagttagttaagcatatttaagaccatttaaataaacgtttaagtaaacttttaaacatttaaataaaagtctttgtctagcaagttcaatgtctaggcctccccagggatggtttctatcaatttctttttcctgtgaatgggttgtacttttcttttttcttggtatgcttcctattttatttatttatttactttttggttaaaaactgggcacttcgggcctggcatggtggctcacgcctgtaatcccagcactttgggatgccgaggtgggtgggtcacaaggtcaggcattcgagaccatcctggccaacataatgaaaccctgtctctactaaaaatacaaaaaattagctgggtgtggtggtgggtgcctgtaatcccagcaactcggaaggctgaggcaggagaatcgcttgaacctgggaggtggaggttgcaggctgctgagatcgcgccactgcactccagccctggtgacagtgggagtctctgtctcaaaaaaaaaaaaaaaaacaaaaactgggcacttcaacctgaaaaagctgattgaaagaaaaaaaaacctgggcattttgaatattataatgtggtaactctggaaatcagatcctgttaatgcttattaagggctgcagtcttctgtttgtttagatcatgccttagtctttctggccaccagcccctatcctgaagctagtcaggggtccccagccaccagtcatttcattagcataccaacaacattcatcacacctgagattccaaaggttttagaagcttgtgccaggaacggggataaagaccaaatatttatttttattatatcacaacttcctaactcatttattgagtcattatgcttcaccttagggcatatgcagcctcttcacattaggggaaattcagcctatcaagtgcaacactgaaagctaaataacaacaacacaacaacaaccaatcagggatgggcgcggtggctcatgcctgtaatctaatcccagcacttcaggagaccgaagcgggagggtcacttcaggtcaggaattcgagaccaccctggtcaacatggcaaaaaccccctctctactaaaattacaaaaattagctgggcagggtggcacatacctgtaattccagctaacttgggaggctgaggcaagagaatcacttgaacttgggaggcagaggttgcagtgatctgagatcgtgccactgcactccagcctgggcgaaaaagcaagaccctgtttcaaaacaacaacaacaacaaaccaggttggggagttatttcccaggaattctgtagcaagggctcatatgcatcagttagagttggactttgtgaccttcaggtgtccttccttttccaagaatcgattatttttataattctgttaaatgtaattaatttctcaaatttatcaaagatcattatttggaccattattttcttagccaaaatgctggcctgccccagttccatccagggttaatctgcatttaaacagctctttgaaaatatttggttttccccatccatctatggccaattgatttttgacaagaagccaagacaattcaataggaaaaggacaatctcttcaacgaatggtgctgggacaactagaagtccacatgcaaaacaatgaacttggaccctaacctcacactacatacaaaaattatcttaaaatggatcaacaacctaaatataggagctaaaactataaaactcttagaagaaaacacaggagtaaatcttcacaaccttggatttgacaatgatatctcacacaggacaccaaatgcacaaacaacaaaagaaaaaacagttaagctgaagttcatcaaaattaaagttttatgtgcatgaaaggacatcagaaagtgaaaaagacaattacagaatgggagagaaatatttgcaaagcatatatctgataagggtctagtgtccagaatatataaagaactcttacaacccaacaacaaaaagacaacccaattttaaaatgggcaaaggacttgaataggcatgtctccaaagaagatatacagatggccaacaaacacatgaaaaggagaatgcttaatagcattagttattaggaaaatgtaaaccaaaaccagaatgaggtaccgctgcacacctactaggataacaataaaatggaaaataacaagtgttggtgaggatgtggagaaattgggatcctgtacattgctggtaggaatataaaatggttcagccatcgtggaaaccacttggggttccccaaatagttaaacactgaaggctgggcacggtggctcatgcctataatccagcactgtgggaggccaaggcaggcagataacttgagttcaggatcaagaccagcctggccaacatggggaaaccccatctctactaaaaatacaaaaattagccagatgtggtggcacacacctgtaactccagctactcaggaggccgaggcaagataattgctcgaacctgggaggcagaggttgcagtgagccaagattgcggccactgcactctaggctgggcaacagagcaaggctctgtctcaaaaaaaaaaaaaaattgaattaccatgcgatccaacaattcaacccctatgtatgtaccctccccaaataaaaatgggctctcaaacaaatacatgtacatgcatgttcatggtagcattattcacaaagccaaaagatgcaaacagccccaatgtccatagatgaataaactgtggcatacatgatacacacacacacacgcacacacatatacatatacacacacaaacactattcagtcataaaaaggaataaagtctgttacatgctacctgaggatgaacctcgaaaacatgctaagtgaaagacacaaaagtccacacactgtgattccgtttatatgaagtatctaaagtaagtaaatatagagacagaagtagactggtaattgccaggggctgggggggaagagggcattgggaagaaacttctcaatgggtatggggtttttctttcggaatgaggaaaatgttttggaactagacagaggtggtggttgcacagcattgtgaattcactaaatgccactgaaatgcccactttaaaatggtaaattttatgttatgtgaatttcaccttaagttaaaaaaaaaaaagtaaaactactcagacaacgccaaattattgacaatctcaacctaccccacagaccccaaatcctggaaccacaaccccctaggccaattctcaggtcaggcagcaatttattcctgttcaattttatgcagagctcctggtggctctgaagcgccctagggaacagaccaggaacattctcatggtgttagctcacattgggccattagtgctcctttaatgtgagaacaaccgggaggaggaggggatgtggacccaaaactacaagaaagagtgtcctcgaagcctatgtcctaccgccccacgctgctgccaggcccgcaggaagatgacaggcccggcctccactccttctaaggtcgtcgcttagttccgacgtcgggatgaccctgtcatccacgcggcgtgaaggccaccctccccgcgcgcccgggactccaggtggggccccagtggacgagggaacgcggcgtcgcccaccgggcgtggcctgggcgggcgtggggcggggcctgggccggcgccgggtccggccgggcgctcagccagctgcgtaaactccgctggagcgcggcggcagagcaggtgagcgggcggtgccggggggtgcccaggccagggccctgtcgcctgcggcgctgagggcccggggtggggctgcgccctgagggccctgccctgccctccgcacgcctctggccacggtcccttccccggctgtgggtctgcggcccctgcgtgcgcagcgctcctggcctctgcggccagcgcgggggcggagagaggagagtgcccggcaggcggcggctgggccggcccggaactgggtcgtggaaggatcgcggggagcggccctcaggccttcggcctcactgcgtccccacttccctgcgcccgcctgccgccgagccccggctgggggtgggcgcggcgcgagcggttaaagggccggtgcatttaaaggagcggtgcacgtgggtctctgaggcgtgtagcaggcgggggcgttttgttcttcttctctctcgccggagacctccgttgcgccgagtccattcggcctctagcaccgggtcctgggcatgctttccccgggaaggaggcgcgcgggggctctgcccgcacgtgaggggcagggccgcaggctcaagcctagagccggtttctgttagcagcggtgtttggctgttttatcaggcatttccagcagtgaggagacagccagaagcaagcttttggagctgaaggaacctgagacagaagctagtcccccctctgaattttactgatgaagaaactgaggccacagagctaaagtgacttttcccaaggtcgcccaggtacgatatagcagagccaggcttcgaccccagtgtcctggcttctagatctgctgtccatccctccgagcagacctcacccctgtttattgccttaataagtattccctttgaaaggtatgaacggtgttgagtgaagtaactgcatccctatttacaaatggagaacctgagagcattccatagagacgattgtagactaacttaactcagaagc

SEQ ID NO: 4245 - DNA, 6000 bp, Homo sapiens
gggcaaggtaccagaggacagaggcggggacagggacacttccattccagacctagcagcccagcactcagcaccatgcatgggagcaaatggctggactcctgggtggggtgggggtctcagagcaggctcccagagggcttggaggtgactccaccaggtggggacggcagctcccaggtagggtgtcatcagagtagacagcattgcttgctagggacccctggggaggctgacagggtcagtgggtttcagttggggggctcccctgctgagaacccagtaaagccggccttccattcgtctcccgtgtgcccagagcctggtctgagggccgccctgtgcatgccggcccttccaacgtggcagagctcagggggaagaacacccaggctctcaggagactctcaggccaatgtctccatccctgggtcagccctttcctgccatgaattcaggaaggcagaggcagctcagcagatggggactagaggccgcactgctatccacagcctctcttctcacccccaggcatgtcgggccccaggcctgtggtgctgagcgggccttcgggagctgggaagagcaccctgctgaagaggctgctccaggagcacagcggcatctttggcttcagcgtgtcccgtgagtccagggctctcgtggaggggtgcgtagacctcaaggctgctgagtagtcctagcaccgtgagcaggccaggagcccaaacccaacaggcacacccaccctgcagactgtccgaactcttgcacactcccccccacacagaacctgaggttatcacactcctgctgtcctgcgtgcctgtgtctcccttccctgggtctgttgagtactgataactgggccacagtgtttctttctgggagaaccctcgccttgtaggctcctgcgccttcccagtggtgtgcttcactggctgcctgcatcctggggctcaagtgctgtcgggactgcaagggaaacgctgggtggggcattgggctccgagcagcccccgatgggtgacaggtctctctgctagataccacgaggaacccgaggcccggcgaggagaacggcaaaggtgagtggggtggggccctatggctggagcacccccagtgtgggcagggctgctgggccctgcagctgtgttggctgtgctgcccgtctcctgcccccatcaatccctaatctgtgagatgggtccttgcctccaagggccggtgaactcaatcagggtgtcagcgccacagcgtggtgtcgccttccttgggtacagtgtgagaggccggccaaggcctggggctgtcttcctcccaccttggaggcggccacagtgctgctgtccccagccctgtcctggactcggcacttatcagcacttttgagctgtcttctggagtcctggtaaaaagggctactctgcctgcctgattcaagacaagggacccccttcccaacagcacccccgccccttgccgtgcaacccagtggtctccagtcaccccaccacatcgtcccctctgtaacctgacggtctccagttcccccaccaccttcccccagaacctgttggtctccagtccccaccccatcaccaccaactcccaactccccactggaacccagcagtctcgtatctccatcagtgaggacagtgtgagaaatggtgtctggctcaggcacttggcagcacttgaggggtcctcagatgtctcctgcccagcaaggatctgactaaagcagtcgtgggtgtgggaggggcctgcaggcatgcctgggttgggggcagctggccctgggcaccctggtgcaggtccagtctgccctctggatggcccctcctcttccccagattactactttgtaaccagggaggtgatgcagcgtgacatagcagccggcgacttcatcgagcatgccgagttctcggggaacctgtatggcacgaggtgggccatgcgtgggtgtgggtgggctcccagggttgctgttggcaacagggatccaggtagtgcctgctgcctgcccgccatccacaccacccaccccatggttatgaatgtggccaggttgtggcccagggccaggctcccacgtctgtggcccacagtggctcttttcatgaggctgctgggcccggtcctgccaccgtgcattgtcctggcagggtgaagggtgcacaggacacctcatgctcactacaggcaccttggggagtgggtggcctctgttccctgtaggcggggcagggcgtgggggtagcaggtttgagatgctgtcgggtgctgggtccaggccaggcctaggctcagctgtgggaggagaacgctgggcccgggagggcctgggtgtccctgaagctcctgtaggcctcagagagccctggcacccctgctgacctggcacctctccccagcaaggtggcggtgcaggccgtgcaggccatgaaccgcatctgtgtgctggacgtggacctgcagggtgtgcggaacatcaaggccaccgatctgcggcccatctacatctctgtgcagccgccttcactgcacgtgctggtgtgtgctgggcagggttgggggctgggggccagggcatgccaggctctgattgccaccccctttttaggagcagcggctgcggcagcgcaacactgaaaccgaggagagcctggtgaagcggctggctgctgcccaggccgacatggagagcagtgagtgtgccgtgggatcaccagggaatgccaggaggggagtcagggttctgaggtctgtggcaccagggaccctgtgggtccccagacctcctgacacctggagtccctgtgagggtcctcagacctctcaactacctcccaacacctagagtccccgtgagggtccccagaacccacccccagtcaccaagggtctcattgagggtcctcagatttccctctgttacccagagtctccgtgagggcccccagaccccccatcgcccagggtcccatgagatgtccccaaccttctagccccgggggtgtcatgtgcatcctcttacagctgttgcctcttctctgggtctgactgcagcccacaagaagagggcatttaatgttctgctgtgtgtgtagaggatagtgtagcccctaaccagagtcctgatgggtgctggtgtccagacccaagttctggggctccagagagagcaggagtggtgcctgaggactgaggcccagggggcggcccttccctaccctgcacaggcccggctgggctggaaagctgtcccacagccgcagtgaggacagccgcaggccagtgggctgctctgggggtcgtgtgggacctggggtggggctgcatgggctcactgtgccctgaccccaggccccacccacaggcaaggagcccggcctgtttgatgtggtcatcattaacgacagcctggaccaggcctacgcagagctgaaggaggcgctctctgaggtgggcccatccttgtgcctacctgggcaaggcccaaggggaggcctgggggccaggcctttgttgtccatgaggccactgaggttagatgggacagtcctacccaagcactggcatgagacaccgaggtccacggtggagggagagcaggaagcccagcccttcctggataccagccctcccaactccctttcttcctcactggcaggaaatcaagaaagctcaaaggaccggcgcctgaggcttgctgtctgttctcggcaccccgggcccatacaggaccagggcagcagcattgagccacccccttggcaggcgatacggcagctctgtgcccttggccagcatgtggagtggaggagatgctgcccctgtggttggaacatcctggggtgacccccgacccagcctcgctgggctgtcccctgtccctatctctcactctggacccagggctgacatcctaataaaataactgttggattagaaactccataaatgagtggaatgtggccccaaggttggtggggccccatcatcccgatcgggccctgagctccggcagcccaccctaaccaccagccccaaggagggccacaagatggcctctgcctaggcatctgctgcctgccggctcgtggctgctgccccagggcagcatgatgcttgactggcaggcagggaaggtggcagggctggtcccaacccacctggcaggctggcaagtggggagcaggaagcggctgcatggggcagcctgaggctgcaggggtgggccctgagggctgcctcttggtgcccgaccctgtgggtctggcatgggccagaggttccaggagaggcccctgagctctggcagctggaggttctagatctcgaggtctaaggggttccctgagggagatgcccctcccctagctgccccaggggctgtgtgtggtgtgtgaggagcctcctctgctcaggctgcctccctccttccccagtgctcccccagcttgcctgtctaaggcagcacagggccgtgctgccagccacccctagggtcagccccagccctgttctgagcctaggtgaggtgcctctggggtggggtgtagacagatgggtgggagagaaggaggcaggcagggtgcccggccggaaatgggggcggggagaagagtccccgcccagagcccagactgccggaggatacaggccagagccgcctggactgggcggctgggcaggggaggggaggggagggcccaggcagcccccggtcgcttgctccagggcaggtggactgagcttcggaggctggggctggcctctgacctgcttgggcttggagagccctgcccgctgccctgccccccaggacaatcagggattcagaccctgaggccgaggggggaacaatggggcccttgagggcccctcctccagcccccattgtgcttggtggtgagaggtggccctggctcggccacacaccctcggggaggaccagcatccaagcaggtggaagggctctgagggagactggaattttctggcctggagaaggtagggtgctggggtccatgtatgtacctcatggggctgggggctgttgccccaggagacagcctcacgctgtgccccttggccttgaggccccgaaggagggagggcttcctagggcccagccataggagggtgcactccttgcgcctgccaccccctcctgggctccgctgctccacgcagatggtggggtggcccccccactccatgtctgtgtccttcaggcccagctgccttcaccgcagggtgggcaccaaccggtggggtctgctctgggacagctggcaagcgggaggggggtgccttcagtacctcccccagcagctggggcccctcaggtagtgatagggctggcctctgaaacaccagccagctgcattgtgtccaggcccagtcccccaccctcagcggccacctggaggtgagggggccagcctgcccctggtatagacagacctggggccctgctcagtcccctccatagaaggccacaagccactaagtttgcactggggcccagcctaggtctgaagcccagcagaccctgtggtcaaggatccaaccccagtgcctgtcagtgctgtgattaactgggtggaggcccccccggggtgctggggcaggccctcagtgcaaggaaggggcggcgtggctgaggagggggaggcccacacccctctgggagggcggagcaccccagggctgctgcgcagggaggccacagcccaggcgcgggggcccccatcccagagctggatggcagtgagcccaggattcctggctgctgggcgttcaggagggaagagacgggttcgtggatcctgcgggtggagggcagggacagccttaggaggctggggtaatcatcaccccctcactcccagtatggatacccgccagggctcggtttctggagggtgtgtggctcagctccaggcctgcaacagccctggaggctggcctggggagctg

SEQ ID NO: 4246 - DNA, 6000 bp, Homo sapiens
gtgaaactaatgcatcagcatcttggcttaaaaaagttaattcacaaagttttgcataacacttctgcttactaatgacaaagtctccaaaagttagtattttgttttaaaaacacagctaccttttattattgccaaacattgtgaagttattaacatacccatccaccttgatacaccttactgggaggatatcttctttgactactaaacaattataaatggaagtattttatagtgttttctaaacactgacaatatacaacactcttcaaatcttctgtaaattaaaaaataggaaggaaaaagacaatttgcttcagtggagaaacagcagctaatttctttctgtaaaatgtccaactaaaaggtaagcccaaacctatgactaccttaccataccaataagaaaattaaaaagaaaacattttagtcaactttaatttaaaaaaagagaaactctgagggttacagatgaaaatcaaatgtctaactataatctctattaatttacacatatctaaaatatataaggcaatatattaattcactaaagaaattcactccaactgttcatgaatatcttaaacaccagtgtctgtgatgaattaagccactatgaatcatcaaattccatttccagagcactttacctttcccatctactaaatcagttacaataaagcacgtcttaaatccatatactcctgctggaaatctcaacccaagccatcaatgcctgttcgggtgagcagaacttcttttcattcatcatcatctatctatctatctatctatctatctatctatctatctatctatctatacagatagatatatatagatatacagatatgtgtgtgtatatatattatacatacattatgttttgcatttaacacttgcactttgtgataccccccacccccatcaggaagaatgacttaatgactgaatctttcctatttttttgtttcacttatttggtaagattgaataaatatcccaaactagcaccagctgaggttgctccagttgttccagcccattatgtccttcccaaacagcaccttgttgttcaaaatagactgagaaagagtgccctgtaacaggggagccccaaacatgagacttttgggggaaaaccttgcttgtgatcaagcatatacaatacatacttgaagataatttttaagagggaaggctgcctggtttcttcatgctttctgtaagtgctgtctaagctttgagatttggaataaaatgcccaactctactaccattttccttttgaaatcacgggcagatagggaactgccaagactttatcttaataaaaaataaaagtaaaataaaataaaaataaaagtctttctttttaattttgaaataaggtcttgctctgtcaccgaggctggagtgcagtggcacaatcacagctcactgcagccttgactgagctcaaagatcttcctgagtcagcctcctcagcagctggggctacaggcatgcccaccatcacacctggttagttaaaaaaaaaatttttttttgtagagacggagtctcactacgctgcccaggttgatctcaaactcctgtgctcaagtgatcctccgaaagtgctgggattatcggcatgagccaccacacctggccctactttaaacataatactatactactataggcacaatctttccaaggagctaatctgatgttatctctgctaagcttaaaaacatttactgccgccgggcacggtggctcgggcctgtaatctcagcactttgggaggctgaggtgggtggatcacccgaggtcaggagttcaagaccagcctggtcaacatggtgaaatcccatctccactaatacaaaaattagccaggcatggtggtgcatgcctgtagtcccaggtactggggaggctgaggcaggagaatcgcttgaacccggaaggcggaggttgcagtgagccaagatcacgccattgcactccagcctgggcaacaagagtggaactccgtctccaaaaacaaaacaaaacaaaacaaaatactttctactgcctccactagtgtgaaggatagaaaaattgagtgtctactgtgtcatttccaggttgctctaatctgcctgtttacctcactggaccaatccttggttcttcttactctactggtgggtcccactccaccttctcccctcaggggccctccagtagttggaggcactgccacactggcactacaacctggtttggctaaatcccacccgcacttcgcagctcagcttagccatgtcttcctcccaaaagcttccttgatcacaatcccttccacacacgaacccaggaacaaatctgtcacagaacttaccctattcttgtctgtttcatacactaccactacgaatacttaacactgagcatactcgacgctaagacacttaaagcatttaaaattaagtgctttacatagactgccttctttaagctcacaacaaacctatgaggtaggtaacgttcttcagatgggaaagctgaggcgcaaagaagttacacagtgccaggatgggaactcaggacacctggctgaagggtctgagctctcaccttctacagcatcttgctgctcaaaggattctacatgtgaccaggggcttcctgagggagcacaacaatgaatgcttactagaagcttgctgagagaatgatcagaacacttactacctgagaagccaccagtcacatacaagacaggctggaaacgtgacttctagtactgtccactgagtaatactggtttaacagatgacccctagagctcccttccagcaaaacaaattagcagaaacaaaaccccctttctttccccagagatgtccttcacaggtgctaatatattgcttgcaaaaccaaaaaccagttactgagtagttaagtgaggcctttacctagtttcacagtgacagaagctcacataagcctcacatttacaggcaggagcaacaaaactattccaagatacactaatttaatttgttgttgatgacaaagaaaaatactcaaaacaagcccaccttttaattttctagcttagcgctgatttttaaggcaggaagaatttacgattcattaaaaaattagcatatattccatttaacgcaaaaacttaggactacagggaacctagaaggtattttgccaaaaaggaaacgataatagctaacatttagctattttcatacacatcattctttttctgggtacctttaaaaaggtcgttttttgggaggctgaggcgggaggactgcttgagcccaggcctgggcaacatagaggcaccctgtctcttaaagataaaaaaaaatccacgtttaagttattccttatcatcgcattttatagatgaggaaactacagttcagagaggttatgcagatggctacatggtttccatcctaggtctactgtcaccaagctctatccactacattatgctgttccaaagtttaaagatgtggccagatgcatttaacctattaagcacaaaactccctttcctactcccccttccaagtagagctgtgaccaggaactggggcacagcctccgtgtcctcccctacatccccaactcaggtgttggcacacttgaatcgcctgatataagacacgctccgcacttaatgttcctctcagcacagctcccaactgcttgttagcaggagtcaccattccgagattccaatctgcaaggtcagtttaggtacagtaatttaagacagacactgcatgggactggcacttaccttctgatcccagaaccacaaagactgcgagatccgcattacaacgactttcacaactgatgggagaactgcatgtagcgttcctgcactccacttccgctaagtctaaaatgacaccactgtttctaaccatccactcacttcggaccaacgccttatcgaatacattttcaaaagcctggcagcttcgcgagctggaggtggtgaacccgtcccacaccatgggcgcaccaaccttaccttgctgtcatgaggcaacgagccccgagagacacccttgcaggtaagcactctcctgcagcagctagtctaactctggctcccccgtgtcacacgcggagatcgactccacacccacccacgcacgatcaccatgtgcaaagttgaatcccgacttcgccgcaaagacatttccttttcccctacatgcaaaggagctgtggagccgtgctccctgcttggctgtcgggcactgggataccttccccgcgggcgcccgccacctcctccccgagcccggcatccaacccgcaggacccacccctgcgcaggaacgcgacgccagtccaggtgtagccgccgactgcaggccacgccgccggccgcagcccgggactcgggaggccgagggcggaggcgcggccgtcgcgcccgcgcagagccgcccgccgccccccagccccgcctcccgcgccccacccccaccgcccgccggcgggagccaaggcgcgccccgccgaggccccaccgccccggcccccgcccgcccgcgcgcgcgcgcgcctcgcgaccctcccggccctccccgcccgtgctcccggcactcactgaacatcccaggcggctccggctccccccgccgccgccgcctccgggatcgggttgcttccgcctccgtcgtctctgccgcagggtctcactccgacggccggctcagctgggcccccgcgccccgcgccccgccgcccccgccgccgctctgggcggccgctccatgactgactgacacggagcgggccgcgggctgggccgctcgggcctccaacgcgcaaccgtctccgccaatgggcgaggcgcctcggcgctcggctggcgacgcctggcgtgcgtgcagcccctccccgctgcgccgccggcgtccggcggaaggagcgcgggtaccggtcccacgtggtggggacgcgggacccgtacagcggcctccgccgcaccgggacagcagccgccgccgctgccgccgtcctcccctgtctacccggagctgtctcgagctgagccccctaccgggccggatcccgaggtgagtcccccacctgcggtcagcccctgcgggcagccaggtcccgaggtgagtccccccacccggggctggtccagaggagatccccctacctaaggccgggcccagatggggggccccccaaccctgcccagttccggtgccgccagcagactctgggctggagcggcttcggcacgctccattcgcgaaggcgaactccctcctggctcctagctgctctcccctggttcttgttgcttggtctctttctgctgggcagggagtgctggcagggctgtgctgtccgccctggacttcgcattgcccggtaagggcggttggaggcccggagagccgaactctggcggagccggggagagcatctcggttgtctttgtagccagttcagcaaacacctgttatgcactttgtagctgtcgcgatggcggttctatggtattgaacttagaaagtcaggcatcgttgaattcgttttggacattttgacaaaataggaaaactgacagcacttgacgttcttgttctctgcagtagagtgaaggataacttaatttctaaaatgaaaacgtcttaacgttcctttttactataacttttaggaaactcaaagccaagtttacccagtttaatagtaactgtaggtgtttggtatgtttgctacccccgagatttcatggttttttgttttctatttttagtcttttccttgtgcaagtatctcttgtagagtcttttttgaagtgtatgtgcgttgtaaatttatacacgactgaataaaagtgttagtggaaggttactgttgcagctgaaataactgtattcctttggggttttctttttcacttggagacatattactttctccggatattgcttatgtatc

SEQ ID NO: 4247 - DNA, 6000 bp, Homo sapiens
tatctataatgttgtggaaataatttctcccaacttgtcatttgtagttttttcaaattgtgatgaaatatacatcacattaaatttaccatcataaccattttaagtgtataattctgtgccattaagtacatttaccatccatctccagaatgttatcatctcaaaccgaaactccgaactcataaataataatgggaactcctaattcctctcttcctcaagcccctggtgactgccattttactttttgcctctatgattttggttactgtaggaaactcatataagtgaaatcatttggtatttgtctttttgtgtctcgctcatttcatctagcatattgtcctcaacgttcatccatgttctggtatgtgttagaattttcttcttttttagggctgaataatattccattgcatggatataccacattctgcttgtccatttatctgttgatagatatttgtgttgtcccaccctttggccactgtaaataacactgctatgaatgtggatatacaaatatccgtttgagtcgctgctttcaattcctttatgtatacaaccagaaatggaattgctggatcatatagtagttctaaatttaattttttgaggaaccactataccattttcaacagcagtgcgtaagggttccaatttctctacatcctcaccaacacttgttatttatttatttatttattttaaaaatgttttataggctgggcgcggtggctcacacctgtaatcccagcactttgggaggctgaggcaggtggatcatgaggtcaggagtttgcgaccagcctggccaatatggtgaaaccctgtctctactagaaatacaaaaattagcagggcatggtggtacatgcctgtaggcccagctgcttaggagtctgaggcaggagaatggcttgaccccaggaggtggaggttgcagtgagccgagattgtgccactgcactttagcctcggcgacagagcaagtgtccaccaaaaaaaaaaaaaaaaattttatataatagctatcctaatggatatgaagtggtatctcactgtgggtttttgttgtgttttgttttttatttccataatcaacactggaggtacattacagtttgtcctcatgaattctagttgttctcatgaggtacattttgtccttgcagttttgactttgtctttgaaatgccccatgtcacatctagctattcttctgattcccaggtctagaaactacagtgacttcagacctgccccatgtacaatggaaagacttccataaccttttttcttctacctctaacattgtctaaagtttaatctctatcatacatcgcttattccatcaaactaataatgattttactttgcagatcaaatcctaatgatatacaattgataagtgtttaggaagggaagttttgggctataaattgtccctcttcatctcatttaatgctttttggcctactctgttttgtttgatatcagaatcacagcacctgctttttcagagttggggtttccgttatgcctacatttgaaaatcttttattttaaagggtgaactgagcccacttataaattgttatatctgatgtgggttggtctcagctgtgtcatattgtttcctattataactactgcatcactgtgccacacttactgtgtttctttcattatttggtatgtattctttgctatttttagaacttttggggttttggaatagggtttccaatatttgggaatacatatattttgttgtagtgatttttatttatatttttaatatattacccttaattcctatattttgtttctaaccttttaacatctggtctgtctgttttatatggtatcctttcactactacctgctactgatattgcagacaatgatattattctattttcccttcgctcttccccttctcctccagttgtctttagttgcacctgttctaagtttatcagaaagtataatgtatatacactagtctttcaccttctgaatatacaaaatgctctccattagtcactctgctggcttcctcagctgtctcttggttggaggaagctcattctctaagattcctcatgaaaggcccatgtgagtcacgttctctgaatttttgcattcaggtcatatctgtttgcctacaaccttgacacttgagggctgggtataaaaatcactgcctggtacttttttgtgtgtgtgtcatggagtctcgctctgtcacccaggctggagtgcaatggcatgatctcagctcactgcaacctctgcctcccgggttcaaatgattcttccacctcagcctctcgagtagctgcgattacaggcacctgccggctaagtttcatattttttttagtgatggggtttcaccactttggccaggctggtcttgaactcctgacctcaggtgatccacccactctggcctcccaaagtgctgggattacaggcatgagccactatgcccagcctgcctggcacttttgttccttgttaatgctgctccactgttgcctggctttgcatgttgctgttcagaagtctgatgccagcataaatttttatctctataagcaatttgatcttttttgcctttaaaatctaatcgttttactaaaatatatttaggagttgataattccagatcatttcccaaggtacatggaagtcacttttgacatgtacatttaaattttcccttattcctggattattttctggggttatagttttaatattaattaggttttattgtttaatgtttgtactttagggactccacttaacatgtattttggtcttcctttcctggcttttattttaacctcttctctctgaacctttttacttctatctttatattattttcaatttcttgattgttttcttgccattcttcagtgtccttttacatattttcatttgaatatattttcccttggacaccttgtaattattctttgtttctgggatagtttttgtcattactttcaatttccttcttgaatttgctcaacccttgttgcatttcttcctaatttttgtctagtctgtcttcagttcttgaaatttcttatcctagatatgtgtgtgtgtgtgtatgtgtatacaaatacgtgacactttgttcagtttgacatgtggtattacaattttcttatgcttcatggtttttattgtgggggttttcatcagcgaaaatgttatgatttattttttatcatcagaaatgtgatttctgttttctttttgcagaatctttaaatgcagttgatttgatgtttttctgttactaggcattttgaggcagggttcccggttcaagagtgttttcttttatctgtgtactgaaatgcagtttttaatagataatgttggtgtttggggaggggactggctgtcttctctttcatttctgcaggatttgtaattttcccttctgacttccttctttcccttcattgtcaggcctctgaaggacattatcttcttttcgtatttatctgactttttcccagaaacaaggctccttcaagcctctcacctcttgtcccattttctttcaaatctcttcccttgatcaataaggcacctgacctctgttcagtttttagttcttggtgttggactttctatttataaagaggtgacaaccctgtacttcacttaagtccttggcaatagtggagggagctcagttggaatttggtatcttttctttcttctacttaagtaatttaatgttcagttcatggcattctctctaagtaatgctgaaggcttgtttttgtttcgttgaggatatgggtacggacttatatcaggcagctgccattatcctctgaccgagaagctcctgaaaacatttaatatatcaagttctaagtaaaatttctgtctttcttaggaacactggaagctttgcgtgttgcaagggcatcaccaaggttacatagattatgttacaagacagatcgttttcttgtatcgttaaagatgcttaatgtgctttttaaagaacgcaacgaatgagaaagaaaagattttaaacaatatattattgctttccttcttcctcattttgtgtttattgaaaagaacaactctaccattgatagctctgtcacccacagaaaaatgttcttttgaaaattaccttctcagttcctaccaactcaaaacctccacatctgcctatatagataaataaaatcgataccagcgggtcaggaatgttttgctgcaagattagtgagaaaactgcagcaagcagcagcaaagtcgggttcaagcgggcggtttgcaccaaaaactcaggtcagttggccaataagagcaagcccgttaagggtctgaggtggccccaaagaccaaggctgaagaggtgacagtctgggcaggaagcaccgaggccactaccgcccccgtaatcgagaggccccgtgtgcgtgagcaaggctctttgcccacgtgtgcgcgcgctccagtcgggtcccggggcagccacctgtcactcacgggggagggggcggccggcggggggagcacgctgaggggcgggcggccgggggcggggcggcgcccaggccctcacggcggagcccggcgtgctgcagccatggagacgcggcagtcccctcccgcggcccgcgccccggcccccgcagccgccgccgattggtcgccctttgctccctgacccccctcgccgcctccgaggccgctgcttcctgctctggtgccgcgcggcgccgccggcccggggcggagctcgggcgccgagtgcgcgccgccgccgagcagtagcaccgcgcgggaggaggagccgccgccgcgcccttccccttcctccgctcctcccccggcccccaccgcgcccgcggccggcccaggcagcactcgcgagcagcggcggccccgccggcggccgagttgggagaatgcggcggcgctcgcggatgctgctctgcttcgccttcctgtgggtgctgggcatcgcctactacatgtactcggggggcggctctgcgctggccgggggcgcgggcggcggcgccggcaggaaggtgagtggagcgccctgccgcggccgggcccctgcgcccaccccccaccctgcgcccctgtcccctgccctctccgcgccgcccctgcgctcctccgcccggacctccgctcgcgtcgcccgccctcgtcccgggcctccgcgccgagtgcccagggcaggggtgcacccggcccctctgcgcacgccgggctccgaaagggcggcccccgcagcctttctctgccccctctcgtggacgtcgcccctctctctgctcgtcgtaattcgagtcttgtccggccgccgggagccccatcccctgcggttggaagtttagggatgggggtgttgggaaacacaaagggggtggggaggagaggagagagaggcgaccgcttttccaacgcgtcatgtacagcaggagagaggagtccaagtttcttttcagccctttgataccagcggctgcaaatcctcgtccctttccccctgtcactccgcggggcgtgggttccgtgtttctgccaccttctttgccctttacctttggggggcaggggcggccgctcccgtgccaagtaaagccccagggcccgtgcgagccaggggccagtgcgcccctgcgccccgagcgaggccagtcccggccgttcccttgcggccccagcgttaccctctgcccaacccggcccccggccctcccgcgcgagccggacgtggcctcctgcgcttgcattttccatccccactccccgcttcagggagaatccctcttctgtggctgtgtttttaacatgctccaggggccgagtgatctggctgtggggaccgtgtgagccgctctgcggttccgcgtcctcgtgccgccgctccggacggccgggccctgggcattcgggaggatggtgagcgccgag

SEQ ID NO: 4248 - DNA, 6000 bp, Homo sapiens
agtgtcagccttgaccctttatgatggggaggaaggggatcaccccttttctgcctctgcacccatttgaggtttgtggttgagtattttaaagtgcaactggttggctcagttctgtgattgatttctaggtgtttggcttatgcagctggcatttggtggagccatttatcaagaaacaaaatgaaggaggataagaaagcctttcaggaaagataatgaatcaatttcgaacatgctgagtttgaggcatcagtgggacatcaaagtgaagtagtattatacatgggtctagtggaggggggaaagaagcacatggtgaagatgtgacgggagaattgtgagtatgtggaccagagctgaaaccctaagggcacagctgagatgactgtgggagagggtagcatggaagagaaaggttagcagaaccccgaggagcactaattgtgaaagagtcgcatacatttatcatgcttgaaggtcgtgtctctctaagcagattctgagctcttcagggtcaaaggctgggtcttgagcttcattcattcttagcccctgtcatagtgctggccacacagaagacaattctaaaattcactctgattttatttctctgcactttcatttatgaggatcctatcacggtttatgatttgaaatgctaagggataatttttttaaaatcataactttcatacgaatataaaaagaacacttgtaaagatttgaactcagtacttaacaagagaactagtaaaatgttatcaccacttcaagagacaatctaaagagcagacaaatatacagccaaggatgtgcgaatgaacttccctaagatatgcaaaactggctttttccaaaggaaattgaggcaagatgggtcaactttactttcacaggataaaatttatttgcatgtttatagacaaatgttactattatttgcattgctatcagttatgcacaacttacagagttgtaaaatagcttaaagtcaagaaaggcacaggatacaccatagagtcacatctggaatggcatgctagactgactctttttcctttgaagacaactgtaaccttcttggttcatttcaaagtcacaatttctcctgtaatgctaaaaaggaaaagatattatccctaccatttctatgagtggggtctattacaaaacatagatgaaagtatatttgggtattactataacatttcctagttgatgagggagatgaggctgaattggggaccccccctaacataatgtcttctaattggcatgggaaatgttcacgaatcaaaccaaaccacctcaaatccaccctggaatgaggcagagttataaacaaaatatagaagatgttgaaatagcccagttggttcattgagctttccaagtcagagtgcaggtcctgaaggtggtgactgtctcccctgtcccctgctgctccacccctaccgccatgtctgccctcctctaggaatgcaggaccgtctgactgtatcctcagccttcaggtcaagcacatgatctgtttaaaaatggaaaccctcctatccttcagtagtgaacaagggcgactctggttgcttttggaaaattcagctgctttagtccaacagttcaggagaggatcagcataagaacttggtgatgattactagagaaaatgctcctatgatttcctgagcataatatttccccttgcaatttttgagtgttctatagcaaacctgccaaaaatgtggagcctataaataggggagagtgggaagaaaaaaatgggacctctcacaatgccactgaaaacagggaactaaaaattttccagagatgcaaagtcaaagggggattaatatttacttagaaatgaagtagcaggtgcatgctttataaagaaaagccaagaaaggatgaaattaggggagagactgaaaaagatggaaaaatgtgccaactaaagtctcattttgaagaaagttacagatcaacaaagggggaaaaactcaggtaaaaagactccatattatgtcttgcattgattaggcaggtgctttatatgcacttttaaattttctcttcctgcaaatactatgaaataagtatcactaccagagatgacattcaaatatttaacagcagacaaatatttaacagcacagacactagccaatcagaagctggctagaggagccccgctaagccaggcagtaaccctctaatggctggatcatgaggccaaggtaggggtcagggcagcagcagattctgtacagaggccattcaccaacctttgagatgttgcaatatttaccaagtagcacagctgaaatactgtgtgccagttgaacatcagctctgagtggaaacccagggccatgtcctctgggcaggtgtaggctttctctcttgcgtttgtcctctgtagattatgatgctagcattgaagtctttcttgttgcgcctggctgtggtggtctgcaccactatctgtgtctccaagccgcagcccactccatggggtcctgatggttcccttctgaatctagggaggacagcaggcagcagggaccctccatcgctgttgccacttaatccctttagcatcctcaagataagcccagtctgtacaaattcaggttcattttatttctaaagtcccaggaacaatgtcagaagggaattacagtgaagaaagaaagagttcaagttccagcttacctagacttcctgcagagcctcgaaagagaaggcagggttgcagacatctttgtttcatctgtccagcatcctctcccgtgccttggtactgggctttgaagccaggctgcctgggtttgcaacttgccacttattaacagtgtgaccttgggataaaggcccacctttcagagccactatagattggttattggaattgctggttttgttaggtgttacaaaatgtcagggtttttttttcttcttttgatgcgtaaactgaggtattaggggataggaaatgatatggtgtttagaatttgctttaaaacatattccaataaaagggctggactcagtggttcatgcctgtaaacctagcactttgggaggctgaggcgggtggatcatctgaggtcaggggttcgagaccagcctgaccaacagggagaaacaccatctctactaaaagtacaaaattagccaggcatggtggcacatgcctgtaatcccagctactcgggaggctgaggcaggagaatcgcttgaacctgggaggtggaggttgcggtaagcagagatcatgccattgcactccagcatgtgtaacaacagtgaaactccgtctcaaaaaaatatatatatatatgtatatatatatatatataaaacaacaaaaaaagaaggtctcgatgcggtgggtggggaagggcagaggagacaggttgatgatggttgaagcgaggtgctaagtacatagggtggggttcttgtgctctccacacttctgtgtacttgaaaattttcataacaagagaaaacaaaaaattaaacagaaaatgaggttttcatttcctccagcaaaacaaacataacagggacttaggatgtacttttcccaatcgctcctctggcagaatattttgatcctccagctagcttccggctcttatcctgttcatctgttctgtagatactggcaggaaataggctcttcaacagggcctgctaggtccagtgctagggagtagagcgttttggattctacgcctacatttttttttaagtgaccagttttctagttgagatacttgaaatacaaagtctcatggtgaggtcttaccctctgctgtcccattcctttttacaggccatcatggcgttaatcttatctccaaggagaaaaattgggaagagaggcctagattcctcaacagaagcgggaaggaaaggtttgcagaatgaagagtgtgaagtgaggtttgtggtttgaatcatccgaatgtcaaggagaaaagaagaaaaatgaatcatcatcatttgaccacggtatttacagctagcggaagggacaagaggagaaaaaagcaagggaggagataaaggaagaacgtctcagaataaaattggggtgggtggggggaggaggaggaagacagtctaagaaattggtttggttgcaccagtactggccacaacacaaaaatttgtccattcctggttgaaattaaaaataaatgtgcatgcacatgtatttgtctgctgtgtttaatcagatagcgaggcactcctttaagcaccttgaagacccaaagttgcgctcagaggctgcccacctggaacggagaccgaggttgagcagggagctactcagaggacccaaagccgcctagctgaccaccttcttccctatgagttcccagtaacggagcccagtggaggagacgctacacttctctgtggggacagaggctaagggcgggggtctccatagaggcgttagcgcccaccagcggcagtgaccgcgcacagggaggtgaagaatgcgaccacggtgatacgtccaacctggaaaacgggcctgagaaccaaagggccaacttctggccatgcataacgaagcagagcagtctcagggtagaaggcactggaaaagcgttgtaggacaatttttcccagtagaaacggtgggggtgggagggagacccgctcaccccttttgacccacccctgcagctcagccacgcctcctagggaggtgggcagccttgcaggagcccgcgcgaggctgcagtaccgccctccgccacatgagggcagcacggcctacccgtgcagcagcggcggcccccgcgcccctcttggccagagccaggcgcaggccggcttgcggtgccgtcgttcattggccgcggcgcgggcgctgccatgttggcggaagcggacccccctgtgccgtggaaactggcggtggccgcggccgccgagtcggtctgcgcagcctcctgcgttttctcgcttggatcttggcactgagaggcggtggccggcgggatggagaaaagtaggatgaacctgcccaaggggccggacacgctctgcttcgacaaggacgagttcatgaaggtgcgcgcggcgtccgctccccggagccgggccatgagggtgcctctgccctgtgccctctgtggcggtctcttcggtcggctgctcctgcctgcgcacgctcagtgtcaggtcctccgccgagacctcgctgcacttcgcaatgagtcttttggcgtcaggtttggcgggtgcagcctggagaaagcacttctgtaaaatcgtgcgtgttacatggaaaggcctgaaagttctgggcaagtggttttgagctgcatgtcaaagccactgttacccgttcctgttaccatgcagtgcagtcagattgccagtccccttgtcggaaagaagcttgtggaccggggccttggagctcattaagtgtgtgttgaataaatctccaagcccacgtactttcctagggactcgggtcggaaagaaaaagaacttaatctgaagttttgcttaacattcagctaaagcttccagaatgggatatttagaagcttagaacattcttaccgactattgcagtacgacaaagcaaaccattactctttaaagaagttgctctactttttacgtgatgcatttgaagaagttggtagttgtaggtcataaacttagagaaaagaaatataaactgaaaacacttcactgatgataaagttcatcaggcacagccttgaaaatggccaggctttgagtgagagctgggaggagctttgctcctacttggtgtatccctctgggtctgcacttaagccattcaaaaaatgtttctatttaatttcctgaggactaggatttttgacaccttttagtagctgctttcagtgttaaaaagcgaaaagttttagctggttagtagacatctacaattttgagcaagtgagttgaaatcttactctgcct

SEQ ID NO: 4249 - DNA, 6000 bp, Homo sapiens
gtttccttaaccagacacactcacattttcaaaggacacatttaaaaaaaaaacaagaggaaagggcagagagcagcaatgacaaatgaaaattttcattaaggtcaggaagttcaaaacgtagagtgagctgaggctcctgagaagagccaactagaatgcatcagggctcgcttggaacgggaagcaaaagacaatttgacagactgccacagatgttctattattaagcaacagggaaatgcagactcattcaatcccaactcttctgtcttttctattaaaaagaaaactttccattccagaaaaaagaacatgagggaatataagaggaaactgaagtctgagacatttgaagaaacaagaaagggtgcctaaatgctttatgttagttgaagtcttcaaatgctgaattatattgcaaagcagtgctcaccaacatttttcatatcatgacacatacagaaaataccagtatttgtagggtacactggggtactgggagatggccagcttcggggctctggttgccccaaacaccaagggaatccatttcttgaccctcccgtaacagttcccagagccttatatttggaacataagagttaagaagcttatctagaatcctaaaataaaggtagacatggttacagattcactaataatctttttttttttttttggagaaagggtctcgctctgtcacccccgctggagtgcagtgacacaatcacagcccactgcagtctcgacttcctgaagtcaagcaatcctctggccttggcatcccaaagtgctcggattactggcgtgagccaccacgctcagcctgcagaatgcgctaacgatctttgaggaagagatgccagcaagcttgatatgaaatgctacctgaattttagaaaagattatacagatggtttttaaaaccataaagatgtggcaaacactggacactaacatacatttatacattcataaagaacaatgcaagccaaaccatcttcgtagtgggtagaattgtggcctctaaaaacatatggccatgtcctactcctcttcagaacctgtgaatgtgatcttacttggagagggatctttataattaaacatctcaaaaggagatcatcccagattcagggtgggcctaaagcaaagaggaaggcagagggaaacatgagactcagggacacagggatgaaaaccacattaagacggaggcagagattatagttatgcaaccacaagccaaggaaactgttagagctaccttctggtcagaggcaaaggattctcccccaaagccctcagagggagcatggccctgccaacactttgattttggacttctggactacggaactgtaagagaatacatttctgttggtttaagtcaccatgtttgtggtaatttgttatagcaggcttagaaactaatacgttcaatcctcacttctttgttgatagacaaaggtttgcaggacgtgggggatgttacagaaatggaatagcaatgaatttgtcaaagccattatgatattcttgtgaatagataaattaaaaacatttggggccaggcgcagtggctcacgcctgtagtcccagcatttggggaagccaaggcgggcagatcacgaggtcgggagatcaagaccatcctggctaacatggtgaaaccctgactctactaaaaatacaaaaaactagccaggcgtggtggcaggcacctgtagtcccagttacttgggaggctgaggcagaagaatggcatgaacctgggaggtggagcttgcaatgagctaagatcgtgccactgcactccagcctgggcaacagaacgagactccgtctcaaaaaaaaaaaaaattaaaaacatttggaggagcaaccacacctcccttggggactgaattttaggtgagatttacaagctcactctgaaaaagattactgctcagaaaaatcaaattgcttttccaccagcattgcttttcctcgagagcaagaatttctatacatttggttcactgctatatcccagtgcctacaactgtggctagcacataacaggaatgccagaaagagttgctgtaagagttaactcagcaggcctgtgtttaccaaaccctgcacattcccaagaaagtcctattttcatgactggcagttggctgcctcctgagaattgagcaattagaatattctgcctgatcagagtgtttttgcatacctgaggtcttgagccactgctgtaccaagttttcccagacagtttatactagcaatgtgattgatggtgaatacctgcttttcactggaggtctagaacttgaataactaaggtcagtctgtaggcctacatgactgataagggctatatgctgagtcttgggtcctgtgagtccttttggcaaatctgcaggcctgaggatagtcaggcattcctgccacagtctaaagagctattcacctaatactacaataccagggggttcaccacgtatatataagctaaccaactcattacctttgtgttcttgttatgatctggcgtcaattttctttttttattgctgtgaaattctaccacttctacttgttccctattgttctttagggaagagggaggaactgcagcagcaaggatctctggtcctgtgggggtcccagaaggagcacaatgccgctcttctctaagttccttgaagaagctcgaagcgctcttcctctggcctcttatgagagaaccaggtaggggagatggctctgctgccaaggccgctgaagccatcacatctctcttcttgttttcccttttctttatgatcttcttctgttctgtttcaccttctgtacctcctgtttgttcaaacacaagaaggaaaataaatattttcagtcttagctatcatcagtatcaaatcctacgaatgtatttgtacatattccagggctatatgcacctagaagcacacacaaagaaataaactatttgttttctttcaaataagtgtatttgcaaaatgcagagaatccaaaatgtagtcatcttttcctaggtaactatgtctttgacccttattagcacaatcactttagtctccactttggttcctactcaaagtgtcatcacagcaatagtccccagggctggtaatcccaattggctttatactaaaaatatcaggcactgcagccactgtttctttttaacactttctgggttacaggaacatggaatagtcttcctattttctttcacagttaggaattaagatgaacctaagacaactggctcaatttgaatgcctttgttttctattaattcctctttctatatttcacttgttgaagctctgaccagtcacctgaaagttctaaccagaatcctaggcatccttactcacatgtattacaaataccacagagctctctaaattaccagctgctgatttatgcttgctactatttgcttaatcttttatacaataaacatttaagagccaactaaactttggcattaaggatataaaaatgaatagacacattcaatgccttcagagctcctaccatgatttccagcctgtgttgacatgaactatattattttgcagaatagtcttttcctctagattttaaacttctcaaggtcagagactaagtcttctctgtcctccaatatgtccaagggcacagaaatgctagttaatacaagcatggggtctggggctagaatcagaacccaggctctgcaaaaattaccagtcagacaacctgcatcaggtttcatgaacttctagtacttgtttctacatctgcaatcatggatttatgacagtgtctatttcatgaagttgaaaattaaatgagcaaatacacgaaaagcatgtgctatatggcaagttctcaacagttttaactattattcctactgtttaggtgaacttagaattttgagcagtcattccaaaataaaaatagcttttaaaatatcacgctgtaaatttaagaaatgtgtgttgtcctgaaatctaatgattttctttggtgcatgtgcaaagggtgtcaccttctcccgggaaagctcttcagagtatgaggcactgtcttcctactgacatgccatgcgactttaataggctcttttattttccttttcccccatcaagacaaagaacggagagtaaaagatcagcgcacttgtttaaaaaaaaaaaagtcgtgaaaaggacaactcgccaaggactatgatgtctctggagagggacacacaaggatgaagctggtgtattatccaacaggcccgaggccccagagcgaaatgacaccatcgcaccagggtcaggcaggtcttgggggtggcatggggaaaggggacttcccagggctcaagaaaacgtggaaaagcgggctacttttaaatcggaaagccttggtgcttcctacaagcaagtaggatggtccccacacttggggacgagttggaaggtttgatgaataactcagcagagcccggtcgaggggtgacttccgatggagaaatgtgttcgctactggaaccaggtgggacgaagggtgcttgacatgcaagaacctttagcctcaaagcagaggccaacccaggacgggcaacacaggagacccacgttcctcaaatctgttctccacgtgggctcctgggaccccgcactcaccaaagtcgtaaaggttctggagcagagcgtcaagaagtgtcggagaactgggaggcgtggaggaccccggcccttgctcctgcgacattgtggggtcagccgaggaatcaaccctcattctgccgcgctgcacccccgcttccgggttccgcgactgcgcgcatgcgctgcagggccctgcgcggcttccgtcctggctgagatggcggcgcccgggatcctgtgtagcggctgcagagggtgccgccgccctaggcgaagtagggccgtcctgagcgaaagaaccgcccccagcaggagcaccaccacggcttagcaaagaatcccagaccccgcccgggaaggcagccgcaccatggagtcttccagttcatctaactcttatttctccgttggcccaaccagtcccagcgctgtcgtgctcctctactcggtaggcgcccagggaaaagaggcccagagcggagccgcgcgaaatagtacccctttctcccagtccctattcctccggcccaccacccttgcccaaaagagctggcccctaggctcccgaggaggggttagttggttggattggtttccaggacaacagtgtatcgctgtgtgtctgtgtgtgcatgcttttggaagtttctacggattatggttcctttggttcctttccactttttccttctctttctttctatcaggccctggggccttcagaaagctcctggacacgagaatgaggaatgagaattggagtctccccatctctagcgagggcatgtcgagctaccttttgggcaaacctgagaaacttgcgggtttgacccgccctgagatagcctgtggctccgcaccccgccctatgctgctgttatattcctgggagtagagcacttggcttgtatgtgggaatagagttttaaacacttcaggaaaatttagaacttctagacatttttattgcctgttcttgtcttccagtcattattgtaccttttccacaaatcattttggaggacagccagcgccacccagcttctctcccgcttgtctttttttcctccaaccccctcttcctctcttggttttaacgggtctttttggctggcagatgttggtcacccacgattttcatgaagaaattatgagatgggagctttatagccttcaggattgcacagacctggggcaactggtttggtttttgtttgtttcttgttgtttttaaccactaaattagtttttagctactttaggagaaaatgaaagaattcattttaaaagcatattagcatatcctggtgattactgtcca

SEQ ID NO: 4250 - DNA, 6000 bp, Homo sapiens
aaagcataagaaacaggaagattagtgatgatgttagtgaaattactctgggatataaagacaagaatcaggaaaatgccttttacttataaaaagacactgatgttcagtgggaaaggtgagagaggaatcaaaaatggtgatcagagtttggattcgagctgtagtacaacagaaataggcaaatcaggaggaagatctgccttcagagacacgtgacagtcagaatgacctacttgggaagccactaggcaatttgagttggaaatgaggctggggaacccacatttccttaggaacccatacctcctgatctgtaggggatacattccaagaccccaggggacgctcaaaaccatggataggactgaaccctatgtatgctgtgtttttcccctatacatacaaacctaggtttaagtttagtttataagaggcacagtaagagatgaacgatgataactagtaataaaatagaacaataataacaatatgccagcatcactactcatgcactttggagtcattatgaagtaaaataagggatacatgaacacaggcaccatgataccgcgatagtcgatttgattattgaaacagctactggctaacggtggggagtacagaagagtggatgcgctggacaaagggatgattcatgtcccgaatgggacagagtgagatggtacaaggtttcatcacgctactcaaactggcacacaattaaaaatgtaggaattgtttatttctagaattttccattttaaattttggaactttgagtaactggaactgcagaaagcaaagctgtgggtaagaggggactacagtaataagcaaacttttcgtcgggtggggacatccttctctgtgatgtccagggctcctccgatgccaagaggtagatcatgtgtactttttctatctgcatgtagttcagtcctgaccctggaaatcagaatactaattgtagtttggggcttcataatttggaaaggaactaatacgatagtggtgaataaccttcaagtcttgaaaaactgatttaccctaagaatccaaactgcggagaaaggcacaaattggatattatttctgaacacatagtaatctctgtctctttccagaacttacttggcattccaagagctagcaggacctgctttggcctgaaaccagggacagatctcccggggctgccagagccttttatagttcatgctagtctagactcttttttgtgctttccgctttgggatggaggtaggggaggagtataagtcctcggacccctgtgtcaaaactcagcagctgcatactcttggccaagctacttaacttctttaagtcttctttcctgtttttcaaaaatgatattgctgcgaagacgaaaagaaaaaataaaatgcaagtgctcggagcatagtaaatgctcaataaatgaagtttcatcaccatcgtcatcattcgtaatgtaatttctggccatcttgcattaatgcagagattcaggccatgtgacctgaggactggcttgtggtgaatttcccagggatttatttctaggacaggtgctcataagaattatagtattttagaacacatgcaataaggatgtaaataaaatggaaattttgtaaaatgttggtctgttgagttctgaagtgggataagaagataggtatgaaatgttccttagagattttgaaacaggaaatctgagttaacaagaaatgggctaaatctcaggacgttagaggctctctaatcctaattttataatgattcgatgacaattccagaggctttcaagtcagtaataaagcctttaatgtatgtaatcttaattgaaaggagctgaattaaaatgataacattgagtattttgctgagtttccgtagaaaccttgaggaagaagttaattttttaagctcatgtacatcattggggagcttagtaaattgtaagtcaaaatgaaaaagcttacatttgtcctaatttttttcttctttaaggctgtctagcatcctgccaagtgaataagtgggctacgatggcccattcttaattagatgactgcagaaaaactcttaattaaaaaagcaaaaatataatttttccctctcttgcagaatataaaattagtcataaagaagaatacttcccaaatttggactaagaaacatagaaatgtcatcctctaaactttttattaataattttatgattaataaagatttaaaatgtagtatctattgaatataaagattatattataataaagcaatattaagataataaaaagcaaaataagctattatacataacacgaatttagaaaaagagaatttttttttttttttgagatcaggtcttgctctgttactagggtagtggcttgatcatagctcactgcagcctcaaactcctgggctcaagcaatcctcctacctcaacctcccagtagctagaactacaggtttgtgccaccatgcctagctaattaaaattttttttttttttggtagagatgaggtctccattgcccaggctcgttttgaactcctggcttcaagcaatcctcctgttttggcctctcaaagcactgggataacaagtgtgagccattatgcccagccaataaatattttaataaaaattacaaaatatatagatatcaaatactattttctaatgaaaattgtaaataatttttttctatttaatgaactatagttttgtgcctagaaaaaggtctacttgttaatttcttttagtctgagtctacaataagaattaaatacagtaaacataaactttaagctgtatccaaattttatgtattttttctcaagtacacttaaaattgaggttagttagtatcctatgatctctgcactggaattcttactacaattgtccaccagaagaagaaactagggaattataactaaattatccaaaagggttaaattttttttaaaaaagctataagtaaaaagtttccatagctttcactgaagttgctttcttgtaaaaattattttgttatgtaattatgaaatataacagaatatcagagtaccaaaaataatattccaccaatatgcccatcaccagtattaaaacacttgttatatttgctttggttttctttttaaaaataaatgttgtatatcattctcaaacatatttttatacttttagaacagactagagatctataaacctcatagttttgtatttttgtgttttaaagtccacatacacggtgtgttttataaatagtctctgctctatgtctacttgctgttgaagactgtatggggtgaataagaaacatcgagtgtctaggccttttagcattattccacttacattgagagaactaaagaaataataaccataactcttgctagaacagtttacagcctagttaaaatgccaaaatgaagacgtggtaagcgtttttatattattttacctaccatctgggtagaatggagtaattaagaaacctgtctctgcatagttctgaataaaatagtttaaaacgtcaatttgatacgttctaaatttggaagatcaaatcatttaacattaaatcaggagccaatttcagaatatagtcattgctcatggaggactcttacccgactttttgggagctcactggttgttcctttagagactcgtaagagtaaacattcacataaataataacggtttaagagttggttagtcgtcatggctacagggataggtcaagtttttaggtaaggtgactggtatacttccatgagatagggcagaacattactagttctaccacggacagcgagtatttatacacatattgtcattctcctggaaatttacaaacctaccccagtaagtacaaagttaatgaatgctaaaaataaaatataaactgtatagaactcagtggtcgattttaataatgagttagatgccgcagaatgtaagatgtaggtaaacggacgcaaaaatccttgttttacaatgtctgcatctccgtagtactgacatttgaaaactttactttgcacatacttattttaagtacgataaatgaaagcgctgtggactaggaacaagagacaaattgctttcttgtccaaattgtctcagaccctgtattttcttagtcatagccgtttgttaagtaggcatttggtagactattgcatggaggattgcgagagcaagatattactatctgcggtggaatgctcgaatttcttctctcagcaaggataatgggtagcacagtctgactttagacccatccagtggttcagacttatagatagtatcccatactttaccgcaattccttgttgaattaaggcttgcacttcgaatacagactacacacttctgggtctgtcttgtaccacattgtctggcataggcgctcactgtatatttgttgaatgttaaagttctgtgcaccaaaaccgtgcactttgcatcgattatctgcgaaaagcatggtacactaaaactagatcttgaagaattcccatttgatcatgaatagaggtaatccacgtttaaaataccaggtgttgcgtaatctctacttggagattagccaccccgtgcgcccaggtgaaagatatcattcttccgtgcgatccgaagtgccgtggaagttagtgccctagcccagtccaggaggaaggggcgtcgtgccggcggttttaagctcggaaggggcaggggaatgagcccagggaccccagcggggcgcaggtaggaggctgtgcgctcgccgggtgcgctccggccccgattcccagcgcagccagtaagtggcgctgggcctcgggtttggcggcccggaggagcgggctgcggattacctgcagcagcggggagccgccgagctcctccccgcccgcccccacaccccacccccaccgctgcactaaccccggctcagctggctccgcgcacttgctcggaggagccggggccgagcggaccgccggctgcaggcagcgagcgcggctgggctgcggggctgcttccccgcgtcctccgggcccgggccgccctcctcccgcacagtgcggagcagggaggccccgcgcctcgaccacccgcgcccgagcgtccgcgcctcctcctccgctctgcaggcggggaccgcccggcgctcggcacccggcagcgcggccccctccagcccccggctcccggcagcagaagcagaaggcagcgccaggggccgccgccgccgccgagctccgcggggctcgggagccggccccggcgaggaggcgcggaaccatggccgatgggggcgagggcgaagacgagatccagttcctgcgaactgtaagcgccgtgcgtcgcgtgtgctgtcaggggaagggggcgtcagggcatccactagcggggtccgggcagagtgacagcgggcagcggggactcgcgggcggggcgagggggtgccccctgaggatgcgggaggagcgggcatcaccaagtgtgtgcaggtgtgcgtgttggggcgagggaaggcaagggcgcgtgtctgtgcgcgcgtgtggaaagctagaggatggagcgcggctagccggcggcaggcgcccgggctcggacccggggcaccggggacaggagcgtcggagctgcgggaaccgggagaggaggggacggccggtccggcctgcctggtggcacggctgggacctcccgggcggccgggggcagggtgcagagcagggtggcccgtgggggcgcggggagcggcgggaactcgggctgtttctgggaataccgccgccgggaggtttcttgggctttcgggctggacccgcgcgttgtcacggagcgaagacgttggttcgcttactccgtgtagcgtgcggcgcagctgaccgggggcgggggtgatggtgcaggacgctgcgcggaggtttcccccaagtcaaggtgctgcgaaagcggaggaggagtcgcctccg

SEQ ID NO: 4251 - DNA, 6000 bp, Homo sapiens
aaggaaaaactgcttagtgaagaacttagaagctgtggagaccttggggtccacgtccaccatctgctctgataaaactggaactctgactcagaaccggatgacagtggcccacatgtggtttgacaatcaaatccatgaagctgatacgacagagaatcagagtggtaaggccagggttaccacacacctcagccacctgctgacttcgcttggttttttttcttttaagaaattgcatgaaatttcttttttttttttaagctcatggcagctttttctttcttttttgttttttttttttttatcatttagtgaagagtcaagggtatgggatattgattttttgcatgtcagtagaaactttaaattgccctacaaacgtgactgaagaatgcctaaaatgtgattggtttcattaattgggaaatgagatgtatcactgcagatttctatgggactttaataggagaactgagaacacagcctttgaagttaatgcattgttgttctgttgtgttttcttgcctccatcaggtgtctcttttgacaagacttcagctacctggcttgctctgtccagaattgcaggtctttgtaacagggcagtgtttcaggctaaccaggaaaacctacctattcttaaggtatgctcaagagttaactaatggagggatgtagacagcacatgagaactgccatttgagtgttaaaagtagcaaattacctttgtggtctgtgtgactgttcactgtagaacacctggagtggtctgtgcagtactttgctgtgtgtaacttacattgtgttgcctgtagatcctgatgtattataggaccccctgctccatataggttgattaaaaagggaagatgcagtaaaaatctgaccaaagtgggaggggaggagacggaagacagtctttattggtgaaaaacctaattcatctgcttttactactcttgagtttatatgttatcacctaacctagtggacagtgagagctgagggctgcagtgactccataatcgtatttgcatattaggatacagtagattccagtaactcctttaagccatttattttcctgaaatagctcagcttatcttatcttattggttcttagcttgtttactaatgatgtaaaaataagctccaggccaaaataagcccagccttagcctgtggaattctgatgcagtttgaaatgattgagattttactatgctgcccaagtgaagatgcagtctcagaaggatcatgaattgtacaaagtcctgtaggagaagaaagctatgtgaggctctctgggtcccacattctctgtgaagctgcctgtagtagttgtgggtataaactaagttgccaaagggaatatggcttggatgtaactcagatgccttctgtgatgaggatagggttcatttattctgcaaaggagattttcttggcattgaattgatgttgatttgaggataatgttgtgtatcttgaggataaaacttgagataaatgtttcatgtttttctttacctcaaagtggaaatgttctaggctttgagcatcaggtcccacaagtatcaaatctttcctgattaaaaaaccccagaaaggtagcagaagctgtattccaagtatttctggagttcggccatgttgatggcattattactaaaaagcggggagggagaagcagccctattctgcttttattaaaaatggcttttattaaaataagtggcttttatttaaaatgtcccccacttattttgtgtttctttccaaacccagccaactttcttgctctgtggagctgctatacttctgagcattgatctgttcatctgcatatgcagccttacatgttaaggttctaaaaggtttacctatataaaatttgtttacaactgaaaatgctttcagtatgtcaaaatataagtgtgtcatcatgtatcatagaaaatatgtgtgtcactgaagcatgggctttaactaaaatgttacgtggttcgattttattactgttggagttggtaatagctttcagttcacatccttcaggcccagttaattttgcacagttatgattagaatgcacagtcttctactttgcccttgacacaggcagcttgtccccagtcctgagaccttaagcattttcttacgaattctacggtaatgaaaggtgctataaatgtttaatctctcacttggtattttcagataagtaaccagaagtaggtagttgggaatagcattggctttgagacttttcagtaggccaggggaagatagaaatagactgcagtaggttggaagggtgtgttaatacctcttctagggaaggtgacaccttcccacacccttctttcactagaagctgctgtggggtggggaaggacgttggggtttgagtctgaagcactgtgaacagcagtggtcggggctagagggactcctgtcccacttaacaccgctgcttccttcttgcccatcctctgctacctctgacaagattggaatgtgtcttgagttatttttcctgttttttagtgatgcctcagtgaaattttttggagataatttacagatgatgtctctgttcacagcgggcagttgcaggagatgcctctgagtcagcactcttaaagtgcatagagctgtgctgtggttccgtgaaggagatgagagaaagatacgccaaaatcgtcgagatacccttcaactccaccaacaagtaccaggtctgaagatcgatgggtacacggagggcgagggcaagctgggggacaaagaggggaggtacatgagcaggaagaggaaatattctccctttggagttttataagctttagctttaaattttgcccttgattaccatagaatgccataatttagttgaatatcagcaggataaatgaagcctcttgcaaaacactgttgagcccttttgaatacttgtggtttggggtgggtgtgggcatgtggggaggtggctggaggtatgtgtacacaagtgttccccaatccctgtgttctgaaatttcgtatgttcttttttaatgtgaacaaatgtcaggaatttatgaatatatcatagtgctcatttttttttttttctgtagcattcaaagtatgttacaggtgtaagatacttcagagttcagaaagaagggatcttgggtcttttatagcaaatactaaatagtaagtgaagctttgttttccaccatggactgccacacatccaaccatccaatgtttatgtctcaacaatccttcacagttgtctattcataagaaccccaacacatcggagccccaacacctgttggtgatgaagggcgccccagaaaggatcctagaccgttgcagctctatcctcctccacggcaaggagcagcccctggatgaggagctgaaagacgcctttcagaacgcctatttggagctggggggcctcggagaacgagtcctaggtatgcagataacctggtaacagagtgcctgggcacgtttttatccagtaacctagtctggtagacagttaacaagtgatcctatgaacctctatgtcttgttgaccttcctctacatcttttaggggcaatcctcctatttgtttatttgccccctattattttgaaaacaataagtgctgaagaaatgttcagcgtattgggctgtgagaaacaacgtcctgatggtttgcttctgacttgtacttagacctttggtctcatgctagtcagttctgtttgtttaaaaaaaaaaatggtggaagaatatctttcttatctaacctttgttgctgtggacatgacttataagcctaattaaagttaattaattcttagtgtgtctaagttagacatactatttcctgactgccttggaatgggtgtgaatttacatgagcacttatgtgctcagcttagaaactagactaacggtaaacttttagtctaagatgctacctatttttttctaccctgacagctactgaggctgagaagttcactttacccattgtctaatgtatttgggaaagtggcatttataatactttgtaggttgacagatactacattcattatttatataatgcttcctattcttcttaacttgggtaaatctaactcatggtatctttcgtatgtgtctatccaaccgaaggattgctatcttctctttaagtgtttttcacttccctacttccaccaccccaaagtggaagcagtctctcttcttttgagtccacatggcacgttaaagatcattgtaacgtcatacaacattgaaaagaatgtcttacattatcttgattcttgtatttactatactagatgataaaccccctgggcagaatgcatctgatctgtacttatcctcaaaagtagctagcatgatgtcccacattggtgctcagtaatatgtttcagttaaatgaacaagagagcagaggtatggccttgatgtttccagagaaggcagctgaggcagataattccatgatttgccaaatccaaataacttaatgtcatcatcagtgggcaagtctagaaccctaatatcctggtgctcaaaattagtgttatcaattcagtcttctccacattaaacaatttccaattcctttgaggcctggtgtgatggattctgtctttcaaatgctttttttctttcagtgactctatcgttcataaatgttaaataaaaccctcactctgttataaaaatatagactttaaaaattttccaaagtaaacactccagagaaaggtaggcgggctgaataggctgctgttgtccttcttactgcccagcgtcactgaaattttcaaaggctcctgtcctcctcgcaggtttctgccacctctttctgccagatgaacagtttcctgaagggttccagtttgacactgacgatgtgaatttccctatcgataatctgtgctttgttgggctcatctccatgattgaccctccacgggcggccgttcctgatgccgtgggcaaatgtcgaagtgctggaattaaggtagtgcccaggcgcctccttggcttcatctcttagtgccttgggacaccctactcagtgaatgttgccttttgaggtccagatggccagctgttctatctcacctggagtattaatttctcatctccaaagctttacttccacccagaaaagaccagatagtattaaaatatgatggtgtaaacacacgaggaattaaaaattttttggaaagcaattgtgtaaaaaagaaatgtaagcaaagtaaaaacagcaaaagacttgaagttttaaaatacttgcattattctaagttaatgtaccttatgcaatgaatggcatatcttctgtgttttcagttaactgtttgttaatgagtgtttggtgtcctctgtgtatctgtctttttttaagtagctgaatattactcaagtgcactaatatcctgttgctgggtatttggtttctgttttttactctcaggattttattttatttattttttgagacagagtcttgctctattgcccaggctggaatgtcatagcacgatctcggctcactgcaacctccgcctcccaggttcaagcaattctcctgccccagcctcccaagtagctggaattacaggcacccgctaccacgcccagctaatttttgtatttttaagtaaagatagggtttcgccacgttggccaggctggtctcaaactcctgacctcaggtgatctgcccacctcagcctcccaaagtgctggggttacaagcgtgagccaccacacccggcctactctcaggattaatactgccctgaaaagctttgtagaagttatttcctcaccattccgactgcttctttttaaagtatattctaagtataatcactgcatcaaaaaataacaattttgaattcttgtcacatgttgcttttcctccaagttgtgccaatttgagaatgctagccagtagcatgtggtgtc

SEQ ID NO: 4252 - DNA, 6000 bp, Homo sapiens
caccaacaaatgtggttgctccataatggagagaatgtcaagaatgttgactatctttagacctgcttcattaatagataagatagaaactaaagaacccacccagttggaagaagttattagtcaagtagtgctgcacacgtgaccacagaagttaaaaaggtaaataatgtgtctctacatgtggcccactccagtgaatttggagaaggatttctccttggagtcttaagaggatatttttaaatttaagtgaacaatgtattttatttgcaactattagttatgactgaaacacacataatacgttttgattttcttttttcatttcagcacagtgaaattataatctggacacgagttcctaattattgctttagtagctggtaatgcacttaggaaagttagaaatgagtaaaggagaaccacaaaataatagtaatagcaccatatgtcatgcattttaagaaaattgctaatgtctactttttggccttaagttgtagttgtgggaggctgcttcagggggaggtgtctggaacaaggggctcttctgctccgctaagctttggagcaccaagttcaggctttgtgtagataagctcaaggatttttcaacaggggtgggggagtggaacaatctaaatttaaactatagaatcaacattttctttaaaaattgttccagttttcaagaggcgtaggtggatcctgtgaattatgtgataatgcacacgcttttcctacatcctgcttatgtcaaaacatttccagagactttcattttggaggttttattttcaggctacagaatgggctgggcgctcccttttttatctcttatgcaaagaattttaaggagtcttaggctgactttttaatatgggaagctggtaaaggtcagtgttcttatgtgagcactaaagatatttaaatttgatatgtaataatgtctttgcaaagcaaagaatataaacagtataaaagtactagcatttagatgtattgtatcatttaatccttaaaaacatgaaatgaggttggcactattctttatctccacgctgtggaagaggaaattgaaatgtagaagttagtaacttgcctaaggatacactgctggtaagtggtaaagcccaggattttaactcaaggctgtctgattgagaatgcggactcataagcacaatattgcactctaagttaataatgtaaagttagtttcattctttcagtagggaagatggaaggctgcagaatagggattttgatagcaaaaatctcctcattaaccccaaaaggaagtggcactggcagggccattctgaagcctaccggtagcttcagtattgttcttaatgctcttggatggagagaatgtatcttgagccaatgtattaatagtagattgctttgcttatgtagtaggcaatatatgggtatacattttcctgactattatcttaatgactattccaaattatgactaccttaaaaactaccaaaatcccctgctccagaattttcagtttcagatgaggttcataattcatggcctcacttttcccacattctcctacaggttggacgtgataagtatgagcctgcagctgtttcagaacaaggtgataaaaagggcaaaaagggcaaaaaagacagggacatggatgaactgaagaaagaagtttctatggtaagtactaggaggaatattgtattccatccttattaaaaatccatgatttttaatcccccaggcctcactgtattcttcaaagaactgctatatattaaaagagatcatagcagctgtacagatctcatctagtcgtagaggttaatgttgaacatatactttttaaaagctgttagagggtaggaaaagttattcagtcactctggcataaccagagataacagaaggaacttaggttgataccatgagtctttgcttttctctgtattatatcaaacattgggaaattcagcctctccaggcgatggaagcttccatagacttaacctgtctagaatcgacctggtcatcagagaaggcagataaggttttactagatccctgagagctgctgggtttctctgaagtgttatggcaaatagtaatgggccacggtcactcagctttagccattctccagtgaagagctgtcaatgataactgtgtggttgcaaagccacaaagcgatggtgaaaattgtaccaacttatgcactgaagaaaacatctgcactttgtttaataagcttaatgatagtaatgaataatgctattttttctgtcatttttttatactacactgtttaactattttctttgtttctgttttcccttaggatgatcataaacttagccttgatgaacttcatcgtaaatatggaacagacttgagccgggtatgttctagtttgaaagctgttgtacaaaatcctagttttccgtattatattttcccctgtattacatacaggtctaacctcaggggctctagtaagaaaatgacagacaccatctgcgtatctaccatgtgacatgcacagaatttgggcatttatatgctaccgtttcttttccctgaaactttttgaaagtagatgttattttcttttccctattttatagcagttgagagccagtaagtgggaacaccaggacttgcagttggcttcaaagccatgcttatgccttgaccttttgatgataaattttccctttatttttctacatttgttaaatagagttgaatctttcacctagttgaatcttcaacaattcccatttttgcacttttcccagctagcccattgcagtgtgttatggttatactatcatttgtttagttattctatcatttagttggaaattgttttgtacaaaaattaaagaaaccttttcataaaataggcgttatgtatccttgttatgtagaggattttgatattaaatgtgtaacaaatgttataaaagtaaatagtctagggatgtcttatttccagataatcactgaaatgtctgggaataacttgaatagcaagccaatatgtagcattttttcagtaaggcatcaagagacatgggtactgtggtattctgatatatattggtttttgtccacagttcctggttcataactcccatagcccttattacagtcgtttgttataatgttgggtgtgttagacctcagtggcaggcttcaagaaacaggatctctctcctgccctccttttcacctgtcgcaaggcaggactctaatcttgttccacttttctgattttccaggtagatagtgttggaattgaattggaggaaaccttggtggtggggagaaaccgccacacctttgctcacagaagtcatcttctgtgttgattgttggggtgtaagagtagagaagaggccgggtgcggtggctcatgcctgtaatctcagcactttgggaggctgagactggtggatcacctgaggtcaggagttcgacaccagcctgaccaacatggagaaaccccgtctctactaaaaatacaaaattagcctggcatggtggtgcatgcctgtaatcccagctactcgggaggctgaggcaggagaactgcttaaacctgggaggtggaggttgcagtgagccaaggttgtgccattgcactccagcctggacaacaagagtgaaactccatctcaaaaaaaaaaaaaaaaaaaaaaaaaaaaaaaggagagaagaacaaggttgagagcgtttttcttgacacaagcactttaagctccaagaggaggcctcgagtcagctcagaacaacatgccaacagtgactctgtgcttactttgtgccaggcagtctctagccacttcacatctcacttaagtttttattagagtcttaatgaagtgtgctctctccgacctatgcccattactcaaatgctgcgggtctatttctttacttataaaatgaggttaataatgcctaaaaaaggattgtcatgagaattaaacaagttaattaaagcactgaattcagttcctggcatgtagatagcactcaaatgtttggtaacatgagcacaaaacacagataaatagatactttagacaaaaatattttattttttttttgacttgttattttgagagtataaaagtgatcatattttcctctcttaatgagagcttatatgtaattgcctgctgtcagtgaatcttgggtttaaggcccattagaaaaatagcaggctttagtagagtggttttttccagtgagtacttttcagtcaacaggtttattgggaggtggctaaaatgcacatggaggtgagcccttccctgccagacaagcaaagaatcaagctgtatatttaaaacttggctgttaacccaaaggatttctacaggaagtttttttctcctttgatgtttgtagaggggttttttttcccctcccgacaaaatcaatacacagaaaacccaaagctcttaatttgcaaaactgaatggatttgtgaaaatagatacctttttggcagaaatgcaatttggcattaatcccttgatctaaaacttagaagaaaccaggctgaattcaaatttattgatggatcaatttaaagagttttaatctgggtgttatgagttccttgggcctattgtttgcctgaaccctgtggggactggctcatcagcagaattattcatggaggaatttgctaggttttaccttggctctctagcttgggacattttgtttcttccttaaatccttattgcaaccgtccagctaccaggtaggtatattgccttgtaagtgctggtacagtttgccttatttatattccactgcttctcagggattaacatctgctcgtgcagctgagatcctggcgcgagatggtcccaacgccctcactccccctcccactactcctgaatggatcaagttttgtcggcagctctttggggggttctcaatgttactgtggattggagcgattctttgtttcttggcttatagcatccaagctgctacagaagaggaacctcaaaacgataatgtgagttctgtaattcagcatatggatttgtagtacacatcagatatcttctccgtctttgtctcccacttcttctcaattaccactcattacttaatggttatgaactcattacttaatggttatgaacagctgttgccttcaaggctcatccattcttccttcgtttccatttcctctctctaccacccacgttgtagatgctcttacaagtgggatgcccacctgcatgtgctgctgtgagcaggcagctctgctcaggccccggccgccacccactggatggcagagcacagcgattcatgttggcacatccacctgtccagaaatgcttggtggccattcttcaaaatccacaagttggttgaaaaacaatctttgttttataaagcaggagaaactgatgcatctagaacctttccaaacgtccagttagtgatcaagtgttggtgtgcctgactccatttctgacccttcctgtgtggtctttagaaggataaataagaaaacatgagttctatatttctgaaatcttggtttctctattaaaaatctgttttttattcagtcaaaaaattaattgaatgtccctaattattgtgtagagccacgggccctaacttgtcttttcccttccagctgtacctgggtgtggtgctatcagccgttgtaatcataactggttgcttctcctactatcaagaagctaaaagttcaaagatcatggaatccttcaaaaacatggtccctcaggtaccagacgctttgtccttccccagtggatgacttgacagccccaagcatgtcagcctgtgaattagtgtgaagttaaggttttccaagtattacatgactcatcagagagatggatgtcttctaccccacccaaaaccaacctattttccttctatccaaaaagtggtagcctttcttttgaatg

SEQ ID NO: 4253 - DNA, 6000 bp, Homo sapiens
gctgtcaggctcattaagaattgacatgcaggcagattggggaggaaggttaagtcatgttcttttgggttgagggaacctgctggctagaactgtcgctgttctttgacccttgctggctgctgggctgcccaagtttggatatactaaactgggctcacaaagggatctactgctttggccttggtaaattatattctccaggatgcatatttgggtgggcaagagaaggaatatgaaggcatggtggcccctcaggctcacctcctctgcagagaactgctgctcctgcagtgatgtgctgctgctggggctggatagcagccatggtactatgacagtgtcctccctcaaccccggccatcccttagccctccagtccctggctagacaattccttgcacataaactaaactacttagtcatttaggagcaaatggagatgtaataaactgggctagatcatttcttgactgttattttctttaagttttcactgttaagatcaaatgaaaaataatgccaaaggagttttttcttcaaaggtttgaaaagaattttcatagaaagcgaaaaatggcagtaatgtatatgttaattaagaccaagttataataatagcctttgtgtagtgctttgagaatacttttacatacacaattgtgttggatgatttaataatgtatcgaccaggaaaatgagaaagcacccctcccccttaccttttacattgaaggtagcccagacttggcagcctctagggaaccagcaaggtcagagtccatcacacaactttcctgctaaagtggtatttgccaaatcatgtccagaggtgttgtttctacaatcttcttggcaactccgaaatgggctgcatttggggcacttccttttgccatccttctggcccttcttgcccgtcaaaagcttttgtctgtgggctttggaaatagtccagtttttaaggtgttttatttttcagagttaatggtttcttgactaatcagactatgaaaatgccttctctaggttctttaatagttataccaagtgttattcccattttaggaatgaagaaactaaggctgacaggcaaaggtcatgtagccagcatgtggcaacactagaataaattggcagactcaacaccattagcagacctgtctggagggaatggtgggtcttgaactttcaagtaccctctaaactttttcagcaggaatttcagaagtctcaagaattctgagctccctgctggccatgggacattgtgctgatatggtgggaaaaatgcaggttgagaaagccttcgcatcctgccctgttggaggctggtgtttgggatgggtatgaaggcctttggcggtggctatagcttatgcagacctgaagcaatatacctctgggatggaagatcctgcttattttgggataatttctaaatctgtcatatctatccccaaccctgtccccattaaatggctaattgccaaaaaagaggaagcaacatcttcagctctagcaagtctcggggatgtctcactcattgtgaggactgtgaggattcggtatatatttttaagtgagtgaaccttgttacatgttttaaccttggttcctcctgtcaagaattttatcttctcatgtcttgggcaccttttccctctacccagatcaaatagcaaaatgcttagttaatctttgagaggatagaatccatgggaagcacaggatgaaatgatgacgctgtgctaagctgtgtcaccgtgggtaagcccctgcccttgctgtgactttccacttcctaaattagaatggaagggggaaaaaaaaaaaccataacccaacttcatttttatgagtggccctttagaaaatagtgtaatccgttgagtttccattgtacctttcctcagagatgctcaaaggggcgggggtgcccttacatggaacatgatgagagtgaggattaatcactcccagtcctctgggaggggggaagtgacctgaactttctaattgaaaaagtaggaagtgtgtgcccaatgcccagatgagtgggaagattactgtagttgattgaggaaatgccgtatttatcattcacccttcccatgacctttgtttttccctaatgccttaaaaaataataaggaaacattgtcctacctgattctaccactgttcatctcacgcagtgtgcactccctgactctgaattttgcagctttgagactgaggtaattgagactgatagggatttaaggatatttggttcccacaagaataagctaatattaagttattattttacttgtggagaagaactaaattgtataagctgcctggttcttctagacacacattgcctagtgaaaaaattaaaattttgaagaaaaagcagttttacttgttaatacttgccatgtgtctcacccacaaatagcctcatttaaaactttgccttacctagcatgaatggataaagaaaaaggagagttattagggaatctaaattcccaactaactttagcactgatagtggtgaagctatgggcaagacatttattttgtaagtgggggtaaaactttggaacgtgttcaaagcctagctgctctagtaatcctctctcctcttctggagtggaagatattggaagtctgagaataagcaaagcatgcagattatgaagctgaggggttataactatttcatttattgaaatatatttcaatgatattcaacttgctcagagagaatccgtgagctgtattttaaaaatcaatacaggctgggcacggtggctcacgcctgtaatcccagcactttgggaggccgaggtgggtggatcatgaggtaaggagttcaagaccagcctggccaagatggtgaaaccccgtctctactaaaaatacaaaaattagccaggcgtggtggcgagcgcctataatcccagctactcaggaggctgaagcagggaattgcttgaacccttgggcggaggttgcagtgagcttagattgcgccactgcactccagcctgggcgacagagtgagactccatccccaaaaaaaagaaaattaatacaaagtggtcacataaatcttttagagatccttagtcaatgtctttaaaatgttttttaagtgttgtgctttctcattaaaggtatgatatacctttaattaaagctaaagatataccactttagctgtggttcctttctggtagatgacctgccttttcctttttgttttatttgtccacttgtatgtgttactatttttcatttaaactctggcaccaagagctgtaccgaaagaggcaccaacaaatgtggttgctccataatggagagaatgtcaagaatgttgactatctttagacctgcttcattaatagataagatagaaactaaagaacccacccagttggaagaagttattagtcaagtagtgctgcacacgtgaccacagaagttaaaaaggtaaataatgtgtctctacatgtggcccactccagtgaatttggagaaggatttctccttggagtcttaagaggatatttttaaatttaagtgaacaatgtattttatttgcaactattagttatgactgaaacacacataatacgttttgattttcttttttcatttcagcacagtgaaattataatctggacacgagttcctaattattgctttagtagctggtaatgcacttaggaaagttagaaatgagtaaaggagaaccacaaaataatagtaatagcaccatatgtcatgcattttaagaaaattgctaatgtctactttttggccttaagttgtagttgtgggaggctgcttcagggggaggtgtctggaacaaggggctcttctgctccgctaagctttggagcaccaagttcaggctttgtgtagataagctcaaggatttttcaacaggggtgggggagtggaacaatctaaatttaaactatagaatcaacattttctttaaaaattgttccagttttcaagaggcgtaggtggatcctgtgaattatgtgataatgcacacgcttttcctacatcctgcttatgtcaaaacatttccagagactttcattttggaggttttattttcaggctacagaatgggctgggcgctcccttttttatctcttatgcaaagaattttaaggagtcttaggctgactttttaatatgggaagctggtaaaggtcagtgttcttatgtgagcactaaagatatttaaatttgatatgtaataatgtctttgcaaagcaaagaatataaacagtataaaagtactagcatttagatgtattgtatcatttaatccttaaaaacatgaaatgaggttggcactattctttatctccacgctgtggaagaggaaattgaaatgtagaagttagtaacttgcctaaggatacactgctggtaagtggtaaagcccaggattttaactcaaggctgtctgattgagaatgcggactcataagcacaatattgcactctaagttaataatgtaaagttagtttcattctttcagtagggaagatggaaggctgcagaatagggattttgatagcaaaaatctcctcattaaccccaaaaggaagtggcactggcagggccattctgaagcctaccggtagcttcagtattgttcttaatgctcttggatggagagaatgtatcttgagccaatgtattaatagtagattgctttgcttatgtagtaggcaatatatgggtatacattttcctgactattatcttaatgactattccaaattatgactaccttaaaaactaccaaaatcccctgctccagaattttcagtttcagatgaggttcataattcatggcctcacttttcccacattctcctacaggttggacgtgataagtatgagcctgcagctgtttcagaacaaggtgataaaaagggcaaaaagggcaaaaaagacagggacatggatgaactgaagaaagaagtttctatggtaagtactaggaggaatattgtattccatccttattaaaaatccatgatttttaatcccccaggcctcactgtattcttcaaagaactgctatatattaaaagagatcatagcagctgtacagatctcatctagtcgtagaggttaatgttgaacatatactttttaaaagctgttagagggtaggaaaagttattcagtcactctggcataaccagagataacagaaggaacttaggttgataccatgagtctttgcttttctctgtattatatcaaacattgggaaattcagcctctccaggcgatggaagcttccatagacttaacctgtctagaatcgacctggtcatcagagaaggcagataaggttttactagatccctgagagctgctgggtttctctgaagtgttatggcaaatagtaatgggccacggtcactcagctttagccattctccagtgaagagctgtcaatgataactgtgtggttgcaaagccacaaagcgatggtgaaaattgtaccaacttatgcactgaagaaaacatctgcactttgtttaataagcttaatgatagtaatgaataatgctattttttctgtcatttttttatactacactgtttaactattttctttgtttctgttttcccttaggatgatcataaacttagccttgatgaacttcatcgtaaatatggaacagacttgagccgggtatgttctagtttgaaagctgttgtacaaaatcctagttttccgtattatattttcccctgtattacatacaggtctaacctcaggggctctagtaagaaaatgacagacaccatctgcgtatctaccatgtgacatgcacagaatttgggcatttatatgctaccgtttcttttccctgaaactttttgaaagtagatgttattttcttttccctattttatagcagttgagagccagtaagtgggaacaccaggacttg

SEQ ID NO: 4254 - DNA, 6000 bp, Homo sapiens
tattaaaaatctgttttttattcagtcaaaaaattaattgaatgtccctaattattgtgtagagccacgggccctaacttgtcttttcccttccagctgtacctgggtgtggtgctatcagccgttgtaatcataactggttgcttctcctactatcaagaagctaaaagttcaaagatcatggaatccttcaaaaacatggtccctcaggtaccagacgctttgtccttccccagtggatgacttgacagccccaagcatgtcagcctgtgaattagtgtgaagttaaggttttccaagtattacatgactcatcagagagatggatgtcttctaccccacccaaaaccaacctattttccttctatccaaaaagtggtagcctttcttttgaatgtaaactctgaatacaggcacaccatgtaacagcaatatctcttaaactggcgagcaagcttttgtaacttgtgtaaataaaaaagtgaataatatctttgttttgtattcaggtaattaggattatgactatttttattttcttgttttggacactaccttctctttgttggtatactaacggtgtaaattgtttcttttccaaagcaagcccttgtgattcgaaatggtgagaaaatgagcataaatgcggaggaagttgtggttggggatctggtggaagtaaaaggaggagaccgaattcctgctgacctcagaatcatatctgcaaatggctgcaaggtagctcttttattttaacaaacctcatagctagctctgctgttcgggcagcttgatttgaggggtacagtagcccatgataaggctggtgtattcacatgacatttttcttcttttcctcacatataggtggataactcctcgctcactggtgaatcagaaccccagactaggtctccagatttcacaaatgaaaaccccctggagacgaggaacattgccttcttttcaaccaattgtgttgaaggtaggccatttttgggcactttgagcatggcgtggtatttctcttgggcattaacaaaatcaaaaccataggcacaatctcttgttttattggctccatttctgagaacttgtgtcaagcacagagcagaggtgttttcctagctggcaggaaaccttgtggcagtttcccttccctccacctccaccctgcctcttctgtcaacaacaccagtctggcatgggtgttggagctgctgtcctgctactggagagaagtccctttgccaaacagcatgtacagccaaagagctggcccttaaaaagtgcttttatcaactctttttgtttttttagtcatcctatgtaattgtgtaaaatccgtggcttccttcaggttagatacaattaggtacagttctccctccccttctttttaaggcaccgcacgtggtattgttgtctacactggggatcgcactgtgatgggaagaattgccacacttgcttctgggctggaaggaggccagacccccattgctgcagaaattgaacattttatccacatcatcacgggtgtggctgtgttcctgggtgtgtctttcttcatcctttctctcatccttgagtacacctggcttgaggctgtcatcttcctcatcggtatcatcgtagccaatgtgccggaaggtttgctggccactgtcacggtaagaggcaggtgatggtcaccctgactcagatcagcttgcacgaatgttacactcttccgctatcctattctaaggtattgccaacttatgttttattctggatgtttgatatagttcttcttgagagccacatcacgtggtgaattttgacagtgagaaaacctcagcatttgtttatacgtaagataaccccaaagcatacattttgcttttaaattatcacgtggtcctgaacagtgcagtggagaaaggagaagaacttgggatcaagtagggggatagaatatggtagaatcctgttattatttttcttaatagattgcttttctggaaggaaggggaagcctcatgtatgggttccccttattatttcttcaaacttcagaagaaggttggagagatttaattttagacaaatttcttccacattaggatatagcaagaatctgtatagaattccagcctggttgagtgaagtaataatcttcctaatattttttaggtctgtctgacacttactgccaaacgcatggcaaggaaaaactgcttagtgaagaacttagaagctgtggagaccttggggtccacgtccaccatctgctctgataaaactggaactctgactcagaaccggatgacagtggcccacatgtggtttgacaatcaaatccatgaagctgatacgacagagaatcagagtggtaaggccagggttaccacacacctcagccacctgctgacttcgcttggttttttttcttttaagaaattgcatgaaatttcttttttttttttaagctcatggcagctttttctttcttttttgttttttttttttttatcatttagtgaagagtcaagggtatgggatattgattttttgcatgtcagtagaaactttaaattgccctacaaacgtgactgaagaatgcctaaaatgtgattggtttcattaattgggaaatgagatgtatcactgcagatttctatgggactttaataggagaactgagaacacagcctttgaagttaatgcattgttgttctgttgtgttttcttgcctccatcaggtgtctcttttgacaagacttcagctacctggcttgctctgtccagaattgcaggtctttgtaacagggcagtgtttcaggctaaccaggaaaacctacctattcttaaggtatgctcaagagttaactaatggagggatgtagacagcacatgagaactgccatttgagtgttaaaagtagcaaattacctttgtggtctgtgtgactgttcactgtagaacacctggagtggtctgtgcagtactttgctgtgtgtaacttacattgtgttgcctgtagatcctgatgtattataggaccccctgctccatataggttgattaaaaagggaagatgcagtaaaaatctgaccaaagtgggaggggaggagacggaagacagtctttattggtgaaaaacctaattcatctgcttttactactcttgagtttatatgttatcacctaacctagtggacagtgagagctgagggctgcagtgactccataatcgtatttgcatattaggatacagtagattccagtaactcctttaagccatttattttcctgaaatagctcagcttatcttatcttattggttcttagcttgtttactaatgatgtaaaaataagctccaggccaaaataagcccagccttagcctgtggaattctgatgcagtttgaaatgattgagattttactatgctgcccaagtgaagatgcagtctcagaaggatcatgaattgtacaaagtcctgtaggagaagaaagctatgtgaggctctctgggtcccacattctctgtgaagctgcctgtagtagttgtgggtataaactaagttgccaaagggaatatggcttggatgtaactcagatgccttctgtgatgaggatagggttcatttattctgcaaaggagattttcttggcattgaattgatgttgatttgaggataatgttgtgtatcttgaggataaaacttgagataaatgtttcatgtttttctttacctcaaagtggaaatgttctaggctttgagcatcaggtcccacaagtatcaaatctttcctgattaaaaaaccccagaaaggtagcagaagctgtattccaagtatttctggagttcggccatgttgatggcattattactaaaaagcggggagggagaagcagccctattctgcttttattaaaaatggcttttattaaaataagtggcttttatttaaaatgtcccccacttattttgtgtttctttccaaacccagccaactttcttgctctgtggagctgctatacttctgagcattgatctgttcatctgcatatgcagccttacatgttaaggttctaaaaggtttacctatataaaatttgtttacaactgaaaatgctttcagtatgtcaaaatataagtgtgtcatcatgtatcatagaaaatatgtgtgtcactgaagcatgggctttaactaaaatgttacgtggttcgattttattactgttggagttggtaatagctttcagttcacatccttcaggcccagttaattttgcacagttatgattagaatgcacagtcttctactttgcccttgacacaggcagcttgtccccagtcctgagaccttaagcattttcttacgaattctacggtaatgaaaggtgctataaatgtttaatctctcacttggtattttcagataagtaaccagaagtaggtagttgggaatagcattggctttgagacttttcagtaggccaggggaagatagaaatagactgcagtaggttggaagggtgtgttaatacctcttctagggaaggtgacaccttcccacacccttctttcactagaagctgctgtggggtggggaaggacgttggggtttgagtctgaagcactgtgaacagcagtggtcggggctagagggactcctgtcccacttaacaccgctgcttccttcttgcccatcctctgctacctctgacaagattggaatgtgtcttgagttatttttcctgttttttagtgatgcctcagtgaaattttttggagataatttacagatgatgtctctgttcacagcgggcagttgcaggagatgcctctgagtcagcactcttaaagtgcatagagctgtgctgtggttccgtgaaggagatgagagaaagatacgccaaaatcgtcgagatacccttcaactccaccaacaagtaccaggtctgaagatcgatgggtacacggagggcgagggcaagctgggggacaaagaggggaggtacatgagcaggaagaggaaatattctccctttggagttttataagctttagctttaaattttgcccttgattaccatagaatgccataatttagttgaatatcagcaggataaatgaagcctcttgcaaaacactgttgagcccttttgaatacttgtggtttggggtgggtgtgggcatgtggggaggtggctggaggtatgtgtacacaagtgttccccaatccctgtgttctgaaatttcgtatgttcttttttaatgtgaacaaatgtcaggaatttatgaatatatcatagtgctcatttttttttttttctgtagcattcaaagtatgttacaggtgtaagatacttcagagttcagaaagaagggatcttgggtcttttatagcaaatactaaatagtaagtgaagctttgttttccaccatggactgccacacatccaaccatccaatgtttatgtctcaacaatccttcacagttgtctattcataagaaccccaacacatcggagccccaacacctgttggtgatgaagggcgccccagaaaggatcctagaccgttgcagctctatcctcctccacggcaaggagcagcccctggatgaggagctgaaagacgcctttcagaacgcctatttggagctggggggcctcggagaacgagtcctaggtatgcagataacctggtaacagagtgcctgggcacgtttttatccagtaacctagtctggtagacagttaacaagtgatcctatgaacctctatgtcttgttgaccttcctctacatcttttaggggcaatcctcctatttgtttatttgccccctattattttgaaaacaataagtgctgaagaaatgttcagcgtattgggctgtgagaaacaacgtcctgatggtttgcttctgacttgtacttagacctttggtctcatgctagtcagttctgtttgtttaaaaaaaaaaatggtggaagaatatc

SEQ ID NO: 4255 - DNA, 6000 bp, Homo sapiens
catgcctgtaatctcagcactttgggaggctgagactggtggatcacctgaggtcaggagttcgacaccagcctgaccaacatggagaaaccccgtctctactaaaaatacaaaattagcctggcatggtggtgcatgcctgtaatcccagctactcgggaggctgaggcaggagaactgcttaaacctgggaggtggaggttgcagtgagccaaggttgtgccattgcactccagcctggacaacaagagtgaaactccatctcaaaaaaaaaaaaaaaaaaaaaaaaaaaaaaaggagagaagaacaaggttgagagcgtttttcttgacacaagcactttaagctccaagaggaggcctcgagtcagctcagaacaacatgccaacagtgactctgtgcttactttgtgccaggcagtctctagccacttcacatctcacttaagtttttattagagtcttaatgaagtgtgctctctccgacctatgcccattactcaaatgctgcgggtctatttctttacttataaaatgaggttaataatgcctaaaaaaggattgtcatgagaattaaacaagttaattaaagcactgaattcagttcctggcatgtagatagcactcaaatgtttggtaacatgagcacaaaacacagataaatagatactttagacaaaaatattttattttttttttgacttgttattttgagagtataaaagtgatcatattttcctctcttaatgagagcttatatgtaattgcctgctgtcagtgaatcttgggtttaaggcccattagaaaaatagcaggctttagtagagtggttttttccagtgagtacttttcagtcaacaggtttattgggaggtggctaaaatgcacatggaggtgagcccttccctgccagacaagcaaagaatcaagctgtatatttaaaacttggctgttaacccaaaggatttctacaggaagtttttttctcctttgatgtttgtagaggggttttttttcccctcccgacaaaatcaatacacagaaaacccaaagctcttaatttgcaaaactgaatggatttgtgaaaatagatacctttttggcagaaatgcaatttggcattaatcccttgatctaaaacttagaagaaaccaggctgaattcaaatttattgatggatcaatttaaagagttttaatctgggtgttatgagttccttgggcctattgtttgcctgaaccctgtggggactggctcatcagcagaattattcatggaggaatttgctaggttttaccttggctctctagcttgggacattttgtttcttccttaaatccttattgcaaccgtccagctaccaggtaggtatattgccttgtaagtgctggtacagtttgccttatttatattccactgcttctcagggattaacatctgctcgtgcagctgagatcctggcgcgagatggtcccaacgccctcactccccctcccactactcctgaatggatcaagttttgtcggcagctctttggggggttctcaatgttactgtggattggagcgattctttgtttcttggcttatagcatccaagctgctacagaagaggaacctcaaaacgataatgtgagttctgtaattcagcatatggatttgtagtacacatcagatatcttctccgtctttgtctcccacttcttctcaattaccactcattacttaatggttatgaactcattacttaatggttatgaacagctgttgccttcaaggctcatccattcttccttcgtttccatttcctctctctaccacccacgttgtagatgctcttacaagtgggatgcccacctgcatgtgctgctgtgagcaggcagctctgctcaggccccggccgccacccactggatggcagagcacagcgattcatgttggcacatccacctgtccagaaatgcttggtggccattcttcaaaatccacaagttggttgaaaaacaatctttgttttataaagcaggagaaactgatgcatctagaacctttccaaacgtccagttagtgatcaagtgttggtgtgcctgactccatttctgacccttcctgtgtggtctttagaaggataaataagaaaacatgagttctatatttctgaaatcttggtttctctattaaaaatctgttttttattcagtcaaaaaattaattgaatgtccctaattattgtgtagagccacgggccctaacttgtcttttcccttccagctgtacctgggtgtggtgctatcagccgttgtaatcataactggttgcttctcctactatcaagaagctaaaagttcaaagatcatggaatccttcaaaaacatggtccctcaggtaccagacgctttgtccttccccagtggatgacttgacagccccaagcatgtcagcctgtgaattagtgtgaagttaaggttttccaagtattacatgactcatcagagagatggatgtcttctaccccacccaaaaccaacctattttccttctatccaaaaagtggtagcctttcttttgaatgtaaactctgaatacaggcacaccatgtaacagcaatatctcttaaactggcgagcaagcttttgtaacttgtgtaaataaaaaagtgaataatatctttgttttgtattcaggtaattaggattatgactatttttattttcttgttttggacactaccttctctttgttggtatactaacggtgtaaattgtttcttttccaaagcaagcccttgtgattcgaaatggtgagaaaatgagcataaatgcggaggaagttgtggttggggatctggtggaagtaaaaggaggagaccgaattcctgctgacctcagaatcatatctgcaaatggctgcaaggtagctcttttattttaacaaacctcatagctagctctgctgttcgggcagcttgatttgaggggtacagtagcccatgataaggctggtgtattcacatgacatttttcttcttttcctcacatataggtggataactcctcgctcactggtgaatcagaaccccagactaggtctccagatttcacaaatgaaaaccccctggagacgaggaacattgccttcttttcaaccaattgtgttgaaggtaggccatttttgggcactttgagcatggcgtggtatttctcttgggcattaacaaaatcaaaaccataggcacaatctcttgttttattggctccatttctgagaacttgtgtcaagcacagagcagaggtgttttcctagctggcaggaaaccttgtggcagtttcccttccctccacctccaccctgcctcttctgtcaacaacaccagtctggcatgggtgttggagctgctgtcctgctactggagagaagtccctttgccaaacagcatgtacagccaaagagctggcccttaaaaagtgcttttatcaactctttttgtttttttagtcatcctatgtaattgtgtaaaatccgtggcttccttcaggttagatacaattaggtacagttctccctccccttctttttaaggcaccgcacgtggtattgttgtctacactggggatcgcactgtgatgggaagaattgccacacttgcttctgggctggaaggaggccagacccccattgctgcagaaattgaacattttatccacatcatcacgggtgtggctgtgttcctgggtgtgtctttcttcatcctttctctcatccttgagtacacctggcttgaggctgtcatcttcctcatcggtatcatcgtagccaatgtgccggaaggtttgctggccactgtcacggtaagaggcaggtgatggtcaccctgactcagatcagcttgcacgaatgttacactcttccgctatcctattctaaggtattgccaacttatgttttattctggatgtttgatatagttcttcttgagagccacatcacgtggtgaattttgacagtgagaaaacctcagcatttgtttatacgtaagataaccccaaagcatacattttgcttttaaattatcacgtggtcctgaacagtgcagtggagaaaggagaagaacttgggatcaagtagggggatagaatatggtagaatcctgttattatttttcttaatagattgcttttctggaaggaaggggaagcctcatgtatgggttccccttattatttcttcaaacttcagaagaaggttggagagatttaattttagacaaatttcttccacattaggatatagcaagaatctgtatagaattccagcctggttgagtgaagtaataatcttcctaatattttttaggtctgtctgacacttactgccaaacgcatggcaaggaaaaactgcttagtgaagaacttagaagctgtggagaccttggggtccacgtccaccatctgctctgataaaactggaactctgactcagaaccggatgacagtggcccacatgtggtttgacaatcaaatccatgaagctgatacgacagagaatcagagtggtaaggccagggttaccacacacctcagccacctgctgacttcgcttggttttttttcttttaagaaattgcatgaaatttcttttttttttttaagctcatggcagctttttctttcttttttgttttttttttttttatcatttagtgaagagtcaagggtatgggatattgattttttgcatgtcagtagaaactttaaattgccctacaaacgtgactgaagaatgcctaaaatgtgattggtttcattaattgggaaatgagatgtatcactgcagatttctatgggactttaataggagaactgagaacacagcctttgaagttaatgcattgttgttctgttgtgttttcttgcctccatcaggtgtctcttttgacaagacttcagctacctggcttgctctgtccagaattgcaggtctttgtaacagggcagtgtttcaggctaaccaggaaaacctacctattcttaaggtatgctcaagagttaactaatggagggatgtagacagcacatgagaactgccatttgagtgttaaaagtagcaaattacctttgtggtctgtgtgactgttcactgtagaacacctggagtggtctgtgcagtactttgctgtgtgtaacttacattgtgttgcctgtagatcctgatgtattataggaccccctgctccatataggttgattaaaaagggaagatgcagtaaaaatctgaccaaagtgggaggggaggagacggaagacagtctttattggtgaaaaacctaattcatctgcttttactactcttgagtttatatgttatcacctaacctagtggacagtgagagctgagggctgcagtgactccataatcgtatttgcatattaggatacagtagattccagtaactcctttaagccatttattttcctgaaatagctcagcttatcttatcttattggttcttagcttgtttactaatgatgtaaaaataagctccaggccaaaataagcccagccttagcctgtggaattctgatgcagtttgaaatgattgagattttactatgctgcccaagtgaagatgcagtctcagaaggatcatgaattgtacaaagtcctgtaggagaagaaagctatgtgaggctctctgggtcccacattctctgtgaagctgcctgtagtagttgtgggtataaactaagttgccaaagggaatatggcttggatgtaactcagatgccttctgtgatgaggatagggttcatttattctgcaaaggagattttcttggcattgaattgatgttgatttgaggataatgttgtgtatcttgaggataaaacttgagataaatgtttcatgtttttctttacctcaaagtggaaatgttctaggctttgagcatcaggtcccacaagtatcaaatctttcctgattaaaaaaccccagaaaggtag

SEQ ID NO: 4256 - DNA, 6000 bp, Homo sapiens
tatgggagggagagcagcccctagtgatcaagagagagacacgagggaaacacgtgcgggaggccacacatgcagggaggccagggaaagtggagagagactggaacccccaggccgaccctttattgggtccagggcgttctgcacacaggtttcccttggggagttttaactggtgggtttaatacaagcgggcacgagccccgtggggccacgctgtgactgtgggggactccgtggtgtggctgcacagtccatgtggggcgtggggtccgtggggacatggggggtggtcaccaggggacagtgcgtagggcgggcgtctgggtggatcagctcgaggaagggggatgtgaactgaaaattgttgcgggtggcagccccgcttctggtcagagaaagtccagcctagattcagagtggatgccgaggcggcctaagatgatgagcgttcctgcaagatgtaaagcactcgaggggcaggggtgctgcatcctacacagggtgggtctagagcagaagagcccgtggcgatttggggactcgcattggggcagggctgtgcacagggagcccaagggaggacagaggccagtgctcctcaaacctgatggcatgcacacgcatacacacgcatgcacgtgtcctgatggcacgcacacacatgcccacgcccatgcgtcctgatggcacgcacgtgcacacgcgtcctgatggcatgcacatacacatgcacacacacgtgtcctgatggcatgcagacacgcacatacatgcgtcctgatggcatacacacacacatgcacacaagtgcgtcctgatggcatgcacacactcagacacgcacacacgcgtcctgatggcatgcacacacgtgcgtcctgatggcatgcacacacatgcacacacgtgcgtcctgatggcatgcacacacacatgcacacacgtgcgtcctgatggcatgcacacactcagacacgcacacacgcgtcctgatggcatgcacacacacgtcaacgcatgcaggtgtggccagggagtcctggcttgtgcacttgtggtcctctggttggggttggccccaagctctgaatttccaaccaactccaggtgcagcctgggcagccagcgtgtgggcctcgggctggggcggggctgccatgaggcagctcatagagggcctgggagcagggccaggggaagccacacagggtgtgcggctctagattgatttgaaggtggggccaacaggatttgctcatggagtgggtgtgataccaggaggatggagttgccaagttgccatttggtggaagtggccggatttctgtcctggatgggggcgtctgggcgctgtgctgtggacggtcagtgtagtggcctggagtgtgcacagggcccgtgggtgcagggtgggggaagtggctgagcagccattgcagggctcctgatgggaggccgtgaaactagggcgaccccaggaggatgccaggactgagaggagagcaccctgtgcttgggtgggcgaagaggggctggctggagtgggaagagggggtggggagtggaggagctagaccagggtggggctttggagaggcggagccaggagtggccccttataaggctatgccgttgggtggtcagaaaccagtggtatggctgggggaggtggctcacgcctataatcccagcaccttgggaggccgaggcgggcggatcatgaggtcaggagatagagaccatcctggctaacacggtgaaaccccgtctctactaaaattaaaaaaaaaattagctgggtgtggtggcgcgcgcctatagtcccaactactcaggaggctgaggcagaataatcacttgaacctgggaggcagaggttgcagtgagccaggatcgagccactgcactccagcctgggcgacagagcaagattctgtctcaaaaaaaaaacaaaacaaaacaaaaaaaagtgggaacgtgtgggtgaccctgaggtcgatcttcaggtcaggtttggtagagcagggagaaagcctggtcaggtggatttgagagcttgggaggggaggacgtgtgaagagccatgaatgaggcccgaatccaggggatcaggtcagggcagggggcatttggcagaacttggaggggtgtgtggtggagagtggtgtgtttgaggtgcgttttgctggcctttgggtgcagttgggtcggggaagcaaacggtgctggagagtcgctgggtctggacctgagtcctgagaggggcggcctcagctgggcctggagctcctgctgtgctgggggtgttgcaaggaggccctgcatgcctcttccgacccctctgctcctggtgggggtgtgtgtggacactccagggagaggggtgtgcagtagctgtggttgtctcgagctcccggggcagtgggggtctgggtccagtcgggtggtgggtacaggtggggtggggaggggcattgggtctgggtggtcatgacagtgggtggtagtggagagcaaggtcagtgggggactgagcctgggagccggctggggacggagagtgcaatgaggactcgggagccgagctgagggggggggggggggtggcgtggggggatggggacgaggtctccaggagcccctgctgtggcggacgacaaggccctttctgttttgtttccatgtaggtggctattatcatggaaaactaatttttcccagagaatttcctttcaaacctcccagtatctatatgatcactcccaacgggaggtttaagtgcaacaccaggtaaggtgcctggaggggccgcggaggctttctggctgcggtggggagtgtgcactgacggggcccccgttttgcaggctgtgtctttctatcacggatttccacccggacacgtggaacccggcctggtctgtctccaccatcctgactgggctcctgagcttcatggtggagaagggccccaccctgggcagtatagagacgtcggacttcacggtaagttttagagcctctccctggtgggccgtcagccttgtgtctggggggctgttctctgttcctgagttgcagctgcctttttttttttttttttttttttcttgagacggagtctcgctgtgtctccaggctggagtgcagtggcgcaatctcggctcactgcaagctccgccccccggggttcacgccattctcctgtctcagcctcccaagtagctgggactacaggcgcccgccaccacgcccggctaatttttttttttgtatttttagtagagacggggtttcaccgtgttaaccaggatgtcttgatttcctgacctcgtgatccgcccgcctgggcctcccaaagtgctgggattacaggcgtgagccaccgcgcccggccgcagctgcctttcttctcagtaggcggggctgggtggagttcccaccttgtcccaggcactgtcgtggagactgctttgctctgtggcctcgtgttccccgctgcctctcggtcttgcttttatccacatccagcctcatccacacccgccaggggctcctccttgggatcttggggtgggccaaggcggtaccagttgcacagacggcccgggccttgtcagcggggagcccggtgctttggtggcttgtttttccctgtctttaataggaatcaagtgtgatatcatgaattgatggggggaagattaagaaggctttgtaagactataagttagtttgctgtgaagagtgtgcttattaaatgctttctgcaacacgaagactgcagcccttgactttgaaatcatctgtttttagaatcttgaaagaattgaaattagttttctggctgattcccttcccttccttcctagaaaagacaactggcagtgcagagtttagcatttaatttgaaagataaagtcttttgtgaattatttcctgaagtcgtggaggtaagaaagacggaagtgggtttcgccttcccctgcgttaaaacacttgagtttcacctctttccaaagagtaaaatctgtgtcctgaagctgcagacctccccaggggatggctcctctcccccaggagccccgaggcaggggaggcagaaagcctgggctctggggggtggcctgcggacagctgtgctggtgggccgggggctgggcctgtcccacaggggcgtggagctcgtggttctgagcagccagctgggtggtgtctggggatagctgggaggcacagcggctgccatgtgggactgggactggagtgctccctggtcttggcctctgtggctcagccttgctctggtctgcctgagtgcaggggccaaggggcacagggccagtgaggccggccacgctcgggccctcacctgtgagatggggtcggaatttgacacagcctagggcttggttcttggtggtggaccgtggactcctgagaacgggagtgctggtcctgaaaggcgctggttggagaccagctgcttttctcgctgtttttctcttaggagattaaacaaaaacagaaagcacaagacgaactcagtagcagaccccagactctccccttgccagacgtggttccagacggggagacgcacctcgtccagaacgggattcagctgctcaacgggcatgcgccgggggccgtcccaaacctcgcagggctccagcaggccaaccggcaccacggactcctgggtggcgccctggcgaacttgtttgtgatagttgggtttgcagcctttgcttacacggtcaagtacgtgctgaggagcatcgcgcaggagtgaggcccaggcgccgagacccaaggcgccactgagggcaccgcgcaccagagcgtgacctcggcaggctggacacactgcccagcacaggcagacccaccaggctcctaggtttagcttttaaaaacctgaaaggggaagcaaaaaccaaaatgtgtgactgggctttggaggagactggagcctcagccctgtcctggccacgggccgctggggctggtgtgggtgggccttgtgtgctggatttgtagcttatcttccgtgttgtctttggacctgttttagtaaacccgtttttcattttattagatgtggtcacttagaaatgcaaacttgctgccgaccgcgggctgctcctgcgttcttggagctcctggcgcgtttctcggagctcccggctcctcagcgggtgggaacctcggggcccaggggtggagctggcgtccgcgggtgctggtctggcctggccgtgtggtgatgaggcttagcggggccagtgacggccgtggctcaggatccataagtcggggtttggtctcagcatttacaaatgtgtttacagtcagaatgaaacacattccttctagaaagtgcttgggggtttttgctgccctggaagccaggagcctgctcactccaaccacaagtcgcccttgactgcggcggccgcgagcggggcgggggctgccggtgccctccgcaggccgggcctcctgggcgcccctcggtgctgcaggctggggggccttgggtacctgcagagccttttctctgaattccttatgtccggtgggccagaagcccgtcctcctatgctggtggaaggcggaggaccggagtccctgcagaaggccccgtgcactcgggggcctccctcacatcccgtgccccctgcgctggccttcacagtaggtaatggctccggcccgggtgttcgctgtccacggaacatggcagaggggcaccccggcccggaaagacgccagagccagcaggggctgtttcgggccgcgtggctccccgggtctcggccgtctcccctcttctgcgtctgttccgtgacttcgcctgggtgggatgtaccgcaggtgcatcgcgtcgaggtggggcacggccgccggcaagaaacccaccctgtccggaggcgggcgtgagacaagcccagcccgcacgcgctcatctttcttcgttttttgatcagttta

SEQ ID NO: 4257 - DNA, 6000 bp, Homo sapiens
tggcgggtgcctgtggtcccagctactcgggaggctgaggcaggagaatggcgtgaacccaggaggcggagcttgcagtgagccgagatagcaccactgcactccagcctaggtgacagagcgaaactccgtctcaaaaaaaaaaaaaaaaaaaatgccctattgcactccagcccgagcaacagagtgagaccctgtctcaaaagaaaaagaaaaacctgtgtattctgggcccacactcagacccaccagatcaaggtttttattattgttattattttaattttttataaaaatggggtctcactgtgttgcccaggctgatctcaaactcctgggctcaagagatcctcccacctcagcctcctaaagtactgggattacaggcatgagccactgcgcctggctcagacctggggttttaagcccttttttgtgccatggagcccttgggtggtctggcaaggccaatggatcccttcttattaatctacaaaataaatacataggattcaagggtaatcagttaaactgaaatatagttattaacatcctgaaatactacatttgtgaaacagtaacaccagtggtactttatgttaacaaatgaagaaccagctttagcagcaggtccaacagtggtgtaagttccaagttgtgagggctgtgcgaggatccctgtggcatctgcaacagctgtggcctggtgtgcaaatatcagtgcattctattggtgacaaagttgcagtcattgctaactgctgtggtgtgtagcctacatttattgccaaaggaaatgctgaatttcagaagttagtggaaataagcatgtaatttttcccatccaagttcatggaaccctcaggttaccccagaggttcatgattcccaccttgacccttgcactggactctgctgtgtcatttcaaggtatcatcatcattaattactttttgattagttttttctccctatggaaacattgtaccttgagtaaggttagaaatttatgaaagatgaccgtgcgcagtggctcacacctgtaatcccagcactttgggaggcggtggcaggcagatcactcaaggtcaggagaatttcgagaccagcctggccaacatggtgaaactctgcctctactaaaaatacaaaaattagccaggcgtggtggcgtgcgcctgtaatcccagttacttgggaggcaggagaatcacttgaacccaggaggctgaggttgcagtgagccaagatcacaccactgcactccagcctgggcaacagagtgagactctatctcaaaacaaacaaacaaaaaaaccccacagattgtttaaaattcagttaacaggagagaggatctccttttcttttttgtggttgattctgccacttttgctacacgttggccgtggagagcttgggctgtgggcagcagcttcattcccttctaccagcgtgttgtgggggagtcttggtgtgtgtggaggtagcacaggcccgtggctcacatgggcttcacctggatacacctctagccttgccccttgatgcagccccgcacagccgcagcccaaaaggggccctagcacaccatagaggggagggctgcagggctgcagggcttgaggagtggcctttcccctcagcatgacctggagagtgttggttctgtgcttagccgctgtgtgtgtgcctttctggtaggttgtattactctgtacactggatccaggagctagaggagctgaaggtggtgagggtccccaggtccaccgtaggctatgcttccctaggtgggttccttagcctctgcatctccctctcattcagaaaaagtgattgagaatgtcttctttcctctgtcgcccaaaggttaatggctagacagatgtaaacttgtttggagcttccaaaatatacagacttccgcatgcttactgtgtaccaggcttgggacacgtgtgtgctatgcctttttgtctgcgcagtgtcttccctattaggagaagaggtgctgttggtccggaacttggtggtgtttatatcgggagcagcattgcagcccaggctcagcctctgtggagtgtcctacttcatagcacggattggggaggggaacgaattccatgtgtgtgctttcattcatcttattttgaatctaacatatgttttggcaaggaggatgtgggaaggtggaacaaaagaagcctggggttgggggtggtaaagtcacttctgggaaaaggtgattaaatacaagcttgcgtccagatgggtacatcccagagcgggatcacgagggaattttctcttcatgttttatagttggttgcttcaaacctggttttcaaggtccggtttgaagaccctaacctctcagtccttttctattgtctttgtcttgcttttccacagagttttcaggagttgaaaatgacaatgaaactgagcctgtgactgtggcctctgcaggttgctggattttttccctacattcactattgtgtttcatttaaagatgagactgattcattccacgtgtcgcatgaaacgccccagttgcattttggtcctggacaccatctgagctgcttccctgcattgcgcttccccattgcttcatggagttcccttattctgcccattctgaccccagctggagtgaggacaaatgacatctcaggcagtgcatgcatgggacttccccccccatccagtttgaccctgaccccactgcatgaggctccctgctttttcagtcttacaggcagggtttgggaggccgcctcgtgactgtcatgtggatgaaccacgagacaggaaaagacttgtttctagatattctgtcctgattgacagtaaattttaaatagacgtctctcttttttttttgttttgagatggagtcccgctctgttgtctgggctggagtgcagtggcgcggtcttggctcactgcaacctccacctcctgggtgcaagcaattctcctgcttcagcctcccaagtagctgggactacaggcatgcaccaccatgcccagctaatatttatatttttagtagagacggggtttcgccatgttcgccaggctggtctcaaactctgacctcaggtgatccacccgcctcggcctcctgaagcgctgggattacaggcgtgagccaccatgcctggcaaatagccgtttcttagaaacctcaattcctagtcatgatttacagtgcctgatttctgtaccagaatgagacacattgctgaaaatttgtcccttttccttttcagtttaagaacaaggtttagtgtaacctgtttctggctctttgttgtcatctgtcaagggccattttctgggttttggttttcgttgtaacatctgcacttctcagcaatcctcaggaggaggcaggaaggatgggacttaacaccatagcatccttgaaataggccgttccatgcagggagtattttaagcctcccttttatcctccctgcctcgcttgtgtgggttcattccccagggcgtgccaggtagagaaaacagccatgtggaacccagccagctgagaaggcagtggctggagaggctggtggcgtaggaagtgtcaccatgcaccctggtgatgagaacagggtaggccaccttaccaggtagtggccagaggtgtggggaccctcaggggacctcttggcttcaggtgagacacccccaactctccctttctccaggccatgtgcatgatcataaacggtttaatttcttcattgcgcttccatgtagattgcaaggctaacaggacttggtatgaactaacccgcatgtccatccactgagctgccagcaccggtaacaccgtgttgagtgagaagtgagttgggcgatgctgggttgcacgcctgacttcgccttttctcccctgacccaaaggtggcgacctgcacatgacccagtttttccgaggcaatctggctggcttaactctccgttccgggaaactcgcggataagaaggtgatcgactgtctgtatacctgcaaggaggggctggacctgcaggtcctcgaagacagtggcagaggcgtgcaggtaacaccgagcgctcgactgcacaccactcatgggccccttagactacagccccggaggctggtgggatgagggagtgagtaatctgtgattgatacgtttactgttgggtaaaagagttgtgttcactggacttaaacgagcttttctttttcaagtcagcaattcaaatcgaacccaggccagtcccctttgtggaggcatctgtggtttcagctcctgcggttactggcttattcttctcctctctgtggctggtgtgatttcagatccaagcacaccccagccagttggtattgaccttggagggagaagacctcggggaattggataaggccatgcagcacatctcgtacctgaactcccggcagttccccacgcccggaattcgcagactcaaaatcaccagcacaatcaagtacgtcctgatttttaacagccggcctgttttgcccaatgacacttgtatatttaggtttttaagacagcctaaccccttctgtaaggaaaggtgagccatcgtgtgtaaccagaaagtgtggggcagagagctgagtgatatttacgcatcttgtttgcaagtgtgttcctggagtggccccggcaggtgttagtgggggcctctgtatcccacctccatgtgcctttgcacaggtgggctccaagatcggctcccaaagccctgacccttccccatttcttgctggcaggtgttttaacgaggccacctgcatttcggtccccccggtagatggctacgtgatggttttacagcccgaggagcccaagatcagcctgagtggcgtccaccattttgcccgagcagcttctgaatttgaaagctcagaaggggtgttccttttccctgagcttcgcatcatcagcaccatcacgagagaagtggagcctgaaggggacggggctgaggaccccacaggtaatgtgctctgtggggcgcgggctccctcgcctcggccggaaaccccattgtccccatgtacttggcggggctctttgtctctgtgggatttggggaggttttaatctttcgttggtgttctctcgggtgtgcttctggaatctgacccgtgagctggagctcatggtgatctctggaatcccatctggaggggtcttacatcttttcctggttgctgccaggctttgagatgtggcttgaggttgaggggttgagggcacttacgggagacactgcttgcacctgccaggctggccagcccatggaggcacaatgtccccacaattcttgctcaggacacatgaaactccccccctttttttttttttttgagatggagtctcactctgtcgcccaggctggagtgcaatggtgtcatcttggctaactgcagcatccacctcctgagttcaagcgattctcctgcctcagcctcccgaatagctgggattacagggacctgccacaacgcccggttaatttttgtatttttagtagagacgggctttcaccctgttggccaggctggtctcaaactcctgacctcaggtgatccacccgtcttggcctcccaaagtgctgggattacaggcgtgagccactgcgcccagccgtttcttgaaagcaactctcgcttgcttctgtcgttggtccttacgagagccatgtaggtttggggtgagccggcagggcatccagtgtgccccgccacgctgggccccactgcccctacttaatatttctggttgggcctcttttgcagttcaagaatcactggtgtccgaggagatcgtgcacgacctggatacctgtgaggtcacggtggagggagaggagctgaaccacgagcaggagagcctggaggtggacatggcccgcctgcagcagaagggcattgaagtgagcagctctgaactgggcatgaccttcacaggt

SEQ ID NO: 4258 - DNA, 6000 bp, Homo sapiens
aagcagatttttttttttttttttgagacaaggtctcactctgtcatccaagctagagtgcagtggtacaatcacagctcactgcagcctccacctcctggattcaagcaatccccctgcctcagcctcctgagtaattgggactataggtatgcaccactgcacctggctaatttttctatatttttagagatggggttttactgtgttgtccttgaactcactaagttgctggtcttgagctactggactcaagtgatcctcctgcctcggcttctcaaagtgctgggatgacaggcatgagccaccgtgcccagcctggaaagtagattttgccttcctgagactgcttcatttatttcttaggacttgacagactgaagtttgctagcttgctagtggtagaggagagacgttgacaaactgaaaacagtccacagaccaaatctggaccactgcctttttttatgcagtttgcaagtctgagtggttttcagttttaaatggttggaaaataatcaaaacaagaatgatatttcatgacgtgtgaaagttgcatgaaattcaaatgcctgtgttcataaataaggatttattggaacacgcccacaactcattcatttccagttggtcactgctttcatgctagaacagcagaggtgagttgttttgagagattcatgtggcccctttatggaaaaggtccgctgactcttggtttagggtaaggatttagcattcccatggccccagctctgtctcccaccatctctctctgtcacccccatgactctctgtccctgcctcccaggctcccccctcagccccagccccaccccagagagtgtgttccttgaggacatgaagccaggagaaggacacaaatgaccactagcatctccctgccaggccccaccccaggccctgcagagatgtcatttcagtagtgacaacattcccactttagggatgaggaaactgaggctcagagaggcaaatcatctgcccggatttacacagataataagcggcagagcttggatcttaccccagccatgctaatctcaaacccatactccacgccctggtttagaatgacatgaccggcccagaggcaggacacaggtgaggaccggtgggtgccctctggcctcggcccaaactttctcaggtgacacggtgacaccctggggcctgttcccttgctaagcacatccctcccactcctccgtgttcctgccatgtttcagccttggctcccgcctgcatttccacccgaccctggcagccagaataaacacggctgccccagcacccctcctatggagccaaaagaacttacttccctgctgcctcggcctgggattccaaacaataatgaaaaaaaacctaagcccatgcccagaagagacagacgcagttccatggaaaatactcacctgtggcggggcatgggggaggcattccttggactgaggggagccgtctaacctgcttttatatgtccagttttacccaccaggcctcaccgaggaggaaaggggccctcttggcaaatgttctgtattaggaaggggacgtgttttatgagggttttaaatcgtctctggcctttgcagatttgctttcctggaccatggtccccatgggtcctctccctacagggattttccactcacctgatgcctgttttctcctctctgttgcctctggccaggcaaactgcccagtcggccatcgcatacaactcatgttttcccaggagcctgtctccacgaagagaccctccagggcagctgatgttaaacttcgtggaacacttttttccactagaccaggcagttttccaaatctccctggctaaacactgccagcttgttctgctcaggggaaagtagccaattgtcccgcaaagccatgtacgtgtgtgagtccacgtgtgtctgtgtgcacatgcatttgtgtgtgtcaatcacaccaagtcattggtattaaaatcctgctcaagagctggaggaagggtcaggaaggaggcagaacagctcagcagtgagcacagacctgctgggatttggctccggtgactgcagtctcttgggaggggaggggagaggaaggaaggggccccccatccccaccccaaagtccctgagctgggcactcatggcagcagagctccaggtgtcactgttcacccatcatgagctggtggcccgtggccatccctggcctgagtaccaatggcctcctcactgttctcccgacaaccactcagtacccagagctatcctggacccagcagcctgagcagactccgaaaacagagattccatcacatctgcctttgctccacagccccctcccaaaggccctcatcgcactgcagatgaaacccaaagtcctcctcctgcctgcgggacccagcctcagcgcttttcaaacctcagtgagcaaaggagcacctggggatctcgttcagtaaaaagcagagcctgattcaggagggccagggtggggcctgggattctgcatttctttttgtttttttgagacagagtcttgctctgtggcccaggctggagtacagtggcacaatctcagctcactgcaacctccacctaccgggttcaagcgattctcctgcctcagcctcccaaatagctgagattacaggtgcatcccactgtaccaggctcatttttgtattttttatagaaactgggtttccccatgttgcccaggctggtctcaaactcctggcctcaggtgatccgcctacctcggcctcccaaagtgctggaattacaggcatgagccaccgcacccggcctggattctgcatttctaacaggcttctggtccaggaaccacagggtgagtgtggatcctcgctgcaccgggggagctgagccacggaaaaagttagttctcccaactgcagctcgcctcttcccttcaagcccagaaagcctcctttcacattttcagggacagacctgggatgtgaaatttcaaactctgccctgagttaaattccaggagagggtacaagagcaaaggataaaggctgggggagggagggaaaggcagagaggacgtgtccctgctgttctcactgaagccaggccacacgaccctcagggccagcctgctgaactgtgcacacacacatcacccccacacaaggtctccttggccccatcttcccagggacctcgggggagggcaacagaggaggtgacaagtttctctctgagcagttgatgctgggagaaacgtgtggcttgcagagctgccagtcccacaaaaaccacatcctgaaagatggaccaagtagaaaaaaaggccaccatccacctcaggccagcttctggaactgtcagttcctttggggaatgtctgacatgttctttttccctctgatttcatcccaaaccttttgagaagcaggttgcgtggcattgcacaagttacttagatttactgagcctgtttcctcctgcaataaatgggcacgagcctccctgggctgttaaggaaattcaatcagaaactgtgtaaaggccctgaggcactaaaggccaatttgggttcccgacctccttcccaccgtctgccctccatcccaggcacacaaccagagagatgtaagagggacctaacggttacccagccggtctggcatctgaccggggtgaaaatgcatctctgtatatgagttgcttcatatcttttggctttagtttccccagccataaaagtgtgtttggggtgggggaggaggactatgaccttcacaagcccttttagacttggggtgttaaccttacatgagagaaatgcctggaagaaaagcatggctagttagcaggaacgccgctgggttggaggccgggcagctcggaggcgcagtatcctatctgggccaccaggcggctccgaggacaacagatgagcaaagcccgcttttgcagcctggttctgtcttcagatctttccaggcttcttcgcaggcctggcggacaccagccgctgctgggtgggaaaggcctgtcactcccaggctggaatcgctttcccatttttacagacctcgaagatgagaggaggccgtcaccacaatggattccggccctggggtctgatggagacattggtccgcccttcggtcagactcttgggggcgttaggggggtgggggggtctctgctctgcaacccttagctgaaccccatcctccacttctctcctcccgtctggtcagagtgggaagaggtttggattgggatcccccctcctgcacttcctggctgggtaacctggacgatgggataacagtcccccgattgcaaggtcaggggaaggactgtgtcagaatataggccctcagtgcaggacagttgctcatcctaagcctctcctgccttttgctcttccagtggcttttcacccagaaggaagatcctcccctgcagaacctctccccagaactaggtctttgcaggtgacgaggtaatcccagcctcccctccccgcagatcagcgtttttcgaagtgactttctcaccaggcggagcattgaaagtaccgatcccagcgcacccagccctgctgaatcagaatctctgggggtgaggcccaggaatcgccgtctgaacaagtcgcgggctggaaacggctgccccagattacagggcagctccctgcttcgctctcgctcctccggccccgggaacgtgcaggggggcgggaggcaagtcccatcagcactttgaactggggctgctttttagtgactcacctcccagacttcctgcaacagacaactctaaatagctcggtcccaccctccagcaggggagacattccggtcgggaagggcaggaggttagaaggtgggtgccccgccagggcagtccagggagacccaaggacaggagacgctggctgcacagcacaggggcgcacgaataggacgttttgtttacaggcttttgttattaaggaaattggtgtcagtcaaggtaattctagctcagatgagcaataaatatgctcccagctaatcttgtggggattttattggcactcggagcagaggttcctttaccttgactactccctcccctcaaagcaaagtcctgctccccagcggcttccccctaagcatcgtgaggcacttgggtcaggcttttaaaagtccactctacgtgaacacagaagaggtccgagcaaaggtgaggagtggcttcctgatcctacctggaggccgaggatgaccaaatgacctgaaataaaaccctgggtgacctggttggatcaaggcatacgcaagctcccccgggcctgctccacactcggggtgatcacctggcccgcgggcggcccgggcaaggaggaacgtctcgagaaggcagccggctcgccggagtcggttccagcgtgttcgagttacagctgcgagccctcagggacaccggcggcaagtcccggcttgcagagaggggagccagtcccgggagagcgcgagtcccggcgagcccgagtgcgcgccttatgcgcgctccccgcgacggcgcagggggaggggaggccgcagcagccactcagaggaacggtagtgaagcctcccaacaactttaactgtcaatcagacttaatggggtattgaaaaaatgggggaaaaaggggccgccctctccgcgacgcggctgcccggggagcgaatgaatagggccgcgcagaccaaggcgtccgatccacgcgcgctccacacccggaccctctccaagttggaaaggacaaaaagaaggcaataaatgctaaaaagggagagaaggggagctggatcgagcggcaactcccagcctctgctggaacagagagggagggagggagccggagcgagcgagcgcgcgcgagggcgagcgctgcacgtaaagaaactgacacccggaccccccacttctcctgcacgttgctggcaatcagatcgcgttt

SEQ ID NO: 4259 - DNA, 6000 bp, Homo sapiens
gcaatgacaggccaggcgtggtggctcacgcctgtaatcccagcactttgggagcctgaggcaggcggattacttgaggtcaggagttcaagaccagtctggccaacatggggaaaccccgtctctactaaaaatacaaaaattagctgagtgtggtggcatgtgcctgtagtctcagctacttcaggaactgaggcaggagaattgcttgaacctgggaggtggagggtgcagtgagctgagatctctccactgcactccagcctgggagacgggcaggggggaaggggggaacggggggggaagactccatctcaaaaaaaagagcaatgccatcatgaaggtgctctcgcccccccacacagcctgtgggtgcctgttctgggctggtctgagcccacagaagccctggggagactgggctgtggctggggataaacagatgtactgcaggagagagtgccctgggcttgatccctgcagggaggggctctggaggtttccacagctgtgacttcctccctcaagttccactccccttttcctctttgccaaggttgactgagagagtgtcattgtgaagtgacagtcatacgattgccatgaggaagaacttcccagggggaccgctgtttacatactggggactctgccctctttttgaagaaccttttcttcataaagagtcttgaggccgggtgtggtggctcacacctgtaatcccagcactttgggaggctgaggtaggaggatcagcatgaggccgggagttcaagatcagcctgggcaacaaaatgagaccctgtccctactaaaaaaaaattagcctggtgcagtggcacctgcctgtagtgccagctacttgggaggcagaggcaagagtacctcctttagcctaggaggtcaaggctccagtgagctaggatcatgccactgtgctccagcctgggtgacagagtgagaccctgtctcttttaaaaaaaaaaaaaaaaaaaaaaaggaagaggctcaagcccctccccccaactcccagcacctttgccttcaagctctgttgtgtccaagagacagacattcattcattcagtcagtcggtcaatcagtgtttcctgacccctgagcacatggcaggtactgtgagcagtaagggcagtgacacccatctgagcctgatgctgaggggaatgtcaggagtagatgtgctgggcagagaggacctgggagtaaggccagccctgttccagctttgagacaagtctgagggcaactgccccagaggctcagtgctctcgtttgtcaaactgggtaagagagcccaccttgtgggttggtgcgggaggaaatcaaatcagcaccgcagggatggctcctttcccatcatccctgagcccgctgggctgttggcctgagggtttttttttttttttttgagtcttgctctgtcaccctggctggagtgcagtggcgtgatctcagctcactgcaagctccaccttctgggttcacaccattctcccgcctcagcctcccaagtagctgggactacaggcgcctgccaccacgcccggctaatttggtttttatatttttagtagagacagggtttcaccgtgttagccaggatggtctcagctagtctccacctcctgacctcgtgatccgccccccttgggctcccaaagggctgggattacaggcgtgagccactgcgcacggccggcctgagggttttaaggtacaaggagcaactgttgaatgggcctagggagccgtgggacagccagggcttcagacagggtgatgtgaaaggagaagagagcctgggaaatggataagcagaagccacgcccccctgacctgggagccgggtcctgcccacctgtccacgcaacccccccaggaacttcaaatgcttctacctccctgtgtgctggatgcttcgggactatcatcctagagatgagaaatggaagcccagagaggcaaaggcacttgctgtatgaaacacagcatcaaaaaagaaattcttaggaacaaatgatgggcaaaaagacaaaaccctgtctctacaaaaaaaattagctgggcatggtggcctgtgcctgtagtcccagctatttggaggctgaggtgggagaattgcttgagcctgggaggtcaaggctgcagtgagctatgatcgcaacactgcactccagcctgggtgacagagagagactgtctcaaaaaaagacttatacacgaaaactgtaagctgggcatggtggctcacgcctgtaatcccagcactttgggaagccgaggctacaagagtgataagtaaataaatgaatgaatgaatgaatgaaaggacatcacaaccgaggttacctggcagggttgatacgttagccatgtaccctgtgcacagtgagccctctaggagtgttgaagccagagtgcttggggatggggctgctcagaggctgggggtgctgtgcccacagcagctgcctggggcactctggactctttgggtagaaattttagaagggctcgccgggcgctgtggctcacgcctgtaatcccagcactttgggaggccgaggcgggcggatcacgaggtcgggagatcgagaccatcctggctaacacggtgaaaccccatctctactaaaaatacaaaaaattagccgggcgtggtggcgggcgcctgtagtcccagctacttgggaggctgaggcaggagaatggtgtgaacccggaaggcagagcttgcagtgagccgagatcgcgccactgcactccagcctgggtgacagagcgagactcgctctcaaaaaaaaaaaaaaaaaaaggaaaaattttagaagggctcagattgggggatgaaggagggagcccagaaaatcagcagcctaccccgcacccgcccagcttttccagcttagtgagctttttcagaggctcttgtgaaaccacagatgcctagcaccatccctaccccggcctgaggagttgatccagccagtctggggagggccctggcatctgcatatgtaaaaggtgctccaggtggtctgggaccgtagatgaaccctgacagaggctgtccaagggtggggctggtgagctctacccgctctggagccccagaacatccactggctgcctgccctgctaaggccacagctctacagcacaggaggaaggagtgaaaagaatgtctgtggccgggcgcagtggctcagcctgtcagcccagcactcagggaggcaaggcgggtggatcacctgaggtcggcagtttgagaccaccctgaccagcatggtgaaaccccgtctctactgaaaatacaaaacttagctgggcgcctgtaatcccagctactcgggaggctgaggcaggataatcgcttgaacctgggaggcagaggttgtagtgagccgagatcatgccattgtattccagactgggcgacagagcaagacttcatctcaaaaaaaaaagaatatctgcaatagaaccacctgataccattccccaagtctcagtttacccatctgtaaagataggcctgcagggctgaccgtttattagtccagacttgactttgcatctcctcactgccagacctgggctgggcacgggcatggaatgaagataagcatccctgacccctgccctcagggtggggactggatgaggatagaaaagtgagacccagagctccaaggaagctaatggctggatgcacgagcaccatgggggcttggggcactgtccaggccccattctccaattctgggccatacccagcagaaagaccgacacacgcaaggaaacaagacactactggccaagcacggtggctcatgcctgtaatcccagcactttgggaggccaaagtgggcagatcacttgaggtcaggagttcgagaccagcctggccaacatggtgaaaccccatctctactaaaaatacaaaaattagctgggcatggtggtgcatgcctataatcccagctactcgggaggctgaggcaggagaatcgcttgaacctgggaggcaaaggttgcagtgagctgagatcaagtgactgcactccagcctgggtgacagagtgacactccgtctcaaaaaaaaaaaaaagatacggtaagtaagaaccgacggaaagaagagccagataaaggacacaggaagacatgagctttgggctctgtcagaccaggtgcttactgttttgtgttttgttttgtttagttttttgagatggagtctcactctgttgctcaggcaggggtgcagtggtgtgatcttgcctcactgcaacctctacctcccaggttcaagtgattcccctgcctcagcctcctgagtagctgagattacaggcacgcgctgccacgcccggctaattttttttatttttagtagagatgggtttcaccatgttagccaggttgatctcgaacttctaacctcaggtgatccacccgcctcggcctcccaaagtgctgggattacaggcgtgagccaccgcgcccaggctgatgtttattgtttttaaggaagcaagaggagaaggtgcctccccaaatgacctttctcttttctgtccacagacagcagccctctcgtgggcagcacgcccaccggttatgggaccctgacgatagggacatcaatagatcccctcagctcctcagtttcatccgtggtaagtgggcagagtggggtggggaaaagctgcagggggtgaatgcccaggcccacccagacaccccaacttcctactccagccccgttcccaccccgacctgggccctctctcgctgcgttcgcagaggctcagcggctactgtggcagtccatggagggtcatcggctatcacgtcgtggtctggatgatggctgggatccctttgctgctcttccgttggaagcccctgtggggggtgcggctgcggctccggccctgcaacctggcccacgccgaaacactcgttatcgaaataagagacaaagaggtgagagtcaggctgagcctggggctagagaagcgcagtgagggtcagggtcgggggtggaggatgcttgggtgccaacccggccactgactttccatgggacattaggcaggtcccgctcttctctggacctcagctttcccatctgagcattgggcagaagggacgggtcgggtggtttctggagggctctccatagccttgatttctgccttctccagcaggggccgcctggctgtaggacagggcctgggaggggaggggactcttctgagactgagtccatacctctgtgttccaggatagttcctggcagctcttcactgtccaggtgcagactgaggccatcggcgagggcaggtgaggcagccccattgccccttcccagaagcccctgctaccctggcctccccaacttccccaaccctcggcccccccataaaggctgactctggcgcctcccatcctagggagggaagatggctctgtgagcacagggaggtgccagggcagctcccagagctcgagagtaaccctcacctgcttccccagcctggagccgtccccacagtcccaggcagaggatggccggagccaggcggcagttggggcggtaccagagggtgcctggaaggatacggcccagctccacaagagcgaggaggcggtgagtgtcggacaggtgggttctgaaaaagtccttgcccctctctcggcctcggtttcatgatctgtgcaatgggagagtcagacttcatgttctcccaccaccttttagttctgttgtcccaaacatccaggatgctgtctgagcacgtttacactttcaggcctctccccacctctctgtctggtgacaccagtccctgccccctacccccatccctcggctcccagcataagcacactgcttctggggccggggccagcttccaacccatcctctcctctctcccacccagaagcgggtgctgcggtattacctct

SEQ ID NO: 4260 - DNA, 6000 bp, Homo sapiens
gtgctgggaatcctctgaccccacagactgcctggctcacgcttacatcttttcagatgccacttgcaggtcttccttaaacaaccttggcacaagagctcccctcccacattgtccactttgtttttcttctcggctcacaagaattactcatttaatgaataaatggattactgagcactgtcttcattaccttaggttgaatatcagagtacactttggggagactctggagcctcaaatagccccacccagtgctagttttagatgcttatggcagtagtcacatgatccaattaattgaccagaaaaggataggatctcacagttacagatgttggaaattaatgagcccttttggtgatcactttttaaaaagcagtgtactgggtagctctgttgtggatgtcatggatagaatctgtaggattaatagggaaaaatggattaatgccagaccagggagtactattgtcaagtgatggcatcactggagatgcagaagtgctcttcctcagaccatttagacagggtggaattgacaggctctggaaactggctccagtgatcagcatcactagcgtgaaaggtgcaggtgatgagatgaaatatgggcagtacggcatttccaaatgcatatttcctatgtgagttgaaatgtgtacagcttacttgaccagtgcaattagtggatgtttgactgtttcctccaaacctccagaagtttctaattctgagccataattttgagtcttcacgctgcgaggatggggccttgcccgttctgggatgtggtgtgggaagcctctccctcattgtggcccccagagggtgctgctctgtgagtgatcgtggctgctctgcccttcatgtcccctccctgccagtgtcagaggagcagggagaggagacctctgggtcactgtgtctggtgcctgctttcagattttggaggcaacatcaacgtggagaccatcagtgcctttattgacggcggaggcagtgtgctggtagctgccagctccgacattggtgagtccgacctgggaggttctggtgctttccacttctccagggagttggagagcattacaaacagaagctgccaaattagcattcactgggtgggccttagctggggagtcagtgagggaaccgttttctcagttcagaatctgactcctggaggcagaataccacactgctgtccaggggtccatctggggctgagcccagctggatgaagctgcagggcactggggctgacagagagggagtcacaaggaagccaaggacacttggcccaaggcccccctgtaagggctcagctaggtgtctcttcggtctgtgcaggtgaccctcttcgagagctgggcagtgagtgcgggattgagtttgacgaggagaaaacggctgtcattgaccatcacaactatgacatctcagaccttggccaggtaatcaggcctgtcaccttccaggtttcaggggcatatggcaaagctctgcttagccaaaagccaagagggtgtgaggaggttctccctggcttggggaaccttttcctgaccacccacctttccatctactctttgcagcatacgctcatcgtggctgacactgagaacctgctgaaggccccaaccatcgttgggaaatcatctctaaatcccatcctctttcgaggtgttgggtgagtgagtgagcagggagaggacagcagaaacctgggggaagaaggggtcacttaatttttttgggaaatcaaggcaaaattgtaattctttaagggtacgtagatgggattaatttgttatatcaaggccgagtatagtggctcaacctgtaatcccagcgctttgggaaggcctaggcaggaggatcgcttgaggccaggagtttgagagcagcctgggcaacacagaactcctctctttaaaaaaaaaaaaaaaaaaaaaaaacaaaaaaaagttggccgagcgcagtggctcacacctgtaatcccagcactttgggaggctgaggtgggcagatcacccgaggtcaggcgtttgagaccagcctggccaacatggtgaaaccccgtctctgctaaaaatacaaaaattagacaggtatggtggtgtgtgcctgtagtcccagctacttgggaggctgatgcaagagaattgcttgaacccaggaggcggaggttgcagtgagccaaggttgtgccactgcactccagcccaggtggcagagcgaggtctgtctgaaaaacaaaaacaaaaacaagtcagactccattgttatatcaagacaagagctaagtggttggcaattaagaaaaaaggattcattcctgggaagaactggctctcggggatcccatgtccttgggctcagttcctggggccagtgctgggctgctctcgtcctgctgcaggatggtggccgatcctgataaccctttggtgctggacatcctgacgggctcttccacctcttactccttcttcccggacaagcctatcacccaggtaagggcttcacaaccttgaggcttcgaaataaaaatgaagcagaacagcacatttggctgaggcgaaggaaatgactagttggtggggtggggcatgggcagaagcggtgtggtctcaggctcccccttcaggtagggccagggtcgttttggtctggcctgctgtcctcttgttcgggaggcgtggcagcttttcccttacttggaactgcttgggtcacagcctcgttttgttcccagtatccacatgcggtggggaagaacaccctcctcattgctgggctccaggccaggaacaatgcccgcgtcatcttcagcggctccctcgacttcttcagcgactccttcttcaactcagcagtgcagaaggcggcgcccggctcccagaggtagctgccaggaggcttaggggccggggatccgggtggtgcagtgtgtgtatatggggaggactcagaaggggaagaaggaggcttttagctaaaagtgtcagaggctgagtgtttcaggtgctgtcagattatttcagggctttattgctatattgctggtattggcacttccaattttttaaggtagtagtgacttatctagagatccctaacctccaccgttccttttagaaatttgtgtatttgttgtgcagatgacaagcaaccagccatatcttttcgtttgtttcctgcgttccctttaaccatgagtccctaggtgcccaaggcctacaggcagaacttcgctagggtactgtcatggtggacatgagtggtcctgcccatcaggcaccactggaaaggtggctctggtgcccaagctgctcctgtttccctcctgcaggtattcccagacaggcaactatgaactagctgtggccctctcccgctgggtgttcaaggaggagggtgtcctccgtgtggggcctgtgtcccatcatcgggtgggcgagacagccccacccaatgcctacactgtcactgacctagtggtaagagatgtttggggtgggagggcccaaagggtttgccaagctgactgagctcagctcagaagcacttattgaacacttctttgctggcctaaagggcataaataaagatgaataagttaatccctacacctaagcatgccaggtgagatgcagagcctggcgtgaaaactgatgtcctaataggagcacttcttttgaagaggtgtgtgtatttgctatggggggcagcagtgggaggggcttcactgattaactctgcccaggaagttggacttaataagagaaataggtcattaggttgaatttgttaggcaagagaaagcgaatatggaagcatgaatacttgaaagtgcctggcacatgtcggggcaggagggtggtttgggtccagactttgatgggccatgaatactgtgtgaaggaatctaggccttcagagaagaggcagagatgctgtgttgggggattaaccttgctgaggagagagactggttactgatcagggccgggtggcaggggcatctgcaggtcttctgaactcctgggcattcctgccatgttcgtcgggtgggaattaagtgcagctctgcctgcaggtggtggaaggcctccagtcatggccagccctggctaacctggccttttatctcaggagtatagcatcgtgatccagcagctctcaaatggcaaatgggtcccctttgatggcgatgacattcagctggagtttgtccgcattgatccttttgtgaggaccttcctgaagaagaaaggtgagtgtagttcctgcacgaggatgctgccagaaacggccccaggcctcacttgctctcgaggcccaaccaggaaaagctctgggaaacccctcccggttattcttgttggttcttccgcaggtggcaaatacagtgttcagttcaagttgcccgacgtgtatggtgtattccagtttaaagtggattacaaccggctaggctacacacacctgtactcttccactcaggtaagcacaggtgacagcttctgttttcagctagcatgtgccctgcctgggctctgcagtggccaggtcctgccacctctgtcctcctgcaggtatccgtgcggccactccagcacacgcagtatgagcgcttcatcccctcggcctacccctactacgccagcgccttctccatgatgctggggctcttcatcttcagcatcgtcttcttgcacatgaaggagaaggagaagtccgactgaggggctagagccctctccgcacagcgtggagacggggcaaggaggggggttattaggattggtggttttgttttgctttgtttaaagccgtgggaaaatggcacaactttacctctgtgggagatgcaacactgagagccaaggggtgggagttgggataatttttatataaaagaagtttttccactttgaattgctaaaagtggcatttttcctatgtgcagtcactcctctcatttctaaaatagggacgtggccaggcacggtggctcatgcctgtaatcccagcactttgggaggccgaggcaggcggctcacgaggtcaggagatcgagactatcctggctaacacggtaaaaccctgtctctactaaaagtacaaaaaattagctgggcgtggtggtgggcacctgtagtcccagctactcgggaggctgaggcaggagaaaggcatgaatccaagaggcagagcttgcagtgagctgagatcacgccattgcactccagcctgggcaacagtgttaagactctgtctcaaatataaataaataaataaataaataaataaataaataaaaataaagcgagatgttgccctcaaacttcacctggccccggtcctggtttgctaatggctgtgggtgggggttgctgtgggtgatgactgactggatacaaaatcctaagtggcttcatgaaattttgcctaggactggactgtctttcttttaactgtgaaatgatggttctccctaacgtctcctcaaaggatacaagaaagttgttgttgctagtagaccgaggggtgggaatcactgaaatggaaaatctagatgacagtgctggggaagagaaaactagaacagctcagttgaagacaacctttactgcatgttgacgctgatttaggcaatagcttcctaaaaatcatgtataaagttagttagttagacatgaaatctcttccccaatgttgatacctgcccacaaaatattctcaccttcagagtataagaatcattcttaaagccaaatattcagttcaaggcacatacgtcatctgcagttgtaaatttgcatttaatatttcacaattcctgtaagagaggctagtcaggagggaaaccctcaagtttaaatccccacacttacttacttactgctcatccgtcactttcgctaagtgagattaataattcagtagctggtccagaacgcacagcttgggaacgcagaggcccaggcc

SEQ ID NO: 4261 - DNA, 6000 bp, Homo sapiens
tatctatattaactcatttaagtgtcaccacagtcctatgagggaggtactattgttatcatcatcctcctcatttgacagatgagtactgaggcacagagaggctgagtcacttgctcagggtcacagagttgggaagttcagactggggatctgaaatgaggtttagatccagagattttacccactacattatagcatctgtgaaatataagtgtttagctaccagataatatgagtgtgttttagatgacatgtaaagattgaacagatcccagccaattaccagcaccaaaagtagtaactgatggggacttcggccacaaagggcagcgtctctaaggagctgaggcttagagacaatgtgaaagtagctgtggagggtgtggctcagtcccaggcctcagaatttcacatgtggggcttcccttttccacctcatcaccccaagatgacttaacaatcccccgcctttggccaaccaaacgcaagagccatatgagtgactaatgtcgtctgggcaaagggggtcatgcccaggtgctaccaggccaggaggcttttgtcgccagaaacctgtgcgtgtttatatttctcgtttctgctcaccacaggcctttgatttacaagggtggagtttccagagctgggcactgttgcaccttcatctggctgtcatcacttcctctgtgcagctggggcaccggggactgaggacggggcagtccacagggagctgtggttccaccccttcactcttggtttctgccaggccctcctcttgaacactagacccagattcaacccagatttctcctccacggctgcacagtgccaggaagggaactgagaagaccaaagtggaggttctttaccttccccaacacactcggggccaggcgtggcacccacaactgcaaatgagacaattagggagaataagtgctggctgccctgtcagcccagagcctcagtctgcccagggcacccagactctgtgaggttcccacctgaagaagcagttccatcttccacaaggagcacaggaccaagagtccaggacccaggttcgaggcccagctctaccactttctcgccgcggggctcgggttctctggaggcagcgtaatggagtcagtgggtttggcaaggggaagattcgcattatggctccctcagtctccaggcaggtgactcagggctggggggaggtcctttctcctctctgacccttggtcatctcatttgtaaagcggaggtgatgattctcatctcagggacgaggcactgtggggttaggagagaatttgtcaagtggcatggttggtttttggtctgtctaggcccctccccctctctgtaagctggaagcggtacttgtgaggctgaggctctaggtgggtgtggggagccattggggtagtgaatggaaggccctgggcgaagggccccaggcagctgttgaaatgtcactcacccactgtggacttcccaccaagcagagcccgccaagcctttcccgtctgaggtgggttcagtttcactaccgggctgaggcaggcatctcaggaaggggccctcggcttttgtgtgctgaaaaataaccaggctccatctctgctgatttctgcttgggagttccgtgagcttcctgcatcatctgtccacagacaggctgccgcagggtggacatcagagtccctggggtggcttccggcctccctcccttgcctcccgcctttgctcaaacatctgtagaggctccagccccagactaagcccttaaggagacagggtcccgtgagacccagcctctgccatcagggttctcctgtctaaaatgctgtgtgcctcagtaaaaggcagcatggggtagggtggctgtgtggggacacagagccagggaccaaatgctgtctggggtccctggagggtggtcaggagagcttgccagaagggggaaatctctgaaatgagacagaaggaggaggagccatcgcttaaccacacctgggcgagttaacttccccaagcctcagtttcattctctgtaaaaggaaccagtgatacctgcttctgagggaagggtgagaagcttaaaagagatggtataaaagaactgacaaatcccgtacaccagccgggtgaatcccttacaccacccacatgccccggggagatgttctgtgaactgaacttctttttcaaaagtcttttcctctggcaatcgacacctggtaacgtagtgtaaccaagtgtcctgttctagaaaaagcccagctgcaacccagcagtaagtgaagcagcctcagagtcccctctctctctgggatgggtaatggaaactcctccacccagtgggagtgaggcagaagtctccagaattcagagctttcccatgcaccctgcctccccagggcctgtgacctttagatgtgttccctgtttctgtaggcattatgaagttagatgcaggagagttcttgagaacttgaaggcacttcccctctacttgtcccccctttgattttaacaaccgtttgttgagcacctactctgtgccgggtgatggagagtctctgttggacaggccagacaaggtcccagccccagtaaagctgtggattctggagagggacagagacagtgatgataaagacatggaaacaaaacagtctgcaacaagtactgtaaaggaaaacaaacaggatgctgtaacagagaatttgggggactgcttagggttcctgggacatttgaggagctggtaggctgagatctgaagttggagctgaccatgggaagagtagagaggaggaaaaaatgttccagatagagacaacagcagctacaaaggtcttgggggaagaagaaacttgtagaaactgaggagttgtgtgaggaggttggtgggggagggggcgctggcagcacaagatgagggcccagagtgggcaggggccatggggcctggtgaagggtttggatttcattccaggacagtggagggtttttaagcaagggagtggtaatatcagaatttttttttattttatttatttactcagacaagatcttgttgtgtcgtccacgctggagtgcagtggtgcaatcacagctcactgtagccgccacctcctggcttcaagcgattctcccacctaagcctcccaagtagctgggactacaggcgcataccaccacgtcctgctaattaaaaatatataatatataaatatatatatatatattttctttttgtagagatggggtccgtgttgcccaggctggcctagaattagactcaagtgatctcctgcctcagcctcccaaagtgctgggattacaggtgtgaaccactgaacccagccagatttctgtggtttgtttgtttgagatggagtctcactctgtcacccaggctagagtacagtggcacaatctcagctcactgcaacctcgacctcctgggttcaagcgattcttctgcctcagcctcctgagtagctaggattacagatgcatgccaccaggcccagctgattttttgtatttttagtagagatggggtttcatcatgttggccaggctggtcttgaactcctgacctcaagtgatctacccaacttggcctcccaaagtgttgggattacaggcgcgagcgagccatggtgcctggcctcagccagatttcattttaaaggctcatcctggctgctgagggggctgtcagagggcaggagtggaagccaggagaccatctggagccattgccctcactgtccctgtgacgtcaggcccctcacccctctaaacctgtttattcacacatatgtgtgactgtgagaatcaaatttggaatgagcagaaatgcactttgcaaagctgaaaagtacgcataaatgcagggattcccgccttgctagaagcggagagtcctttggaaatctgctgggttagacctctctggggttcttggttgggacagtgctgggcctgagtccctaactgaacacctcatatccgagagagccccctttccctgcctagggttataggagagggctcaggggctggggaggggggcacctggctgaggctccgagtcttgagggggaagatgggaaagaagggtccccttcctggcttctgactccccctggagcaatggttctcttgtgttgcagggagggcgacacctttgagcacgggggtgaccaccggaccaccctgcagccatccaaatgcacacacacagctcctttcatcccgtgtcagggagttctctgaaattttctgaaactcattcacgaactctggcttaaaggcctctgagctagaaaggggaactgaaaggggacacctacctttttaccccaccttttttgtctggtctttctagcattaaccccctagacacacctaagggctgatgccggggggaacctgtcttgattgctctgggccacatcgagggcaccttcctgatacttttgttatctgccactggggacccggttgttgaagggggacttaagattttctcgaaggaggggtcactgtgagggcctttcctgcctgctaggggcttcagtttgggggcccccactcccgacctccggggaagggaggggtccccatctcccccgggcctctcgggtcttggggtctccccgggaggccggaggttgggaaccgggcgccggcgaaccgatcaggccccgcccgcgaaggtggtgcaacgcctggcccggcccatcccatcccggccacccgggcagcgggaccaggcgtctggggcacagcatgcggggcgtgtggccgcccccggtgtccgccctgctgtcggcgctgggggtgaggcgggcgcggcctggagggcgggggcgggaggcgggcgggacccctccccgcgcgggccgctccgtgggccggtctcggtctcgggtgtccaggccggggcggggcgcggcggcggcggcgccagggtcggggccgcttccccattcgggcgcgagagccatggaggcgctgagggagtccgtgctgcatttggccttgcagatgtcgacgtacaagcgggccacgctggacgaggaggacctggtggactcgctctccgagggcgacgcataccccaacggcctgcaggtaggcgccctccgctccctcccgaggtccaggcgccccgggcccgggcatgcgcgctgccgctgccgcgccccccgcccctacctaccccgcctcttcccctcccttcccctccctcgtcccggcatccgggaggggccgcgcctccccgcagctggagctccgcgctgagaagccttccggagcccaccagtctcccctcacctgcccccgccatccctagagcctcccggccacctgcttctggggccacagcccaggtggcagagttgaaagcacccccgagacccgaactggtccagttccctttccacagaaggcacagtttgtgcatgtcccgggacttgcccaggccctttaccggcagagtctacggctgtttctgttttagcgtggaaagccctgcatccctggaacccactcccccagtccggggcaaactgggaaagttggtcaccttatccgggaggcagtaccaccctcttcctcttgccctcccaatacctgagtttcctggggccagaaacctgttctctgccccctctccctgccccttttccagcctactaaggaagtccaattcctcccctccccagggtctccgcccgtgggcatcccatctgcccactcctggggagggccccacccccgtccctgccttgtaacaggacattgagcaaggctgctttctgccctcccgtccctggggggctgcactgggacagttgtggccaagacctcagtgctggaggggtttggagccagccaggtgcgtgggaaggtgctggaaacgctgcggacaccctaggagacccagtgatctggctcttgagaagccagtgtagaaag

SEQ ID NO: 4262 - DNA, 6000 bp, Homo sapiens
cagcctgggtgacaagagtgaaactccatctcaaaaaaataaaaactaaaaataatacattttatatattagaaggtgatagtggtatggaaaaaataaagacgaggtcagtgtaaagaaaagcaaaagagctggaggttgggctaggtgcagtggctcatgcctgtaatcccagcactttgggaggctaaggcgggcagatcacgaggtcagatcaagaccagcctgactaacacggtgaaaccccgtctctactaaaaatatgaaaacttagccgggcatggtagtatgcgcctgtagtcccagctactcgggaggctgaggcaagagaaaggcttcaacctgggaggcggaggttgcagtgagccgagattgtgccactgcactccagcctaggtgacagagtgagactccgtctcaaaaaaaaaagagttggaagttgggatgagttagggtattacatggggtagtcagggtaggtgtcattgaaaaagtaagatctgggcaaagacttaaacaaggtgagagcaagccaagtaaatgttgagggaaaggtgatccaggaaaagggaacagccagtgcaaaggacctgtggctgaagagaagactgattaagaagccaatgtggctaaagctgggtcaccaagggaatcatggtagaagggaccataacactaaggactttggcttttacatagtggactagggagctatgcagggtttgggacagagaaatgacaagatcctatatttttaaaggatcaccctgactgctatgttgaaactagattagaaatgggcctgattaaaagcagggggcccagttaggaagctattgcaataaaccagataagagatgatgcctggttttttttttaagcctaaaattaatcaatgtctttacccacttcctagataaagctttaactctattcatctctttcttgtcttgcatttttgtcattcacaattttatttctactttgtttttgtttttgtttgaaacaaggtctcattctgtcacccacactggagtgtggtggcacaatcatagatcactgcacactggaccacctgggctgaagtaatcctttgacctcagcctcccaggtaaatgggaatacaggcatatgtcaccacgcctggctaaatttttatgtcttgtagagatgggtttcaccatgttgcttaggctggtcttgaactcctgggctcaagcaatcctcctgccttggactcccaaagtgccaggatttcaggcatgagccactgtgcccagtctccactttggttttgtttgtttgttttgttttgttttttgaaacagagtctcactctgtcacccaggctggagtgcagtggcatgatctcggctcactgcaacctctgcctcccaggttcaagcaattctcctgcctcagtctcctgagtagctgggactacaggtgcacaccaccacgcctggctaatttttgtgtttttagtaaagatgggcataaattactcactattatcattgttgttttataaagccatttgcttttctttactcatatttgtcaacttacttgctcactattctttcttgccgttcttttcttccctttgggttgaatttccttctaaaatgcacattctttagatgttccttcagtgaaagtctgttagtgaacaattttctttgaattttttagacctcattcttgaatgatagtttagctgggtataaaattctagactgacagttttttctttattttttggcttctattgttgctgatcagaaatctgctcttaaaattaattatggttctcttacaggtaatttggcttttcattcttactgccttatatttttctttgtctttggtattctgatatgtatgctatatgatatacatgaacatggaatgtgtttttaaaaattctacttggggctgggtgtggtggctcacgcctataatcccagcactttgggaggccgaggtgggcatatcacctgaggccaggagttcaagcccagcctggccaacatggaaaaccccttttctactaaaaatacaaaaattagctgggcatggtggtgcacacctgtagtctcagctatgtcaggaggctgaagctggagaatcacttgaacctgggaactctgtctcaaaaaaaaaaaaattctgctttgggttccctgtgatttccaaatctgaatagtcttatttttcatggatcctgaataattcttttttgttgttgaggcagggtctcattctgttgcccaggctgcagtgcaatggcatgatcatggctcactgaagccttggcctccctgggctcaagtgatcctcccacctcagcctcccaagtagctgagacaataggcatgcaccaccatccagctaatttttgtatttttttgtagagatggggttttcccatgttgcccaggctggatggataattctttactactacctctttgactattgcccaccaccagttttctctgtttatcctctctaacactcctctgagatataaacatttttactcaatccttcataactcttaacttctctttcttgttttccatcactttatctctttgttctgcattgtgagaaatttcttcagagctacattcttttttttttttttgagatggagtttcactcttatcgcccaggctgctgtgcagtggtgcgatctcagctcactgcaatctttgcatccggggttcaagcgattctcctgcctcagcctcctgagtagctggcattacaggtgtccaccatcgtgcccggctaatttttgtatttttagtagagacagggtttcatcatgttagccaggctagtcttgaactcctgacctcaggtgatccatcacttcagcctcccaaaatgttgggattacaggcgtgagccactgtgcccagccccagatctactttctttttttttctttttattttttttgagatggagtcttgctctgttgcccaggctggagtgcagtggcgccatctcggctctcggctcactgcaagctccgcctcccgggttcacgccattctcctgcctcagcctcctgagtagctgagactacaggcacctgccaccatgcccagctaattttttgtatttttagtagagacgaggtttcaccgtgttagccaggatggtctcaatctcctgacctcatgatccacccaccttgacctcccaaagtgctgggattacaggcgtgagccaccgtgcccggccaccagatctacgttctagatcaatgcttttcagttgttctgttttgctctttaactcatcccttaaggatctcttttttcaatgattttatttttgacttccagaaattctacttgaatctttttcagatctacccagaaacaatctctcattctgtactcatgtttttaattctttattgtttttatatcagactttttttttaaggtatacccaagaattatatgaagttattgaaagtggaattctactgtctgacgtttctgctgactcttgctcatgtttccttatgcattttgcattgtgaactcaaatttcacgggcctttatatgtggtattcctatacaacctgtttagaaagtgaatcgctccaaataaatgtttagtttgctttctaataatgtctaataataaaccgtacaatatctaggttcctgagggttttttcttcaatatttgtgacatatactaaaaagttacttcttattgacattcatcttttttttttttttttttttgagacagagtcttgctctgtcgcccaggctggagtgcaatggcacagtctcggctcactgcaacctctgcctcctgggttcaagcaattctcctgcctcagcatcccaagtagctgggactacaggcacgtgccatcacgcccagctaattttttgtatttttagtagagacggggtttcaccatgttaaccaggatgttctcgatctcctgacctcatgatccgccttccttagcctccccaagtgttgggattacaggcgtgaaccaccgtgcccagccaacattcaaatttaactggactcctatattttatctagtataaaatgttttggccaggcgcagtggctcatgcctgtaattccagcactttaggaggctgaggtgggtggatcacctcagatcaggagttcgagaccagctggccaacatggtgaaacccggtctctactaaaagtacaaaaattagccaggtgtggtgggtgcctgtagtcccagctacttgggaggctgaggcaggagaatctcttgtgcctgggaggcagaggttacagtgagccgagatcacaccactgcactccagcctgggcaacagagcaagactttgtctcaaaaataaataaataaataaataaataaaaattaaaataaaataaattgtttaatcttctgtactttctcttcccatcacttgatgttaagccaaattcataaatcccatccccaaatagttgttaaaacttcagtactttacttgccgaaattggcaaattaacaaaacaaaatgtaaaacaaacaaaaaaaccctcaaccttatcactctagattccatttcttcttggttttgatttcctcttggttttgaccttttgggatttcccttgcttcaaaaggaagtcttaggattagtcttttggaaaatggaaggccaaaaatctcacaagtcacttctgcttgttgcattcccacgtacctcccctgaggcagccaggacagatctggcttcctgcttggatggagaaagggcaaaatacaggcaaacaaaacagaaactgattttcccacatagaatccatccatacaggtagcagttttggctacagtcagttatcaggtgaggtcattcttgtgcttactgaaaaagattattttcttcttctcattgtactgcagcaaagccttctagacaagctcagtggaatctgaagggcccaccccatggaggaatgctgggtgacagagatagccaatggctccaaggatggcttggattccaaccctatgaaggattacatgatcctgagtggtccccagaagacagctgttgctgtgttgtgcactcttctgggcctgctaagtgccctggagaacgtggctgtgctctatctgatcctgtcctcccaccaactccgccggaagccctcatacctgttcattggcagcttggctggggctgacttcctggccagtgtggtctttgcatgcagctttgtgaatttccatgttttccatggtgtggattccaaggctgtcttcctgctgaagattggcagcgtgactatgaccttcacagcctctgtgggtagcctcctgctgaccgccattgaccgatacctctgcctgcgctatccaccttcctacaaagctctgctcacccgtggaagggcactggtgaccctgggcatcatgtgggtcctctcagcactagtctcctacctgcccctcatgggatggacttgctgtcccaggccctgctctgagcttttcccactgatccccaatgactacctgctgagctggctcctgttcatcgccttcctcttttccggaatcatctacacctatgggcatgttctctggaaggcccatcagcatgtggccagcttgtctggccaccaggacaggcaggtgccaggaatggcccgaatgaggctggatgtgaggttggccaagaccctagggctagtgttggctgtgctcctcatctgttggttcccagtgctggccctcatggcccacagcctggccactacgctcagtgaccaggtcaagaaggcctttgctttctgctccatgctgtgcctcatcaactccatggtcaaccctgtcatctatgctctacggagtggagagatccgctcctctgcccatcactgcctggctcactggaagaagtgtgtgaggggccttgggtcagaggcaaaagaagaagccccgagat

SEQ ID NO: 4263 - DNA, 6000 bp, Homo sapiens
gccaaaatgatcttgtagagaagagcataggtgtggcccatgggcagctgacacctgccagctggggatgggccggtgcgccagcctgggaagcagatctggagatagtagccacttggcttttcttggtttgcccgtcagtgggatggggctgaaggtagcacctgcttcctaaggctgctgtggcggtcgaccaaggtgacggctgtgccacgctgtgctcgtgtgtgtgtggagggtgggatcattattcccggatgtgtgggtgctgttggaattccttatgtccagagacattgatgtggcccccaaatctgttgcagaattacctccccagccaggaggatatgcctcataaccagttcatcaagatgatgatcatcttttccatcgccttcatcactgtccttatcttcaaggtgagtggatccctgccctgcggctctgggaggggtggtgaggctgtgctgggcccaggcctgcccatgccaagctgttagaaggcagggacatgtgtcctccatgcctcctctcctgcttttagctcctttctcttgctttcccatgccagctcctctgactttacttgggatcctccgagacagcccatttagggcatgtgaatccgtaaaggccacctgcgttcagatgtctaattccagctgtctggaattagatttggactggcctgcgtttgaatccaagccccactgtcactagctgcgtggttggtcttcagcaagtcacttctctctgggcctcaggggcaggagtcttgttttgcctgtgttacagttttatgtaattcaggcatcaaaatgtacctgagattatgttaatagaggtttggtgatgagaaggcaggaggggaatggtctcattcttctctggggtggtcaggcccagaggatagggtccagcttcaggtcccaggtctgagtgatggtgaagcactggagtgtgttcacagcagtacaaccagcaacgtgaagagacaagaaaacgctgccatcttaggaagtcaaaaaacccccacaaaacccaacaaagacctgagcgtttattcagcatggaaaatagaggactcaagggggacctgactgctgtttcttaatacctgaagaactcttgtggggaattttgtgggatcctagaggccacaatgggggcctgtggcctgaagccacagggatgctgatgaccacagaaggaagggcttttaaaaagtgttcttttctgattataaaagtaacataggtcatagtagaaatttaaaaactacagatgagctggatgtggtggctcacatctgtaatcccagtgctttgggaggctgaattgggaggattgcttgaggccaggagttcaaaaccaacctgggcaacatagcaagattctgtctctacaaaacataaaaaaaaaaaagttggatgtggtggcgtgtgcctgtagtcccagctactagggaggctgaagcgggaggatcgcttgagcctgggaggttgaggctgcagtgggccataatcatgccactgcactccagcctaggcgacagagtgagaatctctctctaaaacaaaaaacaaaaaccaaaaaactacagataagtagaaagaagacaagcactccaccatccacaccccacacagagagcatcactgctgacaactgggtgcatttccccccagcctttctgtggtggtgggtgggcatctgcagaccccagctcctgcttccatctgaggccctgggcagtctctgctgtcacctaatgccaacctagaaacagaaccttgccccttttagcatcttctccaaggactgacctagcacaaacgcactagtgagtgtacagtgagaacacccctgaaggcctcatgggggaagccagtgtgggctttccatggcactctctactgcaggacccctccgcagaccccagcacacagctccgtcccccagctccccttctgttttttatcctccagaatgaggggcttccctctttgaccctcattctgcctctctggccccctccaccgacttgattttccctgggccttcatgcttcattctttgtcactccgtacctccatatgtctccttgccccacctatgtgcccatcagggaatccatcaaacaagaccttccagtacaggaccctctcctcttactcagggggcatcctgggggttttctgttgtttcttgagcttgccccttgggattgtatgccccactctggaaagcttctgcccaattcttacattaacttgcatcagctgatggacatgtactaactgttcctcctttataaacatggaccaatactgcacatgctgttttgtaatctgcttcagaaaacaacatatcggaagcaattttgaagaaaacatgtcccaccatcagctctgtttcgagatgggcagggctgtctcaggaggtagtgagcttccaggcagtgtgggcagtcaagcaggagctgtgggactattgccagggaaattggagggtgggctagaagccccccaaatccccttgctatgtggtatctgtggggcaatgaaaagggcaatacctggaatattctggactggctggtgaggaacccccaaccagaatgagaggtccgagcaggagcagctggatgctggcttctggagagagtggtggctcctgcctggcatatgtcctaggcctgctggagcgtgagaaggacgctcagcaaagcacagcctgacctgggcctttttccaggtctacatgttcaagtgcgtgtggcggtgctacagattgatcaagtgcatgaactcggtggaggagaagagaaactccaagatgctccagaaggtgagtgtggctgcaggtgggtgccagccctgtcactaactccctgtgccatttgggtcaagtttccttccctctctggaccttggtttctctatttgtaagatgagggttggaacagaagaaatgtgttctctttcagttctggtagtctaagattcattcactcactcattcatttattcagtatttactgcctctcactctttgctagtctcatatcgattccaggaggcgcagagaaaactaagatgccacctctgccttagaggagtgtacagttcagacacatagatacaattacaacttggtgtgaagcacagggacaataagcacagaggaaggacctggcctcttctcaggtatcagggaagccttcctggaggaggtgacagttaactggtcttggagggtcaatggatatgagatagctgggaaagcagaaggaggctttccgggaagagaggatgaggtgtgcttagaagcagcttattggaaagtgacggtttaaattcctggtaacttactttcctcacctgtaaggtggagattgtattagctaagacacttttggttgcaagtggcagaaacccaactcaatctgacttcaggaatttactagctcacagaacttagcagccaaatgtaggtctggcttgggcctggctgagtcctgacatcaggatatgatctcgtcctctccaactcttgactctactttccttgatgttggcttcattttccggaagcccatcccttgtggtggcaaaaaggctgccaaaacccctaggcagatatcccaccctctcagaaatcccaacagaaaaagaaggtcccaggagtatgtctgattggaccaacttgggccacgtgcctatccccaaaccaaggactatagccagggggatggaattctactttgagtggccaagtccagccacctcgctggatctgagggatgggaccagttcttctgaaggtatatggactgagaatgttttcccaaggaaaatggtgcactgttttcaaaataagggggacttgatgctgaataggcaaaggcaaatatgtccactacagggctgggaactgcacctatctcatgcaggcaatgtctagcacatagcaaatatccaagacctgccagtcattatcatcatcattttgccagaggtgggggtttgggtcccatgaccccaggttggaattgcaggtcattcttgaccatactcagccctcatctctctgtctctcccaggtggtcctgccgtcctacgaggaagccctgtctttgccatcgaagaccccagaggggggcccagcaccacccccatactcagaggtgtgaccctcgccaggccccagccccagtgctgggaggggtggagctgcctcataatctgcttttttgctttggtggcccctgtggcctgggtgggccctcccgcccctccctggcaggacaatctgcttgtgtctccctcgctggcctgctcctcctgcagggcctgtgagctgctcacaactgggtcaacgctttaggctgagtcactcctcgggtctctccataattcagcccaacaatgcttggtttatttcaatcagctctgacacttgtttagacgattggccattctaaagttggtgagtttgtcaagcaactatcgacttgatcagttcagccaagcaactgacaaatcaaaaacccacttgtcagttcagtaaaataatttggtcaaacaacagtctattgcattgatttataaatagttgtcagttcacatagcaatttaatcaagtaatcattaattagttaccccctatatataaatatatgtaatcaatttcttcaaatagcttgcttacatgataatcaattagccaaccatgagtcatttagaatagtgataaatagaatacacagaatagtgatgaaattcaatttaaaaaatcacgttagcctccaaaccatttaattcaaatgaacccatcaactggatgccaactctggcgaatgtaggacctctgagtggctgtataattgttaattcaaatgaaattcatttaaacagttgacaaactgtcattcaacaattagctccaggaaataacagttatttcatcataaaacagtcccttcaaacacacaattgttctgctgaagagttgtcatcaacaatccaatgctcacctattcagttgctctgtggtcagtgtggctgcataacagtggattccatgaaaggagtcattttagtgatgagctgccagtccattcccaggccaggctgtcgctggccatccattcagtcgattcagtcataggcgaatctgttctgcccgaggcttgtggtcaagcaaaaattcagccctgaaatcaggcacatctgttcgttggactaaacccacaggttagttcagtcaaagcaggcaacccccttgtgggcactgaccctgccactggggtcatggcggttgtggcagctggggaggtttggccccaacagccctcctgtgcctgcttccctgtgtgtcggggtcctccagggagctgacccagaggtggaggccacggaggcagggtctctggggactgtcggggggtacagagggagaaggctctgcaagagctccctggcaatacccccttgtgtaattgctttgtgtgcgacagggaggaagtttcaataaagcagcaacaagcttctgtctggctgatgtgtttctggaaatacagtgtagggagggtggagaccagccttctacctccatcaccccaggactcacccacaccccctacacccacacccctccacacactcacacccacccccacacacccacaaatacacccaaacacccacactccccccacatacccacacactcacaccctccccacacccctccacacactcactcccaccgcctacacacccacacaccccccatatacccacacactcacaccccccacacccctccacacacgcccacccccacacacccatgtaaacactcacacatacctagttgctccatccagaaactcctcccatgggccatgctgagcgaggggtggtcctgacccaatgctgtctgatcatgaaccacagcccaagatgatgcaccctgatgtctccctaatcaggc

SEQ ID NO: 4264 - DNA, 6000 bp, Homo sapiens
cgggagaggcggcccccagaatttttgacttggcagagagaagttggggaacatcagcaactgaccacctttagctgggctgtgccttcctcctttctctcatcttttctgggaaaattgggtaaagagagggggttgggagacctaatcttgatggccattgcttacctgggatcctcatgcccctcacaaccacccagctccctagctctctccctctcccccaccccctcagacttcgagcaggagtcgggcattgagacagccatgcgcttcagcccagatgtagccctggcggtgtccaccacacctgcggtgctgcccaccacgaacatccagcctgtgggcacaccatttgaagagctcccctctgagcgccccaccctggagccagccaccagccccctggtggtgacagaagtcccggaagagcccagccagagagccaccaccgtctccactaccatggctaccactgctgccacaagcacaggggacccgactgtggccacagtgcctgccacagtggccaccgccacccccagcacccctgcagcacccccttttacggccaccactgctgttataaggaccactggcgtacggaggcttctgcctctcccactgaccacagtggctacggcacgggccactacccccgaggcgccctccccgcccaccacggcggctgtcttggacaccgaggccccaacacccaggctggtcagcacagctacctcccggccaagagcccttcccaggccggccaccacccaggagcctgacatccctgagaggagcaccctgcccctggggaccactgcccctggacccacagaggtggctcaggtgagggtgttgagaagggacagggaggagggcggaggagggtgggtcaggggagggatgaggaggatggggctggacaggactgaggaccaggaggctatagagatgagccagacaaagtgggggcgaggggcaggaccaagggacagagatcggatagggagggaagagggacagaaaacgagggctggggtggttggatcctaatgggatgggacattggtggggaaggaattgggtgaacgtgtgcattggtgacaaggggggccgggctgagtgtttcggttgagagaattaattcagtggtctggcagctggattagaatctttccactgccacttcctagtcacgggacctcaggccagtccctgatcatttctatacctccgcttcctcatctacggaaaggagaaaacaatagaatgtgtatcatttcattgtgagcgtgaagtctcctgacatccacagtgcttagaacagcgcctggtgatggtacagccagtgggttctcagctgctgtcgtcatcacggttgttattatcatgggtctgagggtggttaagagctggtgtatgagaaggcatcactcgccttgtggagggctgcctgggtgtgggtcagtgctcagcactttacctgtgttagccccagccctcatgcccaccccacgggcagcactgtggtcatctcattttacagacgagcaactgtgggtgcacagggaggtgaagccacttcccaaggctccgcagccagcgatgacagtcaggatttgaacccaggcagttggtgccagagccgggcagtctcgcagggccagggctgcatgtgtgtgcatttgggatattctggatggggcaggggaattgatgggaagaggatgaagatgtcaggagtgccagggatggatgaatcccaaggacatgagagaggtggtctggtcccagctgggtgcactaagtaagatggagaggtgggaacatggactgggtgccagagccctctgcagctggcctcactgtggaaggcccttgggccgtggcgctgccttggggtcagtgtcagtccctctgactccccagccagctctagcaggatgcaggcccttcccttgcctcctcaagcagctggggcagcctggtgttttcacacagacttggccaagcaggaaggggaaacagtgatggggcacggagcccaggagaaggtgcacagggcccaggttgctggaggagccattgtgcacgctgtgtacgctggggcactgctgcagcctcttttcagcctggacatcaggcctgcctttccatgcccacctttgaagtagcgacatccctgctctgatggctcccacagcccccactttggtctcatcattcccagctctgatcctgcctccgagtggtgggagccctagagattgtcagtcactgagctggtttccgggacacctgcccctgaggccatcatagtctgcaggttgtgctcttggactggcctccaggctacagaatgctcccctgccttaggcatggactgggaccaggcccacatccatagcatctgcacccagcagttcccaaacagcttctcggcaggaatcccccaaggattgttactaaggcagctggaggggacatgagggggacaggatgtccagagcaagaacagaggcagtgtgttagtggttagaaacacagactgtggagacagatagatctgaattttagttctgtcccccacttactagctgtgtgtccttgggcaggtcatttatgctctgagctgacttcctgctctgtaaactgggggcattgttacactccttcatggggatagtgtgtagcacagtgcctggcatgtagggagtgctaagtgttagccccccagggcagtaggatggtggtggggggttatgcatgcatgtgtggttgtcctgggctcatgccaccctctctgcagaccccaactccagagaccttcctgaccacaatccgggatgagccagaggttccggtgagtggggggcccagtggagacttcgagctgccagaagaagagaccacacaaccagacacagccaatgaggtggtagctgtgggaggggctgcggccaaggcatcatctccacctgggacactgcccaagggtgcccgcccgggccctggcctcctggacaatgccatcgactcgggcagctcagctgctcagctgcctcagaagagtatcctggagcggaaggaggtgctcgtaggtgaggcttggggtctgggccaaggggagcctgggaggataccagagtgagacagctggctgggcctcagtttgcctctaggaacccagaaaggagatcagggcgtggtttcctaggagccagataggaaggaaacttgagaactcaaccccccaggacctgccttctggctcctcccaactttcctccttcccaatatccaaccctgacttcatgtccatctctaggtcttccctcagtgtcctctgacccctctgtggactctgactttgatccctgctttcctgggccacactggctgaccccctgggaccttacttcctagatgctaatctctgacccatccttcagcttgaccttccccagtttttgaccccagtccctgtggacctgccctggccgcatctagggagtctgtggactcctggttcaaatcctggctttgcactcaaggcaaggtacttcacctctccagtcttccttctcttcatcggtagaatggggatagtcattttgcccttaatcaattctaagaggcacatctgttcacatgttaagtcttctgtagttggggtatgtcatatttagttagcagagctttttctttcctagcagttataaaatactggggcatcttatgagtggtggcattttaaatttgatgaagccctcagatgacccctccctcatagggctggtgtgagggttcagtgagttagtgtgttgggcgattagaatgcagccagtgaaggcctatgatggtacccagtgctggtagtagtagtattgactccatcatcactccaactcagatctgggactcccagccctctcctcaccctggcccccacccctgaggaccctttgccctggttctaccctgcctctgggccttgacctgtgccctcttcttccacagctgtgattgtgggcggggtggtgggcgccctctttgctgccttcttggtcacactgctcatctatcgtatgaagaaaaaggatgagggcagctacacgctggaggaacccaagcaggcgagcgtcacataccagaagcctgacaagcaggaggagttctatgcctagtggagccacagtgcctccctgcagcctcaacaccaccctgctgtccagtccccagcctggccccaccagcccaagcctgggactgggcctggaacctggccccagttcttctctgccctctctcccaaggtctgcccaggctgccagcctcacacagatcttccccgaggaagaggggctgctgccatctgccccagactgtgcccttacgagctcatctcttgttcccctcatccctgccaccagtctggggcttcaggacctcatgtcagatggatgggaggaagaaagctcctgattggctggtggtggaagaaagggtggggcttgagatgagcctgagccctgacttggcacccacagtgctcactgagatctcctttttggggcagagaggcactcaggctggtttccaggacaaacatttggtaaacacagcccttgaaatcatctagacactgcaacctcttgctcgtatcccagggcctctctctagctgggtgagagggtgtcccttgtcaccagcctgttttgtcctggtctctctggggttgttgaatctctcctcttgcctgccaagtacacatgtacccagacttcatttctttctgcatcttcccccaagaaacagcttcctgagggtgctggggcagccactggtgaggaggggctgctctgatgtccctcctatgaggggactctgcacagacaccattgcccacactatcaccatattttcactcagtcacacacaagacaaaagcatgcaatgacaaaaccatacgcaatcctgaccgcccagccaatcaagacatatcacagaacacacgcgtccttccaagaatgtttatcctcatgcatcacttacacacccccagacacgtactgcaatgcaagtcactagtcatggtcacatgacagtgacagtgtggcctcctcctaccccaaatacacccacactctggcaccacacacattgtctccagctttcaggcttactggggagggtggaatcgagccagaacaatcagcccatattgggtccccctaagttgccccgtcatactcagtcccatgccatggtgcccacaccaaccatgcagccgccaaccccagccagtgtcagacacaatcccatgtggatgcacagtctcactccacatgacctgctctcaatgctggagggaaacaggcaggcccttgcctttctcggaaaaagtgtggggccacagcccttttagggcattgcatgcaggtgggcctggcttcacccctacctgcttcctccccaccgcagctggcagagggggaggtttggggccagacccccactagctgggagcctgggggctcctctaaggctgaggaaggaaatttggccccaggttgttggggggtcttgggtctcccaggacggaaggcccagggcagggagggggcatgtggttgggctcctttatctccctgtgtccccttcctgctttgagctagggggctgactctgcctcccaggacacaagtctccaaagtgcctgtgagggcgggccctccgcaccctctgccctctgcctggcaggccaacctcagcccacctgcccagaggccctccctgtggacaccccctcacctatttggccaaacaattctggctgcagcttcaggggccatggctggaagcagcccctgcagatccctcaggccccgaggtcagggtttgagggatgagaccaggtgatagtgggggaggggttacttcctttgttacctagcaagtagggctatttccatcggtattttaaatgtggggtca

SEQ ID NO: 4265 - DNA, 6000 bp, Homo sapiens
atctgcctcctgggttcaagcgattctcctgcctcagcctcctgagtagctgggattacaggcccgcaccaccacactcagctgatctttgtatttttaatagagacggggtttcactatgttggtcaggctggtctcgaactccttaccttgtgatatgcccgcctcaggcctcccaaagtgctgggattataggcgtgaaccaccccgcccggcctataatagtacatttctacatttttggctgtaggtttcaaaaacaagttccattataattttttttttttttaaaggaacttaagaagtatggagtgacgactttggttcgagtttgtgatgctacatatgataaagctccagttgaaaaagaaggaatccacgttctagtgagtgtgtagtatttaaatttttcaaaacaagttgtatctttcaaacataaatatttataaaactaggccaggtgcactggctcacacctataatcccaatattgtgggaagatcacttgaacccaggagttcaagaccagcctgggcaatgtggcgagatctcatctgtacagataattaaaaaactggtggggcatgttggtgcacacctgtggtcccagctacttgggtttttgaggtgagggaatcacttgagcccaggtggttgagactgcagtgagctgtggccacaccaccacattccagcctgggtgacagagggaaaccccgtctcaaaaaaaaaaaaaaaaaaaaaattaaaaacttggtattaggtgggcacggtggcacacatttgtagtcccagctacttgggaggctgaagtgagaggatcgcctgagcctgggaggtcaaggttgcagtgagccttgattatgccactgcactccagcctggatgagagtaagaccttgtctcaaaaacaaaaacaaaaaaaccctggcagtaatacttttggatttttttaaggttgtagtggaaaatacattattgatagcaatctttcaaattcttttggattaacaaattggcagttttgttcatttgtgctcttaaagcctacaaatcatagtattttcaactaataaaaagcaaaatttagtgtgctcttattttaacaacatgtaaatttgcaagttttattttttaggaaattaatacaatatttagcttttgtttctaggctactaatttgaatataatgaaagtaatttccatcagacattcttaagtccatatggaactctgccactttgcaagtacaagattagttacttaatattttgtggataacttgtaggaggcaaaaaggtgggataagaggatgaggagaggtagaaggcatcctcctccagagtaatcagcatagtttctgatactttttgttaggtttctgaggagctttagtatgattagattttttgtctagctcaatttgagcacaaagtgattggaattattttaaattaagttcctttttagcatcaaaataggctgtttccttatagcaaatgggagcatcagattagttaacattttattctttcttccctaagtagttgtctaagttgtaggagcagcttttaggagcacgtaatgaaatgatcttgtaattttagatgtctttgagctgttggtttgattgtgggaaggttatgtagtaggaagagaactggagattttataagtagttaggaagaacgtaacaaggaagatactggtttaaggttatgttcctgcttcttattgagaggtagttctgtagtctttattatattggtcagtggttgggaaggcagttgatgcaaaaagaataatgacctattggtaaggcagtcctcttatatctgatccatagtttcctcatgtccattttggtgaaaataaaaactaaatagccaaatgtgttttaaaaaaatgtgttttagggccctgtgtggtggctcatgcctgttcccaccactctgggaggccaaggtaggtggatcacttgagtccaggagttccaagactagtggggcaacatggtgaaaccctgtctctccgaaaaatacaaaaattagctggacgtgatggcatgcacctatagtcctagctacttgggaggttgaggtgggaggatcacctgaacccgagaggtcaaggctgcagtgagccatgattgtgctgctgtgctccagcttgggtgacagagaccttgtcagtcaatcagtcaataatgtgttttaatagtttggcatggtaataatttgcttgcagtcaaatttctaaatgactttactgtccactgctggaaatcactgggaatgagtgtaaacatgtcaaatgcagccctgtgtttaaaaagtagtaataaaatttaaacttccgaaaataagctgcatacaagtttattttgctgcattatgaatatgttctctagtgagcaaaaatcaacttgttttgacagatggcagagtgagaaaatgactggattgaccatagtctgtttgagtcagtaatgttggtaaacatctttgtgaaatagaaatgaactaaagaacttgaactagtttgaggaagataatggtaggcctaagatttattccaggcctttaaatttaggtttttgttttgttttaaatagctgtgatctgggaaatgcaaatcaaaagcacaatatgataccaccttactcctgtaagaatggccgtaatcaaaaaattaaaaaaaaaaatagatgttgtcagggatgtggtgaaaagggaacacttgtacactgctggtgggaatgtaaactagtacaaccactatagaaaacagcgtggagattccttaaagaactaaaagtagaactatcatttgatccagcaatcccattactgggtatctacccagaggaaaataagtcattaaaaacaaacaaacaaacaaataaataaatagctatgatcagataaaatgaaaggtttaacttacacttgaaaaaacaagggcatttagccttaagcttggaatttccttttcccagacagagattttaagagttaatctaattttgctaggtgaggagggttttggaacatttcatggtaagaggatatccccaaataaggcctgtcagtcctctgaatgctcttgcaaaccagacacacattggaatagactaatggtggttttagctgtatcaatttgaggttcagatgtttctaaatgattaatgatttttttaaaaatagacactacttatatgagtaagtgaagcatgttttatattgtttcttaactaggtgcattttagggagtattagaggaagtaagctcttgactaaggtactggttttattgctatttacagttaaactctctagtgacatttataataacacagtcctttaattatggggcgtagttgtcaactcaatcatgtactgttttggctaatgggctacatgaagtgttctagtggtgccaataatgaatgcagaatcaatttaatgctctgtcacttttctctttttcctcccctaatatcttaaagtgtccttatccaatctcattagaatagccttatgtttttaaaaaaattcctaacagtgtttttgcatttctatctttgaagcttagatggcaggagggaaggcttgtaaaatgtcagcccccagtccccctcctccactccccatttgtgttggtttcttaggacctcttgctaagtagtgaggaagataaacccctgcctatactgtgaatgctcgtgggattagtcttaattgaaagatagcccaaataggtgaatacagaaagagaaagggatacttgacaaaatggtctccatttgcccaggaccctgtcatgcagccctgtccttgttaaatggggacatatataatttagtaagcactttaaaaatactcactgcttgccttttaataagcacaaagatggtagtttgtttctgttatgatttactaactattggagatttcttatcagataacctttctctaaagatgtcataacttagttatcttgaattataatcttcaattatctgtagagaccaatgagacaccagttggtatgctttgccagagtggacttttaaatcatgttgacatgtgctgtgtcctctgttactttgtcttggctttaattacagttttgtctattatgtctaattactactctattcagatatcatttttgggagaacactagctcttatgactctgatagagatttctgtaagtttttgtaaattcagatgtgtgcgacactgcattgagaagggtaatttatttggcaaactttaatttcaatcctggatcattttacagcaatgatcagaattgtgttaacaataggtatatatagtgcagttagttcagttaggcctgccgtgtgtactgtgtgcaggtattctgtattaggatgttaatcatggagaaaatatcaatttaatgtaaaaggtcatttcttttcaggattggccatttgatgatggagctccaccccctaatcagatagtagatgattggttaaacctgttaaaaaccaaatttcgtgaagagccaggttgctgtgttgcagtgcattgtgttgcaggattgggaaggtaaactcttacctttattaccctttttgtctgaattcattaccatgcctaagttagttgaaagtttcactttggtagacatttgcatatattatactaaataacattaaattacctgaaaggaaaggaaatgagaggaaaaactagtgtaatgatttctcaaaagagcctgttcatttcatctggttgtctgattctgatgccagcctggattgtgggtgttttatttttctccctatttcaagtaatcaaaagttcaggtcactgaaattggcaacaaaattaaaataattttagagtttgatgaatctatacatggttaattttggactgagatgaatgggaagttaatagatagcagatatctgaactttaaactcttgaaagaagatgtatggacaagaattgactttgatcttaaaaccttttcccctgagcattgcttagaatggtgttgcaacgctgtcatcagcagcagattaaatgccaatttaggatgcacactttgactcaaaacattagtgtaggctgccattgcctcaaggtggtgattactcaagctgttagttctgctctgcccttttgtttgctatttccttttttgtagtgtggtactgtttgttcataaggttagaagttttagtccttatcctgaaggttgaagataatgttgtaacgtgagttggcagttttataactagtagctatcctagttttaggtagcccaaaattggtgccctgtaatgggctttataaaaacatcatttcctttgttaaatttttttaaaaagatagaacttcttctagtcatcaattcttgggcattttcctagctcatcaaaaggattttcttgaaaacgtctagcacctttttagcatttgataaggaaatattaaaatcaattggtaatgaaaattctgacacattggagataagtaatatgtttggtcatttattttactgtgataatggctaaaggccaatgaaggatttttgatcatatctagtgatgagagaatttaatatataatgtgatgttttaaagagtaaagatttcttaaggtttagaatttagtgctttactaaaagtagataatcaggctgggcgctatggttcacgcctgtaatcccagcactttgggaggcggaggcaggcagattgcttgagcctaggagttcaagagcagactgggtaacacggagaaaccccgtctctactaactattaaaaatcaaaaattagctgggcatggtggcgggcacctatagtccgagctatttgaggaactgaggcaggaggatcacctgagctttgggaggttgaggctgcggtgagccgtgattgtgccactgcactctggcctgggtgatagagcgagaccctgtcccctgccccgccaaaaaaaaaaatcata

SEQ ID NO: 4266 - DNA, 6000 bp, Homo sapiens
ttctgcctcccaggttcaagtgattctcgtgccttggcttcccgagtagctgggactacaggtgagtgccaccatgcctggctaatttttgtatttttagtagagacagggtttctgcatgttggccaggctggtctcgaacctcccgacctcaagcaatctgcccacctcagcctcccaaagtgctgggattacagcgtgagccaccatgcctggccagaacctttccattttcatttctcactcatgtcctttcaaacattctcttctcctgtcaaccctgctgctcatacttcctcagacttatcctgtgtttatacacactatgcctttcctccctgctccccaagcttggaatgtccttcccccttcttatgactttgtcaactcatattcatcatttgagatccagctgaaagggctcctcctcaggaaagccatccctgaccaccctaagcagagcctgccatgccttctgttggtctgtcatagcttttttgtatatgtcctcatcacttggtatctcagtgatctgccatcttgtctgtaacccccagtagattatgtttttcatctccatgaccctggtagctagcaaagaggctagcacaagtaagtataataaatctttactgaatgagtgtacagatgagtgagaatctttttctccctcatgccatctctgagtcactactcagtttctatcaagaagagacacataaggaaacgtgggaggaattgctttagtccctttattcaagggtgatagtctcaggagagaagaaaacacaatcaagttggggccactgcaaagtctagtggcatttaagagaagttattttccccaaagcactggcagctttgaactgaggctgaatttgtttggaagccagagccaagacaagcagacatttggtagtgttgagccttccagcaagctgggattctgacagccgtttctgtcagctgcacaaggagaagcatctaaaaggcatctgggtctacctggaattgggggtccccatatcttttagcacaatctgacccaaggaacaaggcagccgtctctcctaccctccattcccaccataagcatatacctcctctaagggggctctgcagttgattaggacgttgggcactgagaacagagtcaaagatgactataggaaactgtggcagagatgatactactgcttactaaatggcttatggtttcttcctacatttcccagcctcccttgcagtttttttgtttgtttgtttgtttttgacacagagtcttgctctctcgcccaggctggagtgcagtggtgtaatctccgctcactgcaacctctacctcctgggttcaagcgattctcctgcctcagcctcctgaatagcagggattacaggcgccccaccacaccccgctaacttttgtatttttagagatggggtttcaccatgttggccaggctggtctcgaactcctgacctcaggtgatccacctgcctcggcctcccaaagtgctaggattacaggcatgagccaccgtgcctggcctccagctctctttttgaggcaatactgaaagctttgcattgagatagtggagcccaagagagaagtagtctggatctctgagttacccaggagagttgaggagagctactctggagagtgccttaacccacagccagcgttgcatgagtggaaaagatataccattgttgtgtgttatgccattgagaaatttggcttgtttgttaccatagccaagtctagcctattctgccagataaatatagacattaattgttgttttagccatccagcatcaaacctccttcctatttgaggattaaactctccccctcctttaggactctttggtgttgccaaatccagtggtcacatctctgttcttatctttcttgatttctcagcagcatttgtcacaattgaccactcccttctgggaacatactatgttggtgtctgtgacatcatgcctgcttagtttttcttttatgtcactggcccccgcttttcagttttctttgttggctccccttcttgttttatgtcaaaagtttgaagttctggagacctggtttaaaatatcacagctggtttccaccttttgagacgatgtctttttgtgtcacccaggctggagtgcagtggcataatcacggctcactgcagtctcaacctcccaggctcaagcattcctcccacctcagtctcccaagtagcggggactacaggcacactccatcacacccagataatttttgtattttttgtagagatggggttttgccatgttgctcaagctggtctcaaactcctgggcttaagagattcaccagcctaggtctcccaaagtgttgtaattacaggtgcgagccacagctcctggcccatcttaccattccttattaataacagagcactcattgttagctgggcacattgtacccagttaagagaatgtttcccaggctcccttgcagctgagtatggccatgtgagtgagtatgttttggcaaaaatgtgcgggactttcgaggcagtccttttttctttctttctttttctttttcttttttttttttttttgagacagagtctcgctctgtcgcccaggatggagtgcagcggcgcgatctcggctcactgcaacctccgcctcctgggttcacgccattctcctgcctcagcctctcgagttgctgggattacaggcgcccgccaccacgcccggctaattttttatatttttagtagagacgggatttcactgtgttagccaggatggtctccatctcctgacctcgtgatccgccagcctgggcctcccaaagtgctgggattacaggcgtgagcctccgcgcccagccccaaggcagtcttcttaaaaggaagaggatgcatctttcttccctttttccttcccactgtttggaatatggaccatagtgaggtgaccttaacactggaagccaaatactgaggatggctgaacagccctgaactgcctacttttggacttatatttcatggaaagagagaaatttctggctaggtgcagcggctcatgcctgtaatcccagcactttgagaggccaaggcaggaggatcgcttgagcccaggagctcgagaccagcctgagcaacacagggagatttcatctccatgaaaaaaataaaaataataggcaggcctggtggcgcacctgtgctcccagctactccagaggttggggtgggaggatcgcttaagcttgggaggttgaggcttcagtgagctgtgatcacgccactgcactccaacctgggtgacagagcaaaaccgtctcaggaaaaaaaataaataaatttcaatcgtaagctatttttttcttttgttatttgcaattgaatgtaatcctgatacattcctgttgttgaagctgtttgcctgcctcccactaggaagcctaagggtccagatcctcccccagtcagaggaatggggaactagaaaaagaaaggcaaaggcactgccaggcaagaaaacgctgggtctccttccacaagtttggtaagtaagcaagataccaggaggatagaatggtaagtgagcctagaaatagactattatatacatagggtttattaaatacatagagaacactgaatgctagactaagaaatttggactttattctggaagtcccttgcaataggggaccttgtctgttttattttctaatgcctcgcactttgtagaagctcagtgaatgaatatattctttattaatttatgccgtctgcttaataaacagaaatgttggaaggtgaaccagttgggagtcaccatctgatcaacccctgcctgctttttataaataatgtaactgaaccatcatttactggaagtggcaatcaacctgtgaggaacggcaaaccaaaaagtccaccttgggtgtcatggtgatggaattggaggcggagaccagggagagcagcgggctaggatctctgagagtctccgcaacatggcggccctggaaccacctgaccggcaggaggcggagctccgccccagctcgctcggccccaccccgctcggccctgcccagcgcactcctagaccggggcgcaagggttgtgaggtgtttgagcgaagcgcctgcgcagggcagcggcgcgcggggcggaggctttataatcacttcgtcgttgccgctcggcttctatcgccgggagggcggttgaggcggtggtggcggcgtcggcggcggccgggcgctggctgaggggcgctgaggcgggagctgtggcggcgctgggcgcccctggctcctcggcctctgccggccatgggctccgagaaggactccgagtcgccgcgctccacatcgctacatgcggccgcacccgaccctaagtgccgcagcggcggccggcgccggcgcctcaccttgcacagcgtcttctctgcctcggcccgcggccgccgcgcccgggccaagccgcaggccgagccgccgcccccggctgcgcagccgccgcccgccccggcccctgccgcggcccagggcccgccgcccgaggcgctgcccgccgagccggccgccgaggccgaggcggaggccgcggcggcggcggcggagcctgggttcgacgatgaggaggcggcggagggcggtggcccgggcgcggaggaggtggagtgtccgctgtgcctggtgcggctgccgcctgagcgggccccgcgcctcctcagctgtccgcaccgctcgtgccgggactgcctccgccactacctgcgcctggagataagcgagagcagggtgcccatcagctgccccgagtgcagcgagcgactcaacccgcacgacatccgcttgctgctcgccgacccgccgcttatgcacaagtacgaggagttcatgctgcgccgctacctagcctcggaccccgactgccgctggtgcccggccccggactgcgggtgagcgcgggggcgtggcgcgggtggcggcgggctgcagccgaggggcgtggctgggggcagcagggaccccgcgtgggtgtcccaagcagggaaacccgcaaggcggcagcttcggcggggtggtaaccatcaggcaagcccagactagtggtgtgaacgcacccgacaccccgccccctgccccagggctcgaggtggctgctaagcattcggtgaggggaagggagctgtccaagttaggagacagggagaggcggtttttttgttgggggaatgccctctgtccggaggtgaggacagtatctttttttttttttctttttttttttggagacggagtctcgccctgccgcccaggctggagtgcaatggcgcgatctcggctcactgcaacctccgcctctcaggttcaagcgattctcctgcctcagcctcccgagtagctgggattacaggcgcccgccaccacacccggctaatttctttgtatttttagtagagatggggtttcaccatgttggctaggctggtctcgaactcctgacctcaggtgatcctcctgcctcggcctcccaaagtgctgggattacaggcgtgagccaccgctcccggccaaggtggggagtatctcttaatgagagtggggaggggatatttggccaaggagggaatgagaatattctgagggggcagcgcgtcggaggggtgtgtccacttggctagggacagacttagcattgcagaagaaggcgtgttctccctgacaaccaccgctgaaagttgggatggaggtgactggggaataggctctcgggtaccctgagcactatgtgttctgtgccacgctatcgggaggcactctgtcgttcttaccttgctgccttgggtagggtgaggggtagacagatatgttctttgtccagagtctcaatgggggcactgagaagaatgcccagaggttggtgtgataggagaaattgtgtttctgaacccctttgatcttgag

SEQ ID NO: 4267 - DNA, 6000 bp, Homo sapiens
caggataaataggtttctggctcaggatctgggtggatgtggaaactgttccctgaattggggagctgagcagagaggcaggctggggtggagaactagaagtggataagcccaggtctgagcaggctgtggtggaaggggtggggtggggctcctatgagacatctgaggagagagaatgccagatacaatacagaccctgggacttgggagaaaagaggtttccatcctagagttgcccatccaccagcagggacaaataagaaagccagcaattatggagagactgttgagtcagaagagaggtctatttccaccccacacccttccttggtaccctgtgagtgctgcagatttacacactgtgtcctccctccctgagctggcccactctgtgctttcttcctagaaagtgctggttctcacctgccctttcccataggctgagctaggagcccttcttatttccatcacatgctatatctcttctggagtaatcaatcatgctttgctgtttaacgctgttctcaataaactctcaaccccctgaggacaggggccatgggaatgtcttattcttctttatatttgtttcctcaacacctagcacagactctgacatgcagctcagtgtggcatgaacaaatgaatgaaagagtaagtgaagagtaagtgaatgactacacaagatactatgcaaaaaatgagcaagcctgcataaaagtattgctagctgctgtaacaaactccaatatttcaatggcttaacaccctgttttgtcactggcatgaactctttttccttatacacaaatgaagaattttcaccaagaatgtcagaatttggtgaccacagcatgtggtagcactagaggaatggcctaggctgtgggccccttctcacttctccctcctggtttcagaagcccacagcctcaccttggtgtggtctgggctttttcctcatgaagcccctctgtcgccactccttgggcagcagatcactgccacctctatggtgatagcctcgcccttgggagatactcgctttggcctgatcatgctcatgattttaaaattgtgccccatttgggatcctaagcttttcctctgagcccatctttgtcctgtagcccttctctgcagccctgcctgccccttggcctctatttctgccctcgcattgctagaatctcccatttgctcactctctctctctctctctctctctctctctctctctctcagcttcagaaggctttttgatcttttcctgggtcagaatgaaaatttcagggcatcaagtctacagctcctccttgaatgaggcagagttctccagagcatcaggccttgtattctttctaaatcaaactctgattttatctggatattaggcttatcttggctagtcactagactgcattgggcttttttgcaatgtgatattgtaaagacacctcaacccacgactgcctgttgctcacagggagaatgagaggggcaggcagggagccagcacttggggctgggctgagacccacactctcctaggctagatgcgggtaggctgttatgtctttgactcctgcctctccattgccctgcagatgtttccagggtccccatctctgcctttgcccccatgtttcctggctcagactattgcagtagtcttctaagtggtaccctttcctttcttaccctttcctcacagagaagttagagtatatgtcaggccacatcacttggcgtctctttcccagaaatgaaaacctacctttcatattcagagctgtctacttttcactaaaggagccatgctatacacagaaaataaatgtaaacagatatctctttacatatattttctgactgtcaagcatctctctcctccctccatctgaaaagtcatctcctcctgttatagaatgaattgtgtgcccccccacccaaattcataggttgaagtccgaacccctagtacttcaggatgtgaccttatttggaggtagagtctttaaaaagtcagttaagtcaaaatgaggtcattgggttgggccttaatccagtatgactggtgtcctgattagaagtttggacacagatatgtaccatgggaacacatgtgaggacacagggagaagaaggcagccatctacaagccagagagagaagcctcagagggaaccaactgtgtcgacctcttgatcttggacttccagcctccagaattgtgaggcaatacatttctgttttttaagccacagggtctatggtactttgttgtggcagcagtcctagcaaattaatacaccttctatttctcactggctaagaataaaatgcaaactcctcgccatcccctaatagaccctatgtgatctgccccactccctatctcccattgcttacctggatccagccccatcctcctcctcctggccccctttcctttttacagccttgcctgtgctcactataccaaaagctctttccccaactttgcatggctgccttgcttaattctattattatattaattaattaattaattaattcatagacagatagtctggctctgtcacccaggctggagtgcagtggtgtgatcatggctcactgcagccttgaacagctgggctcaaatgatcctctggctttagcctcctgagcatcttgcttaattttagatcccatcttccaccgttgccatctcagagaggccttctcagaccatctccttaaagcacatccccatattgtttctcctagcaccataaactttccttttgtagcatccttaattagtaactttatgtgtatttgtatacatattttctgccttcatcaagtcagggactgtgcactaggtgtatattcattgtctagcacagcacccaggcacataatgatgctcaataaatatttgttgagtaaatgaatcttcatcttttcaaggtctttatccatgtctcaggttccagaccaaatcctactttccttcttaaattagccttctgatcccccaagtccaggaaaagctcactgtcttgacatgcctctcggtagcatgccggttcttcagtcatggtgattatcgctgtctgacggtatcagttacgtgtgggtttccacctctggcctgcatcctcccaaagcaggaccacacactgtgcatctctgcagggcccagagcacagcctcgctcagggcccccgagcacaggaggcgctcagtgaaagcacgtggacccaaatagatcagagagcaggaatggcggaggatgtgagtaactgggccttttgcagggataaaataggtgccctgccctccacagcccccagggagaaggatgacaaacgctccttttgcccgggaaagttctgggggtaaatctcatctgcccgttgcagccacagagcaaagttctggagctgagaagagggtaagagaaagcccattggcctgcagccccagaattacagagcagcccagactctcttctgcccagctgtgggctgcacaggaggcctgggcatctctgccagttcctttctctggaggagaaccccgcctccaagagaggggtaaagtcggagcttagaagccaggagcccacccccaggcaagcccagctaacagcccccaaggccaccaccaccactcactgctggcgtagtcagtcccttcctcctctccagggctggtgggaaggctgagccctctctttcgggggctgagtctggacaatgggaagggagaagccccctcctcactgccccgggaacataaagcaggcctttcactgaggagttctggctgcttcggttggttcttggcacccagcaaggcggcgtcgggaggggcgggcatacaagcgtgttgggggtggggaccaggcccgcgattctgaggagattcgcccgcccagggccaccgggctggctccccagctgtgggatgagctcatgcagggaaaccggaacaacttggggtggggggagggaggaagagtggcatctaggaggctgcgaaagcgtggctctggggaggaagtttttcatggggagtagggacaagcctccactcctccagccctgcccccgccccccaattcatatcgtcaactccacagcccctcttcacacccttccttggatggaaattcctggccacgctgacagccggccaacctgggtcgccagccacccccagcctggctcgccatccctacagtccctctccacacccttccccggaaattctcaggccccaccgcccgccggccactgcccccttggccacacagatgccaacgctccgttttggccaaatcaggctgccctaagcccggagcacagcttctctggggtgtgtcggcaaagggggcgggggtgcccatcgcaggtgcctttccactgcacgcgccagcagaagcctcctctctggaccttgcccctcccagtttcctccagcctccccccatgaagcgtctcttccctctcgccgagagtttggcgtagacagcgaaggagccatcgtgactggcggagaagcctggagtagacgagacagagacggcgaccgagtcgggtgggggatggggtggggaccgacactaagcccttggggcctagaggcagccgctactggggagaggtggggagcagctcacgtccttgggaagaactctcttggtttggggccttggctgggaggaggaaggggagaagaagaagtaggatccgattatttaaatttggggataaattgtactagtaactcttgcaccgtccttccaccaacctcactccccacccccaactcgcgtgcacacagggaccgcctctgccaccctgagatttttgtcttagggtaggagtgggaccgcactgggtcaaatgaaccggttcccccccctccccaccccacacacaacccccctccaccgccctccaattcttaaccctgcctctgtctacgcacacacgcccctctcctgggatggggtaggaggctattgtgaatgaggctcataagcatcgcccccggccctagatggcaagttcaaagccaccacccaagatcagctggtaagagccaagacttggggaacgcgtccttctttggttaccttttcccagacaggattccaatttccaaacgtggaagaggtgtgcgtgtatgtgcctgtgtgtgtgagtgcgtgtgtctctgtcactgtgtgtgtgtgtgtgtgtttgtgtgtgtgtgtgtggagaggggggtgtattaatgggtgatgttataaatgaaaacaggaggactgaacttaaaagaaactggtcaattgcaaaacagacacggataaacaaccctttagatgtaatttgtggtttatctggaggtggaggtggcgctgaagaggaacccccgccccccaatattttatccttagctgcgcctccacccccagcatttggagcggcggagaagcggctccggagtgattaatccggggataattcaccccctcccgccccccggcgcgaaccccgcgaagcgggattggagcgagtcatttccgagagcgcagcgcgcctctccccggccgggcggacacttggttcattccagccgcagaagctcagggctcccgcgtaccgggattttttccgagcagaaaaaagctccagagctctcctgacctcctttctcctcggcggcgagcggagcctctccctcggcgctgccggccgcgccatgccgcgctcgcggggacgggagctggggcgctgcggctgccccgcggggagggctcgcggcgaaaccgggatttcggcgcttgtgccgggcgccgggagccgctggggccgcccgccgccgccaacgccgccgcctctgctgctgttgctgggctgtgggttgctcagcgtctcggccgccgcgggtgagtccagccgcgccgaggagccagcggccgccgcgcgccccacccgagccccgagcccacccatc

SEQ ID NO: 4268 - DNA, 6000 bp, Homo sapiens
accgtgttagccaggatggtcttgatctcctgaccttgtgatccacccgcctcagcctcccaaagttctgggattacaggtgtgagccaccgtgcctggccctaaatgcagattttctaatcctgaagtcagggttcattccacttcactccttgacttgatccatgtattttgttcatacttcctttaattcccttctcaatctgttcaagttttgcccatccttaagaacctcctcaatttccatgaggttctctgagatccctccagacaggagagaatatggctctcctctttccctattgcactcagggcctctatgtggcatttaccatagtgtgacagtttatccatgtctatctgtcttcccatgaatctgagattaaccaaattttagatggtgccagagacacagaaatgagtatcctagcacaatacctaccatataaatcaatatgcaacttctgacttagcaggatttccattgattcaacacttcaggtgaatgaaaagtagctgccagtacaacaagattggagccttctacgtcgcttaaaatggacatttgagctggttttcaccttagatttctaatgtcggaatttttctatttacagaattcagcttgggccaggttgatccttttaaaacatagtaacaatgatagctgatatttcttgaacatttactatgtgctaaatactattctgagctctttgctggcagtattgcatttaattcttataacaggtattatggttatcctcattttacagattaggaaattttggcacaaagagtttaagtaacttgcccaaggtcacacagtctaactctagagtctaagcttttaaccacaaggttaacctacaggttttttagtggatggggtatgagagtgatttttttttcctaaccttcattttaaaaaaaatctatgaaatgatatgatttgatttgattagcattaaggttgtaattcactcaccttttcctctctcttttacatggcagtagcctttttcctcagccctatagtcagctgctgtttggtttcaggatctttgcaggcaagccagggactgtttgaggtgaaagagaaaatgggcagctgccattttgccgtctgtctataaggtgcttttgtcctgacataggagacaaatggcatatgttaaaaacaaaaaacaggctgggcgcagtggctcatgcctgtaatcccatcactttgggaggctgaggcgggtggatcatgaggtcaggagatcgagaccagcctggctaacaaggtgaaaccccgtctctactaaaaatacaaaaaaattagctgagcatggtggcaggtagctgtagtcccagctactcaggaggctgaggcaggagaatggcgtgaacccagtaggcggagcttgcagtgagccgagatcgcaccactgcactccagcctgggcgacagagcgagactccgtctcagaaaaaaaacaaaacaaaaaaacccaaacctgtgaaaacaacagagaaactaggaaaagaggcaaaacttctgtaaatttttgtttttcagatatctgctgattggtacatgtttgtgtgtctgaggtttttgtgcttttttcctaaaggctgtaataccaaaaatccccttcacaccataggtaaaaggtgagactgcaggataaaacctcactgacgtctggccctgtctgtggctggtggtgagatttaaacaaactacatgtcttttctatgcttttcctctttctgtcagcaaaatggaaagatcccaaacctccttgcttgcttatgctcacattttgaggtggcatgagaagctttaggctgttcagctggaaggcatcatttaggtaaaagcctgctcttataaatgaacatttttttttattttctttctttctttttttttttttttgcaaatcctgtgtctcactggcacaaattgtgggactgttgcgtaggagaattcattttcatctcaagctcctgccttactggagccagccctcctggttcgtcccgcaggctgtctgcctaggatgtccatcgttgtgatgtgtaaacagctggaacaggatgatgggaaaacagcctgctgcagacggagcttgcactacatagcgtagggaatcgggaatagggactaagaattacctcttcttaagatttggtttctgagctttggaatcagagaactatgcttgcatcttggctcactatatagcccttgggtgggttacttagcctctctaagcctcttataaaactggaatcaatgatgcctactctatatggttgttatgagggccatatcagacaattcttatagagacctcaggacacagatgcgtgcaggcagcagcaggacaaaatggcgctggagacatattgcctggatcagaacctgactccactgctttcaagctgtatgaccttgggcaagcttgcttccttccttccttccttccttccttccttccttccttccttccttcattccttccttctttccctccctccctccctccctccttccttccctcccttcctccttccctccatctctccttccttccttccttcctttttctttttttttttaaatgaagtttccctctgtctcccaggctggagtgcagtggtgcaatcacagctcactgcaacgtccgcctcccgggttcaagaaattctcttgcctcagcctcccaagtagctggattataggcctgcaccaccatgcctggctaatttttgtatttttagtagagatggggtttcaccatgttggccaggctggtctcaaacttccaacctcaggtgatccgcacgccttggcctcccaaagtgctgggattacaggtgtgtgccaacgcacctggcctctctgtctttctcctcatatatgtgaggagtaaaatgaggatgatactttatagaattgttgtgaggatttaatgagatataaagaacttggagcagtgcctagcacatcataaaacttcagtcagtgttagcttctagtagtactttctgcttctccaatagaagtgggtaagaataggtaaccttgccacattggtatttcttagccttaattttcagtcttctagtgtttattcctctttccttaaacccgtccctgatcacactcctctctctgccctgatagcttgactgtagtagactctgatggagctaccaactctactactgcaaacctgacagtgaacaaagctgtggattacccccctgtggccaacgcaggccccaaccaagtgatcaccctgccccaaaactccatcaccctctttgggaaccagagcactgatgatcatggcatcaccagctatgagtggtcactcagcccaagcagcaaagggaaagtggtggagatgcaggtaggagggaatggttcctattttttcttgcccaagagaagtagagctgctggactgcatttttagaaacctccaaacaaactgagaaagctttaggggcctttgattaacgtggtagcaaaaatctttatcttggccgggtatggtggctcacgcctgtaatcccagcactttgggaagctgaggcgggcggatcatgaggtcaggagttcgagaccagcctggccaacattgtgaaaccccgtctctactaaagataaaaaaattagccgggcgtagtggcgtgcgcctgtaatcccagctacttgggaggctgaggcaggagaatcccttgaacctaggaggcggaggttgcagtgagccgagatcacgccattgcactccagcctgggtgacagagcaagactccatctcaaaaaaaaaaaaaaaaaaaaaaaaattatcttaaatgtttagtattagaggaaaaggctgagaaatgttagttgttctggatgactccagagagtcaaactatttagaagctacaagggtgcaaatcttagtgagctctataacaagttagagtagattggctagatggtgagtatcttctctctagagatgcttaagaagagagactagatctgtcaccaggcaggtaacataaagaaagaaaactggatggtggctgtgctgaacttaagccctgactaaaggagtcatctactcttcaggtccagctggttgttgccacatggaaggatggtcctaacattgcttgataacccagcttttcaagagaagaaagaaattgagacctttatgtgaaaatttccaatatgagagacaccacaggccaaaaaaaatatttgcaagctggattcagcccatgggctactagtttttgcctactgctctacaggaagttcctgcattggaagtttgcccaaaattatttataatgtccctcaagattctatatttctcagttttaaggcctcccttaaagcctccattttacctgacttttgtttaaatgttatgttaggttgttgcagaacctgtacagacctgaaggagacagtatggtgttatacagcatcttgagctgctgccatgtttcactgagacagctttgttaggagcactgtgtagcttcagtaggaagaggatctttttaaacagtgtttttaaaactgggtcatttattgtttgttcacggtattctttctggtttgagtcatagagactggccttggtaatctctgcacatttcccaatactgccctctcttatgagagttctggctttatttgaaactgctgctgtgtcagagagggttgtttccttgaagggggaaacccttagcaaggtgcctcatgatatctgactccatattcactcacatgctgaactggtacgtaatagcccagtaccatcttaggtctttggtttagaaaactaaatcgtttttaccagagtcggaattattgtgtgatgtgattcctggagtccacttttccacttctgtatttgtatttgtagggtgttagaacaccaaccttacagctctctgcgatgcaagaaggagactacacttaccagctcacagtgactgacacaataggacagcaggccactgctcaagtgactgttattgtgcaacctggtaagctccagccttgtggttcaggctcttctattggtgggtccatttaaccttgggggaaaagagtgttgggttctgagctgtatgagggtagaagcagaaggcaccgatccatagagcctctggtgacttctattgttccttccccttgtgctttcttcatagctagagatgaaggatacttcccagcctcagcttgtgcccttcccttggcttgttgttggtaccttcaaagagacctaggaaatagagtttatgccatcccaaatcctaaaaagtaattgcggtttttgccattcctttcaatagcaattacttttgcaccaacccaataccacgtccttgaagggcctgcttaaaactgacttcctcaggacagccctgtcttgtcactcaaatcctttcatttgaactcccttagcattagagttcaagtttagtatggcattataacttcattatgttctatgtttctgtcagaattgcttgatatgtttcagccttatattctttattgtgtgctccctgacggtaaccacatctcccacagtatctgacagttctgtggcctgagaggcagagtccatggcttccagaacatgtgtcccaattggttcctctcctttcccacctggactggctgcttttgacctctaactctttgtcttccagaaaacaataagcctcctcaggcagatgcaggcccagataaagagctgacccttcctgtggatagcacaaccctggatggcagcaagagctcagatgatcagaaaattatctcatatctctgggaaaaaacacagtgagtattgacacaaaatccttatttttgcaaagcctccagaccttggaagagcaaggttttatttgctattatgagttgagttgctcttattggcttatccagtggggtgactgaggaagaaatgtttg

SEQ ID NO: 4269 - DNA, 6000 bp, Homo sapiens
tattctgatgggcagatgttgagggaattatcaactgatggcttcccttctccctataaggtgggagggagggcatctgtacaaatggacagtaaggtccttgtctgttttattcattgttgtgtatctatagagcctacctagtagatgccaaaaaatatttgctgaatgaatggatcaggagtgagaggaggaggtttctctgggaaatgagggagaaagagagagagagagaaagagactcaggaacccaaaccatgtctgatgagaacagaaaaaggccatttgtaatggcctcagctctgccttggggagtggggagctggggacaatgccaaggaaagcttcacaagggagatgttatttgaactggggtttggagaagtatagaagtttgccaggagaaaaaggatataaggaattacagaacaagacccagaggtgtgaaaggatgagctcagtgtaccatggttagagtggctggcagtggggagctgttggaggacattaggaagggaagggaaatgattggatttgcatttagaaagttaaggccttccaagtgccttctgcagctaacacaagcttccctctaaaagtagatggataagtgggggaatagaacgaatatgttcttttcccctttttgtttctctttagtgaccttgacttttgttctccctcggttagccactagagaaattagtaaaagagctggggtttcctttgggggaaaaaatcagggcatataacaagtagctttaattctctgctagggccaggtgcagtggctcacacctgtaatcccagcaatttgggaggctaaggcaggaggattgcttgagccaggagttcaagatcagcctgggcaacacagggagatcccatctctccacacacaaaaaattagccaggcatggttgcacagcatgcctgtggttccagctacttgggagggctgaggtgggaggattgcttggccccaggaggcaggggctgtagtgagctatgattgtgccactgcactccagcctgggcaacagagcaagaccctgtcacaaagaaacaaacaaacaaaacaactcagtgggattgccttggagccaagggacccaagcagatatgttctctgaggctccatagggcacaatgagcccctgtgatggggtggcacaaggggcattacagacagcgaagctaatgggggctcatcctaagaagcactttctgccagcattgttcaacaaaggcagcctcagaagcgggtgaatgcctcatgataaagtatgtgacaaagactgtggctactgctggggaagctgccggaggaccaggccagtgggagctgagctagattatctctgaaggtctgaccttgaagagagggaggggctggcagtcaggaatccctgaatctgctcttcagcacaaactccttctaagcagagcctcttacagcagagataccactgtggtcgctgatgggcccacccacctctaggacagcagccaccctcatacacttgtggggagggagcctccagcattcttcccctatttttgtgaaaccctgcgaacagatcatttatctgggctctcacttgctctcctatttcacaacagtggtgggcagggcatggttgttattcctatttgaccaatgctttttttgaggccagagaggcacaaggagtggcccagccaacactagaacccaagctttccaagtcccagcctgggtctctgctgcccaccagaccacggggatagttggcccatgctctgttctgcaggcagaggagacttctgaaggctcctgggctgccgagcccctccccagagttgtgctgcccagaactctgggcaagatggaccctctcaaacctatgccttccagacagtggaaatcctagtcccctcccctcttctgccacacaggctgaaagttcctcctgagggctagtctgcaccctttctgttgtactgcgtcttcttggagctggagagcagccagctaaactagaggagagggccagggaacaaggtgaggaccacccaagttctgagaggtagggccaggaaccaactggcccagctggtgagaaatttttttaaagtgggtgtttagcagttaccacttaaggcctgtgggggaggaacagtaattactatcattattgtgaaaatgtggttggtactgggctaggtggtttacatgttttatctcaatcctccaacaacctttttgaggtaggtattcaacacaaggctcagaggggtcaactgatgtgctcaaggccacacagcaaataagtggggtgactcagctacaaacccaggttgttcagatagaaacacttgtgatcttaacaacctgtgttctgagaagtgagagaagcaaactgagtaggtgtcaagactggaaccaggtctgactcatggtccagggaacttttactggcccttttctctccacccacccccctccacctggctggctttacttccagttgggaatttatgacacactcactcacatgatggtggtggtgggagggtgtgtgtgtgtgtgtgcatgtatgcttgtgtgtctgtccctgcgtaactgtggaacagctcttggggcacctctcctcccctctctttctcacaccagcactgcagagtttgacttattttcttccagtggtcctgagggtggtgtgatgtgggcttgggttgggatcccacaggctgcgggagagtagctgtaggcaacttcacctctcctagccttagctccctcattttaaagaggataaagggtcgggcacagtggctcacgcctgcaattttggcactttgggagaccaagctgggcagatcacttgaggccaggagttcgagaccagcctggtcagcatggtgaaactccatctctactaaaaatacaaaaaaagtaactgggcatggtggtgcacacttgtaatcccagctactcaggaggctgaggcaggagaatcgcttaaacctgggaggtgggggttgcagtgagtggagatcccgccactgcactccagcctgggtgatagaaggagactcgaaaagaaaaaagaaaaaataaataaaataaaaagaggataaagtatataacctcacaggtggttgtgaggattcaatgaattaatagacgtaatttaaaaaataataaatagagacggggtttggccatgttgtccaggctggtctccaactcctgggctcaagtgatctccagctttggccttccaaagtgctgggattacaggcatgagccaccgcgcccggctgaaagtaaaatgtttcaaagttttccgaacacacagcgttttctaagggtaggtaatgggttgttcaggagtcactccacggggcagtgctgactggagtggctgagtcccctgactgtttttctatcgcaattggaggagataaacgctgccctaaccaggccagtcaggaaagcggggagaaactggaggagccccctcttctcaccagccatgccctgcagcctgtcccccagggttttacaaggtgtccccgcggcggcccctctgctcaccgtgcccagagcacagccgggccctggaaaacgcctccaccttctgcgtgtgccaggacagctatgcgcgctcacccaccgacccgccctcggcttcctgcacccgtgagtcccccctccaggctgcactgcggagggtggggggtgggagtggccaagaaggaaggcctgatccaggtggtggtgagggcagggtctccgcactggggcgcacgtgggcggatatgggggccagcgccccggaaggcggcgtacgggggagcggagcctggacgcgccctgggggccggggcctttgatgagaagaaccaggacaactgcgagagtccagacggaggatggggttaggatgcctggcagatcactgaggagagcgcccctccgctgccctctcctcaccctgcctaccctccagccgaaaggggggctcccgaccttcgcaccatcggttcggtccccatgctgccatcctcggttcctcactaacctcctcccaaatcctcaccaactgccccgccactctcacattccgacctcccaagggcccccacgcccccgtctctgacccttcccggggcaagcccctcctcccgctcgcccctgctcccactcacccctgctcccgctcgcccctgctcccactcacccctgctcccgctcgcccctgctcccgcttgccccgggctcatccgccctcgacccctcactgactgaccatctctgtaccaatctccctgactgaaccccacgcccccattcctcccaccccagacccctcacaccttcctatcccccatgcccactggctcccacggcccattcccgctcatccatccctgttccttcaccggtcgtcccttctaccttcctccctgactgaccccatgccactgtctctcctgtcccccgtcccccctcatccaccaagtcccttgatgaacgccctggttccctcctccccgactgaccctcgcgcccctgcttctcctgcctcactgggggtggacaagaccccgcccccccctcgtgcatcccgcccctctcacgggcacccacgccccgccctgaccgccccgcccctgtgccgcctcagggccgccgtcggcgccgcgggacctgcagtacagcctgagccgctcgccgctggtgctgcgactgcgctggctgccgccggccgactcgggaggccgctcggacgtcacctactcgctgctgtgcctgcgctgcggccgcgagggcccggcgggcgcctgcgagccgtgcgggccgcgcgtggccttcctaccgcgccaggcagggctgcgggagcgagccgccacgctgctgcacctgcggcccggcgcgcgctacaccgtgcgcgtggccgcgctcaacggcgtctcgggcccggcggccgccgcgggaaccacctacgcgcaggtcaccgtctccaccgggcccgggggtaaggccgtccgcgccccccaccccgaggccaccgcgcctgccgcccctgcgccctcttggggccgccccgtcggtcctgcgggagccccacccacccaccccagagaagccatcctctgtacacgcaccccgcccctctccgggacacaaagtcacccccccggacgccccagcgtcagtcgccctcccgagtgtgcgagagggactgaggatgcaggcgtccccttactactgggccagaggggaggcgcgcggttctgttgcgtctgcgggaagcacctgtgtgctcgcttttctcctggactccttgcacaaagcctctgtcccgctcacggctctgcagttggcctcgccgctgatttctcagggaaaaagaggtggaaagtcccttaatctcttaccttccctttaaaaaaatgtcagtaggaatccgaatttacttccttccctctgtctcgggaagccggatccggccctgtgtcccttacctccaaccctcggcctctgcatggttttgctgcatctggccacctcctttcctggtcccgggaaagggcaaggaagcttgtagagttaggctgtaggggcgatggaacacaccagccaatacatctctgagtctggacatgaggtgaataagtgaagacctacaaccttttcacaccacaccttcattcctgagagtttcttttgattcgcttctcagctggggtggaccttcaagtaatgcttgtattctttgcaagaaagataagcgagtggtatggtttctgactcccttcctaatcgagcctatagggtcggcctgtcaccctgcatccctgctttctgtgatcccgcttctgtctttggcagtggtgttgccaagaagtctgaggctagggttattttcattcttttctacttaacttggacatatgacatgtacacgtatgcacacggatgttagaataattctttaacctgcttaa

SEQ ID NO: 4270 - DNA, 6000 bp, Homo sapiens
cttccttagctcatggcaccctctcccctataaacagcccaggaaggcttcatgtaggaggtgaatttttttttgagactccctggctggagtgcagtggcatgatcttgtatcactacaacctccacctcccgggttcaagcgattctcttgcctcagcctcctgagtagctgggactacaggtgcctgccaacatgcctggctaatttttgtgtttatagtagagacagggttttaccatgttgcccaggatggtctcaaactcctgacctctggtgatccgcccgcctcggcctcccaaagtgcgggaattacaggcgtgaaccaccgcgctcggccagaggtgatatttaagcttaggctagaaggatgaagaagagtttttccccaggcaggcaacaaggaggaaaagggcttggcagtcggagggaagggcaggacctttggtggggactgaacttgggggaagaggagggtgtggagagagctgagccaggaggggtcagcagagagcatctcatgaagggtcttagctacccagcaaagagcttggactttgccctatagcttatggggaaccattaaggaattttatttatttatttattttttgatacggagtctcactctgtcgcccaggctggagtgcagtggcgtgatctcggcttactgcaagctccacctcgcaggttcatgccattctcctgcctcagcctcccgagtagctgggactacaggtgcccaccaccacgcctggctaattttttgtatttttaatagagactgggtttcaccatgttagccagaatggtctggatctcctgacctcgtgatccgcccgccttggccttccaaagtgctgggattacaggcgtgagccaccgcgcccggccgccattaaggaatttttaagctggagagtgataaggcaagatttgcaagttagaaaagttcctctggcaactggtatagaaaaagagaactagagcagggagataggaatgtactggaatggctaaggaatggaaaatgaggctgggacctgggagagccctggtgatgggaatggggaaggagggatggacttgaaaaatagagaggtcaaactgatgagaatgaaggcaccatgggggcagtgagtttgggtcacgttcacaacttcatccgcagagataagaacagtgccagcctgcaaggtggctcacgcctgtaatcccagcactttgggaggccaaggcggggcggatcacgaggtcaggagttcaagaccagcctgaccaatatggtgaaaccccatctctactaaaaatacaaaaaaattagccaggcgtggtggcacgtgcctgtagtcccagctactcgggaggctgaggcgggagaatcgcttgaacccgggaggcagaggttgcagtgagccgagatcgtgccactgcactccagcctgggcgacagagccagactccatctttttttttttgagatggagtctggctctgtcgcccggactggagtgcagtggcacgatctcggctcactgcaagctccgcctcctgggttcacgccattctcccacctcagcctcccgagtagctgggagtacaggcgcccgccagcacgcccggctaattttttgtatttttttagtagagacggggtttcaccgtgttagccaggatggtctcgatctcctgacctcgtgatccgcccgcctcggcctcccaaagtgttgggattacaggcgtgagccactgcgcccggccaagactccatcttaaaaaaaaaaagaacaccgcctgtcagatagcaggcacttaataaatatttgttgactgcaggagcagaggttggtagctatgagaatgaaagacaggagtcaaggatgacttctttcttttaggattgggtgtgtgtcttgcagtccccttacctgtcatccttctggggtccacaccacacctggggtaaccagcagagaaactctgtaccaaccaacttctctgagtgcttgtcatgatggggatttcctcagggagggacctgggttagaagggactctcagtattgacagactcttagatatccaccagcccaactctttcattttactagaggcactagaggcaaaaggaactaggttttttccacccagtccttgatggataatgttgtacagcacaaaaggccagagagtggaagtgtcttggctaagaatctactattagagaaacatcagctaacaagagatcacagttagctaacattaattgagcacctactgtgtgccagacatttttctagataccgagacaatgcacaacaactgtatttctccgtttggtcttctgaacaatactaagaagtagatatcctgttttacagacgagtaaattgacacagaggaggcaagcaacttacccaagatcaatcatcaattgaagtaataggggccggatggggtggctcacacctgtaatcccagcacttttgagaggttgaggtgggcggatcatgaggtcaggagttcgagaccagactgaccaatatggtgaaacctcgcctctactaaaaatacaaaaattagccaggcgtggtgccgtgtgcctgtaatcccagctactcaggagtctgaggcaggagaatcatttgaacccgggaggcggaggttgcagtaagcagagatcacgttactgcattccagcctgggcgacagagcaagagtttgtcccaaaataaataaataaataaataaataaataaataaataaataaataaataaaataaaaattgaagtaatgggaccaggtttgaaacttcagtttctgatgccaaagccctcggagttcagagatttcagtgcagatcccaggtctgtcacttcctaaatgtgaatgtgaacactacattttattttatctattatttatttatttatttatttatttatttatttatttattgagacagagtctagctctgtcacccaggctggggtgtggtggtgcaatcttggctcactgcaacctccacctcccaggttcaggttattctcctgcctcagcctcccgagtagctgggattacaggtgcccgccaccacacccggctaatttttgtattttctttttttcttgagacagagtctcactctttcacccaggttggagtgctgtggtgcgatctcagctcactgaaacctctacctcccaggttagagggattctcctgcctcagcctcccgagtagctgggactacaggcgcatgccaccatggccagctaattttttgtattttttgtggagacagggtttcaccatgttagccaggatggtctggatctcctgacctcgtgatctgcccgcctcagcctcccaaagtgctgggattacaggcatgcgcctggccctactatatattttattttttcagaccttggcttttttatttatacaatggaaatataaacttgccttcttcaataagccaagttttttgaggatcagacgaggccaagtatgggttaatagtatgtaaatgctgaagacaacttaaaagctgtgtctggcagtgccatagtcaggactggaactcaagtcttctcatatatcatgtccttgcacatcctattcagttcggtcgggttcatgcagctctacagacagagcaggtgggatagcaggagggttaagagcaactgttccagagtcagatagtttgagtcagagggtttgagtcagagacagaggtgactcaagaatttctaagagggagagtggcagtctggttaagggagaaacagaggacttgtcttgatatatttcatagtaaacacactgcttacttacggcgtgtgtttctctggagtgggctgccaactgctgctggaggttatgggtggtgaaatcctccaaccctctggcatcggtttgaatcctccactctgctagtcactctgcgacctcagacttaacctctctgaacttggttgccttgtatataaaatggggataataggccgggggtggtggctcacgcctgtaatcccaacactttgggaggccgaggcaggtggatcatgaggtcaggagatcaagaccatcctggctaatacggtgaaaccccgtctctactaaaatacaaaaaattagccaggcatggtgacacgtgcctgtagtcccagctactcgggaggctgaggcaggagaatcgcttgaatccgggaggcagaggttgcagtgagcggagatcgctccactgcactccagcttaggcgacagagcgagactccgtctcaaaaaaaaaaaaaaaaaaaaaaagaaaagaaaagaaaattgggataatagtttcctccctcataaaaggtgtgttacgaggagtaggaagataatatttatacgaggcacagaccttggcacatagttaccgtgaggttcaaggaatggcggtggtctctgccttggaatagtacttttgtgttcacaattattcttgcatttgaacctcagtgcgcacagaacccttctgtgcgcgggagaaacagggccggagtctcttgggataatacaatcatgcagagccggctcttcaagctcgtggctcagtctgcccccatttgttcctgcacaggcttcgattctgcgacccgggatcctgaattcctgtggctgtctcggtataggtgcgcagagctggagctggagatgccaacgccgcgcggttgtaactcggccctagttacctggccagggtacgcgacaattggcggaggcaggtatccgtcccggaagaaacggtggggattggaggaggcccggccacagggggcgggctccgttctgttttggggcggagcgatggagaagacaggctttcgattgatggagcgggcacacgggggcgggttcgtctgggggcggagcgcgcgggacgggcggcgggatgaggagcttgaggaagcaggcagggaaatgtctgccgccgccggctctcgggagcgcaacactgcaggttcggcgggcggcgggaagctgggctggggagctgggccgggggcggcggtgcgcccggccctcgggtgggcagggtcggcggtttggccagtggacgctcggggcgaagaccaaagtcctggtggccctctggaggctgggacactggggcagaagttctgtgatgttcttcttaggcgtgcgtgacgagggtaggcgggtgggaatggggtacttgggaatccggaggctggggttttagtaaagctccgttccgaactcgctgtgtgacctcgggccactcgctgcccctctctgggcctgttgctccatctgagcttgctcttcaatcctgatcttccgagtttgtcgcgtggggcgggtgggggagtggtgccctgcctacgatagagtcttcctttgggtgaggtatggtatgtgttggggctctgtcagttctcagcccctgtgatgatagcgcagtgtacagggctggagtcttggggagccctgtctactctgggactagaggccaggatgaagttacaggttataaaaggactaggttttttcccacccagcagttggtggataatggggagcacagaaggccagttgctgagcaggagcttgtcgtttggagatgggaggctcagggctgaaatttgggtgagtccgtgctctgggaggacctgcagacctgtctttttttgtccagctccagggttttctgcaagggcccctggtgcttttttcccctgggtgtgtccgtgaggctccatttatgtgtgagctttggcatgacccctagtacctatttgtgacagtcatttgccagcaatgaagagcctgtcaagtagctgtgtaaagtgtgggccagccctccacttgctcttacaaggcttggaaactatgaggggcagggaggagtggcatgttgcacaagagtttgtaaactgagaggaaacgaggtgagcagaggacttcctcggtgcttgtttctccttcattgc

SEQ ID NO: 4271 - DNA, 6000 bp, Homo sapiens
gctgatggtgctgacccacttttaaatctaaaccacagtatactatgttggaacaatttataggtctttattccccagtgaatagagagggactggagaacaggaggtggtttccttttctttctttcttttttttttttcccatgtgtttccagagcctaacacatacaaggcattcagggaatgctaccactggatgcacacatcacataagcattcactggtagttgaaacatgatgtatataagaatcccctgggagctgttaaaaaggcatgcagatttcttttttcttttttcttttcttttttttttttgagacggagtctcgctctgtcacccaggctggagtgcagtggcgtgatctcggcttactgcaagctctgccttcctgggttcacaccattctcctgcctcagccttccgagtagctgtgactacaggcgcccgccaacacgcccagctaattttttgtatttttagtagagacggggtttcactgtgttagccaggatggtctcgatctcctgacctcgtgatctgcccacctcggcctcccaaagtactaggattacaggcgtgagccatagtgcctggccgcctgcagatttctgaacaagacctgagcccagaccctctgaatccaaatctctagggcagaagttttcagtcttggctgtacatgaaaagatacaagtgccaggccttcaccccagagacccagtttctgttgatccggggtgaactcaaacacatttaagtctcttcagatgattctgatgtgaggccagggtgaagaaccagtgccctaggattagaagcagccatctctgctaacctccccagatgattctgatgcaggtggtccatgacagggtgaccaacacccttggcttgccctgattttagcactaaaagtctcacatcccaagaaactcctagtcctgtgcaaaccagacagttggtcattatcagtggaccactattgaaaaaaaaattctacacgaagcagtgaaagccttttttgagaaatgcccacaaatatctactgaaagccatgattttgtctccttacttaagggcctgggccaactgtccttgaattaagggggaagtggctcagggtcactgttttccttcagccctgtgctctggtgtgctaggtctgttaactcatgtaaatagtgtgtctgtctttgggaattctttcagactatatcccttagtgcgcacaccacagctttgaaagcccaatcaccatcaacaaagatgatgtgtttaggataatacaagatacaggatgaaattcctatgtcttctgcaccattgtgtattattattactattacaaatactataatagggtacacaaatatatgtaatatgttaaatagctgtggggcggcccagactctggtctgagattcccaggtttgtgccccagctttgctgtacctaggtatgtaatcatggatgcctcttttttgccctagttatttacctgtaaaatgggaataataaagaggtcttcacagagcagacgggaggatccagaaaataataaaagcgaaagtggttctgtagagtgagaaggctgagtattatgatggtctttgaatgggaaggacttgaagacattattccgccgagaggccctgcatgtgactggggctctggtccccctaccctgaaccatagcccacctgtgaagtttcaaggaagaaacttttgacgcagagtggaccatggagagagctcaggaagcagagttctctaccttagctgcccttactgctgatgtcaagtgtgctttgcttcagcaaaaagcaaagcttttggaaacgggggtttgtgaaggcattttttgttttcaaatcttttgcctatttattccaagtgtatcctcagaaatgcagccaaaagaaaacaaccacaaccacaaacctgtaatattgaaaagccagttcttaatttctgtagctaaaaaagcatcctttcaggctgtaaccacagagagattgctgcaggcctctggcataatgatggtttgcagtgtgatgaaggaggctgctaagctctgtggcccagaagtccaatcctggcctctccaattacccaggcgcctagcaacaccaccgaaagtctccctggcagccccagctgggcagcaattggctacacccagcacagcccgctgcccagcctcctgagctccccagccacatcaaggcgggtctcagccccggcaggggcctgcctggtaccaatgaatgggtggggccagctgtttagaaaaaacaattcagatatttaaaacctccctgtttgaatgcagctaggcaagcggcacaagctcacaactaaaagtgtctgccatggaaaaggagttgtcataagggtgttggccttgccagggccttcctgggtgaggcgaagaagggaaggtgagcctgatttagtcctctggcttctcaaagaggcaaatccttttcccgtcctggacgcttgtgtccacctagagtcctcgtcgtagcagtggggatggtgggaattcccagccccatcttctcccaggggtagtgacctgccacttcctctacagcttccgttcgggaattcacagggtctagtctgggactgtctaggcagctggaggaaaaagagggagctaagagtacaggaaaggatgggatgaaaataaccaaaaagaagattcacacttcttttgtttaaatttttatttttatttttatttatttaggttttggagacagggtttcgctctgtcacccaggctggagtgcaagtggcaccattgtagctcactgcaatcttgaactccccgtttcaagtgatcctcctgcctcagcctcccgagtacctggaagtgcaggtgtgcacaccactgcacctggcaaactttaatttttaatttttttttgtagagaaaggctttcgctgtgttgcccaggctggtctcaaactcctggcctcaagcaatcctcctgcctcggtctctcaaagtgctaggattacaggcatgagccaccatgcctggcccattattttttatttaaaattttttttttacatggccaggcacagtggttcatgcctgtaatcccagcacgttgggatgccgaggcgggtggatcacctgaggtagggagttcgagatcagcctgaccaacatggagaaaccccatctctactaaaaatacaaaattagccaggcgtggtggcgcatgcctgtaatcccagctactcgggagggtgaggcaggagactctcttgaacttaggaggtggaggttgtggtgagccaagatcgtgccattgcactccagtctgggcaacaagagcgaaactctgtctcaaaacaaaacaaaacaaaacatggccgggcgccgtggctcacccctgtaatcccagcactttgggagcccgaggcgggtggatcaagaggtcaggagattgagaccatcctggctaatacggtgaaaccccgtctctactaagaatacaaaaaaattagctgggcgtggtggcaggcacctgtaatcccagctacttgagagactgaggcaggagaatcgcttgaacctgggaggtggaggttgcagtgagccaagatcgcaccactgcattccagcctgggcgacaaagcgagactccgtctcaaaaaaaaaaaaaaaaaagaaagaaaaaaatttacattttaaaatcttcaatttatttatttatttcagagacaggatcttgctctgttgccaaggctggagtaaattttcatttttaactctaatcccatcacagttgaaggagtacctttctataacacttggtgcgtagaaatcacaggggctgtggaacatgtgggggctttggagtcaggcgcccgagactcttctcccagccctccccttattagctgtgagaccttgagtaagttactttgggagcctgggtttctttatccttaaaatgggaatattattaccctgctttacaaagtggtaaaaattaatgaagacaatgctcataaagtgtttagcctggatgctggcacacagtaagtgtttattattctagtacctctttattattttatttgattcttaccacaattctgtaagatactcagggcagaggtgagctctgttttacagctgaggaaactgaggcccagtggaaaactaaatgtggatgctgggagtagaattcaggtctttatagtgtcaaacacaaggcaggctattcttcaaaggcagatggcaagccctttttttggtagccattatgacatggcagcttcacagtgatggtgcccagtgatggtagaatgataatggaagtggtgcggccttgcagaggaaaaggttggtaggaggctcttttcttttctttttttttgagatggagtctggctctgtcgcccaggctggagtgcagtggcgcgatctcggctcaccgcaacctccgcctcccaggttcatgccgttctcctgcctcagcctcccgagtagctgggactacaggcgcccgccaccacgcccggctaattttttgtatttttagtagagacggggtttcaccatgttagccaggatggtctcgatctcctgaccttgtgatccacccgccttggccttccaaagtgctgggattacaggcgtgagccaccgcgccctgcccggtagaaggctcttttcaacataaagtcacacaaagacttagtcaatgtgtggttggaattcctccttcccccttttccctcctctctttctctccctgtctctttccctccctttcttccagaagcattccttttaaaaaacatttttaaaaaaataactctgatgttttgtatggaatgcttcacgaatttgcgtgtcatctttgtgtagagaccatgttaatcttctctgtattggtccggtttttagtatatgtgctgctgaagcgagcaccacaagcattcttttattgattgattggttgagatagggtctcgctttatcactcaggatggagtgtagtgccacgatcttggctcactgcaacctccacctcccgggttcaagcgattctcctgcctcagcatccccagtagctgggattaaaggcatctgccacctcacctggctaattttttgggtacttttcgtagagatggggttttaccatgttggtcaggctggtctcgaatgcccgacctcaggtgatccgcccgcctctgcctcccaaagtgctgggattataggcgtgagccaccgcgccctgcccgagtcaggtttttttattgcaaaagatgggaactgattctggctaattaaatcaggaaatgaattttattgaaagcacattgagtaagttacagaatcacttgaaggctgtagaaacaaggcttgggaaaaaagcagaaacagagaccaggtacctagaattacaccaaattccatcacagagccagataggtgaggacagcctcagtgctgctgctgctgaacgcccagtgctgctgcctttgtcacagccacagctggcgttggatgctggatgccatgctgaccccagtggcaaggcgtctggacactggatactgctgccactgctgcaaccactgtaaagaattttttccatcctcacctccagcctcagaaatcctaagcaaatgcagctgattggtcaagctgccctagctgcctagggacatgcaaaagtgaatattgggcatggttaatgtctgtagtgggatccgtttcctgctgcccaccaggagaagataaattccccaagaaaactgacaaatgacgactacgtacatgttgtcaaagaatccactggaagtctttgacatttgcagattcaacacttgcaattttggtaatttattagttactcccaaaggcccattataaatgaatatgagttgaatgattggctttgcctgttagtgagccaggcctactgctctgcctggatatctcacatgactgtta

SEQ ID NO: 4272 - DNA, 6000 bp, Homo sapiens
aggcaggcccgtagttccttcaggttcctccttactcttacattcttagggtaatgatttctggcaatttcaaaatggaaaaccttgtccctaaggctcctccgaaagtggtgacttcttttcttgagagagcaacagtgacagcagtaacagcttacccatgtgccaggcagtgttcgccgcctcatgcccctctacaaaggggaagtgagaagttccttggcagatgggcagacatgtagtctcacccacagttgcctcgactggcgggaggtggtgtggggattcccaggtgtccttaggcttgggcaggcctccccctcaccccaggagagccaccgggtgaggaatagcttcgcgtaccagaagccatccggttcaaaggatctcagctgcccagagtcaacctgcttctccagggtggtctccatggtgggtgtcctctaggctcagtgaggcacctggacagagatctgtagtagcccctcagctctaggctggccgacaccatggcagtccccccaggaactaaccagaaccgctcctccctcctcaacacgcttgccgccacccagactccacagctgggtgaagagactgggctgggaagggagcagagaagcgggtggatggccgagcctggcacatttggtgtgcaggactccgactgcattctgaggggtggttcactgtgggaaatggggtctgactttggtggataggaagagtcgggagcagaatccagatgagacccagggcaggctgcctgggtagagaagtaggacagactcggaggcagaatcgagaggacctggtgatggatggatgtggggtggtggcagcatcaagtgtttaaatcctaagcttgggacgggcatgtgaggtgggagcgttcagaacaggcacgtgccaggtctcacctcacacatgacccagggttgcggaggctgctgggagccggcgggattgggcctgtgggatcctgtcagggcataataagtagactcttctttcctgaggtgcacccagacacttctagggaggatgtgaccccagagcttttccccatgtagggttcttctcattctccagcatccccctgcctttcctgggccaagagtcagcgtggaaccccatacgaatccccagggaggagagggcacagagcaccggaaccagcagtaggaattggaaaaccaggcgtggcttcttcccagaaatctcaggcatcaagaggcagaaacccactccccagcctcagcttggccaggaagtgctgctgtgggctggagaggatgggtctaggccaaggtgaacatgcagagagctggctgctcacccttcctccaccccataaagtggtctgagtaacagagcagctaggcagcgtccaggagccagccctggacaaggttgggtccctttgactgtgtgaccacaggcaggagacgtaactcagggtggagctctggtcacacctcacttacacacagccctcttgtcagttgccccaacatctcaagagatcttcaagcttatttaggtagtttcaagccttacttagcacctatttactctttctttgtatacaattcaaacaaattccatttgctgacttcttggcaaatttcaaaagaggtgtggagagttgtacaagacaagcctctgaaccacagagggttgggggaataccttagaactatggaatgcagaaatttagccatcaggagccagtctgcacagggacaaacacctctccttgcccctggagagagccccaagggcagacaccattgccctgcagccctgcttgtaggtctggttgctcaggagagcaaagtgaaatctcttcacattttcaccccataatgggtcaggaaagattggaccctcagaagggcaagcgccatttatctggaccgttcccatatccaccctcattcagagcagcctgttcttggtggagcctgataaacggggcattaccgttcccaaccagtcctcctctggggttagtttcgtccacagaagaacactttgcattttgttactctgttttttgtcaaaatctgccttctgtctgcccccagcagaatcaaggggttctaagaggagagcctaacacctttggttcgattcctccatttcctcaccaggtatccctggcactggctctgggacagaccatggtgtgaatcaactgtcttcctcagggaagacaaactcctggagtcagggaaacctggatctcgaaaggtttcagcaataaggccaggggtaccttccaggcaggagtagtagcatctcaaaggcgtagaggggtgggagatggtgtgtagtgagtgcaaaggtgtggtaggtagggagattggattgatacctggcaggagccccgattttgagttacgggttgaaggcttggggagactctgttagtggtctgcacagccttcaggccaccagtgtgcagtggggtgattttagggatgatgacaccaagcactgtttcactgattccctgcagcactgtgaagcagctcctgctaatgtctgcactttagaaatggggccatggaaactcacagatgaaataacttgctcatggtcacactggaaataaggggtggagctaggacctgaatttagttgtgtccagaatcagagttcaggtttctattcactgccctgcatggcgtccttggaacggacaagcagatccttagggcttgcctctgccctaccaactgtcctcgccccttggagcctggcctccatcagatgcctgctgacttgggacaggttgtgacagggcaggggaaaagatggctagaggctgagcacccacagcaatgggaaggaaggcaccaggaggcaggcccagcatatttgaataggtgggcatttctgggactgcaggctttggtttggcaagtgtgcctgcccacaccttcttcttctgctagacctcagtgggttggaagggatagggaggaccaacagcagtgatggaggctgcagaggctgcataccgctgtgtgtgcatgaacctgtggcatgcacacacacggaggggtgttgggatgggttgggttcacatggaattgagtttgagctgtaagtggtaggggatgaggggcatgtgagtttgtgactggctaaagcaggaatatttagattctatgagcacgggtatgtgtgtgtgatggtatacgtgcataagaagccgtttctgggtaactagggcctgcactctgctatacgtgtggctgggtgggtctggccagtcccatggcactgagagtgtggtgagtgtgctcaggcagaacgggtgctgcctgcctaccacatccgtgggagctggccagggtgggggcagggctggtgggcagggctgccctaggacgggcgtttccagttcctggaactgcttccttgtgtggaacctttccccatacctcctagctgggcccttgggagaggggaggaggccgtgggtccttcaagggggtgctcgcaggccagacacaagggagctaggcctggggaacagaaagccacagcgtgagtctttcaagcacttctgaagggtgacatgtgtgagtttgtcacaccaggccctcagtgcggtcagggagtctgtacttcctggatggcggaacctgtctgtcaagccctgcttcctccccagcaaggggttggggggagggcctgatggcaggagatgggcccctggggctttgagacatggtgaggagaaaaggggcaagtgggaagacccttttccttctgtatttctctttttttttttttttttttgagacatagagtctcactctgtcactcaggctgaagtgcagtggcacagtcttggctcactgcaaactccgtgtcctgggtttaagcaattctgccttagcctcccgtgtagctgggattacatgcttgcgccaccacgtccagctaattttttttttatttttagtagagatagggtttcaccatgttggtctggctggtctcgaactcctgatctccagtgatctgcttgccttgatctcccaaagtgctgggattacaggcgtgagccaccacacctggtcttgtacctctctgttctatgcctgaacttccaccactgatcacttgccatcatcccagcaagtcacactgagcctgtgaaaccacagggcactggaaaccacacgttaggggaagtgggagagttggcggggctctcagatgaactccaaccccttgtttctcgcctggggaaagtgaggcccacaaaaatagagggacttggctcaagaacatgcagtgaatctgtggcagagccaggccctggccctctcttagggaggggtgcaaggggaaaggaaaaggaagactgggtcctggcccctggcttgctcacccaggctgcatctccccctgcaggtgatcgaggagttctacaaccagacatgggtccaccgctatggggagagcatcctgcccaccacgctcaccacgctctggtccctctcagtggccatcttttctgttgggggcatgattggctccttctctgtgggccttttcgttaaccgctttggccggtaagtaggagaggtcctggcactgcccttggagggcccatgccctcctgcccagggagtcccagatggggtgggaggtaggggagacttatctgcctgttccagggtattacctctgacccagcccctcggagcccaaggaatgtgggcactggcctgacctgtgaccccgtccccaggcggaattcaatgctgatgatgaacctgctggccttcgtgtccgccgtgctcatgggcttctcgaaactgggcaagtcctttgagatgctgatcctgggccgcttcatcatcggtgtgtactgcggcctgaccacaggcttcgtgcccatgtatgtgggtgaagtgtcacccacagcccttcgtggggccctgggcaccctgcaccagctgggcatcgtcgtcggcatcctcatcgcccaggtaagctggggcaggatctacctgcctggcacggcccctgcccacagcttcagtggctctcggatctgtgcccagcagggcagagtttctcttccgcccagcccccacagccttgcagaggacaactatggtacacaggtccagagaacacagcaccatggcctcccagttgacagcaagatgacttgactcttctcagtccctttcttctcactctaggcttccaaccacagggcccgccttcccccaacatgccgcaggctgttatgcacagtaccctctctccaggaggcttccccttccctgtccccaaaaccctcttgtggcagagtagcagcccccattctctgtgctggacacatctgtggccttgtcatttgtcctcccagcaacactgtggggtaggtcctacttttcccatgtgaccgatgaggaaactgagaaacagggctcatgctagtggcagagcctctagaactggggcccttccctgaagcagcagctgacacaaagtagggaaggccactctggcaggacggggtgggaaagggggtcagggcagaggcgctcacggcccctgcttcccccaggtgttcggcctggactccatcatgggcaacaaggacctgtggcccctgctgctgagcatcatcttcatcccggccctgctgcagtgcatcgtgctgcccttctgccccgagagtccccgcttcctgctcatcaaccgcaacgaggagaaccgggccaagagtggtacgggcatggccctgccctcctccccactccctgagccctggccttcttcccactctgagccaccctcaccttccctccggtccccccagtgctaaagaagctgcgcgggacagctgacgtgacccatgacctgcaggagatgaaggaagagagtcggcagatgatgcgggagaagaaggtcaccatcctggagctgttccgctcccccgcctaccgccagcccatc

SEQ ID NO: 4273 - DNA, 6000 bp, Homo sapiens
gcagccagggctgaaaaacatatacagaataaaatccagtcttcttgctgtggcatacaaggctcttcataaactgactcatgcctacctttcttgccctcccatatgccctctgaactggagtcataccaaactacttagcgttcccaaacccgccacatctcttgcttctatgccttcacatacatgcttcgctccacttagaatgcctttccctgcttcctagaaagtgtccttttttttctttcttttttttttttttgagatggagtctcgctcttgtcgcccaggctggagtgcagtggtacaacctcagctcactgcaacctccgcctcctgccttcaagtggttctcctgcctcagcctcctgagtagctggaatttcaggcgcctgccaccaggcctggctaatttttgtgtattttttagtagagacagggtttcaccatgttggccagtctggtctcgaactcctgacctcaggtgatccaccgacctcagcctcctaaagtgctgggattacaggcatgagccaccttacgcggcctagaaagtgacctttaatgctcaattaagtgtcatttttgcatcacctttaagaattagcctccatactgagttaaggtgcccccgcaccccagtgctttcataaccctctgggtttatctctatgggaacactcaccacatatataattgctcatctatatgtctgtcttttccatcagactgagtgttttgcaggaaccccagggccatgaagatgccatttggtaggatttggggctaagtggtctatatcagatatttgagcatcctcaaatatttggcaaacatccattcactgtttgccaaactgaacaaaagaaactcaggaagggggagaggggtatgatagaacctgggacaagagctgaacaactgtctttgagcatgttcattcatgtagtcagtcagcatttattgagggcctgccatggtcatttacaaatgtggtccaggtaaataaaaacacagttgaagtttcctatcactgctgtgtttggcctctgggacagtttcatcatctataatagtctgctttgtctctagtgcactcttatgatggacatttaatccaaaatctctcaatagtgctctcacaacagtggtttgcacacagtaactgtttaggaaagattattaaaagaatgctcatgaatctacatataagtatgtaccttcctgatactttgggcactttcccaccttgtccattaaatgttgagacagaaacagtgctgaacaccttacatgtgttatctctttcagtctttacagcaatcctatgagataggaactcttattgctccaattttatagaggttcagcaacttacataaggtcacacaggtactaattggaacatttaaactcatggctttggagtcaggtgtgaacctgaagtcattagagtatacctggaacacaggctttcaataaatatttatggactcagtgatactgttcccaagggaaatggaaaggctttctaattcttattgtcctctccacttgactctggttcccttggcctctcttcctttcccacgtcatcccattcacactaacattcattcaacaaaggtagagggccaactgagtaccagataacgggccagatgctggagatacagagatgacaaaacatggcccatgctgagaggagcttatagttttgcgatgcagataagcatataattacaattgtgggagcaagaggagggagtgatttactgcctaggagacctgactgttccttgtgctgagccagggggcaaggtttgagggttgaggggggtatgaaagatgctgacatcctcggggaatggttaaagcactgggtggggcccaggagagtgtcacaggtagaatgagaggacaaggcagggaccagatcagttaggaccttagtgttggagccttttaaacagtgaattctgccatttcctttcaaggatgggtactaataggctgggtcatatctgtactttggctcagacctcttacctaaactctaggactaaactttcacatagctatatcccaccatttgtggagttatttatttatttatttatttatttagagacaaggtttctatcactcagactggagtgcagtggcgcagtcttggcttactgcaacctccacttcctgggctcaagtcatcctcccacctcagcctccagagtagctgggactataggcatgcatcaccatgcccagctgattttttgtattttttgtagagccggggtctcacgatgttgcccaggctcgaacttgtgagctcaagtgatctgcctgcctcagccttacaaagtgctaggattacaggtgtgagcctccatccccagcctatcctaccatttatgaacatcttttttttttttttttttttttctggagacgagtcttgctctgttgcccaggctgtagtgcagtggcatgatctcggcttactgcaccctctgcctcccaggttcaagcaattctcctgcctcagcctcccaagtagctgggacaacaggcgcacaccaccatgcccagctaatttttttttaaatgtattttagtagagatggggtttcactgtgttgcccaggctggtctccgaattcccttttttttttttttttgagacggagtcttgccctgcactccaggctggagtgcagtggcttgatctcggctcactgcaacctccgcctcccaggttcaagcaattcttctgcctcagcctcccgagtagctgggattacaggcttgcgccaccatgcctggctaatttttgtattttcagtagagacggggtttcaccatgttggccaggctgttctcaaactcctgacctcaggtgatctgcccgcctcagcctcccaaagtgctgggattacaggcgtgagccaacgcacccggccttttttttttttttttttttttttttgagacagagtcttgctctattgctcaggctggagtgcagtggtgcgatctcggctcactgcaagctctgcctcccgggttcacaccattctgtctcagtctcccgagtagctgggactacagacgcccgccaccacgcccggctaattttttgtatttttagtagagatggggtttcaccgtgttagccaggatggtctcgatctcctgacctcgtgatccgcctgccttggcctcccaaagtgctgggattacaggcgtgagccaccgcgcccggcctttttttaaaaaaatgtgtttattttccttgcggagcagggctgccccataagcagtgtgcccagagtagcccaaattccctaattctgtccgcacttacaccatccaatcatacaagcagttgttagatcgttgtgtgctactgttccaggggccgctggaggtagaaattccatttcactaaaatctagtctgtcctttgcccccactagttgagtccagttagtgagtgtggaggtgggggctggaggtgtagaagagataaataaatatatagagagccagtccagctgtctggaggacattgtccgcctcctccaatcccatcagttgccacatcttctttggtcaggctggctttctcacctggtctcctttctgtgccctcctcacactggctgccaaagtgattcagccagatagactgcaagccccgtgagtgcacggacggtgggtggtccataaacgtctgatgaactaatgatacaagcttgaatatagtctcctaaaaaaatctttagtttctcctctgcttctagaataaaaatcagatcgccccatttggccttcaagacctactacattcagccacagtcagcttcatttcccttttttcctttcactacctcgaaggccagattagccagtgattcactatgcttgccccgggccacttgtatcctctcacctccgttccaggcagccctcgcagcagatcctaacgcttagggctcctccaagtgtacaggctcgtgaggcttccctcccgctaagaccagtgcgccctcagcacacgcagtgtggtctcgcccgccgctctgcgctcgccctgcaggagagggagctctttgaaggcaaggccgaacctcccccgagccctgagctgggcctgccgccacagatgtgcagtcctgccggggagcagtcacccggggacagggccgggccccgggctgcacgtcgggaagagacagcgtgctcctgaggtggccaggccgctgcaactggccagggcgggcccgggcggcgagggaaggggtgggaagcccgggccgcggcgcttcctgctgggacccggcggcacgcccctgcccccgccccggccgagcctgcgctgccggcctccggccctgccggccgcccaatcagcgggcgccccccgcgcggcccgcccctccccctctggtgacagaaagtcggcccagcagatgaggaagtggcaggcaggcaggctggccccggggacttctctctggccctgctccctccgagcgctccgccgttgcccgcctggcccctacgggtgagtctggaccttccacggactctccacgtgccggcgccccctgcctggccagcccggcccagcccggcccagccctgccctgccctgcccaggctgtgggcgagggtgttcccggggccagtgggtgggaggtcccagctccctggggccgggcctcgccagcaccctccctcccccacacccccgtctctggcccccatttgcctacacccgggccttcctccaccacccctgcatttacctctctccctcctcctctcccctccctccccccgctaccctaactttgccaggcaccttttcccttccatccatcttaaaggaaggaagggacgggctgagttccccgacgagagacacacccagattttcctgcagcttggggagaggtcctcccaggagccttggtccctcctggcctgccgggtgtgtgggttgatattgggggctggtggttgagagataacaggctggctggctcccatgtgtcagggaggaacctgtgttggcgccctcgccccggcctgggccctgccggcgatgggcggccagcaagcccgatggtgggggagcaagtaaggaggggatccgagcgtggccaggcagcgcgcacacgtgtgtgagtggccccgcgggtgagcccgtgcgtgtgcctgggcggtggccgagctgcgtgagggccgggagccatgcgtgtcagcccacggaggtgttgcgtggtgtgtcaggcaggagacgtgtgtgccagccctcggcgtggcaccttcgctgttgggggtggagagctaggtgagaggtgggtgtggaccgcaggcttggggcctgaccacggtgggcctaaagaagccgggcctcctggaggtgaggggtgtgcggggcagggaggtgtcagaggtgcgcctcttcacttggcatctgcagaggtgcttctctggaagcagggagtctggggcacctgctgccctgggccctgctctgttccaagaatgccttgtccctcagggactgtcagtaccatgctctcctgggtctggccagaggcttttgtgtccctgggagccttcccccgacattccttcaggccctgagggggagggggcctagcccaacggggcccctccctgagggaggggaagattcctgcgacctcccccactccccaaccccttcacatgccactggcttccctgcccttcccaggaagggaagagtgattgtacccattctgaagtaggacaaactgagcagttatggccggcttaggagaggatgctgggtgtggattttcagcagtgctttgggccagggctggggctggggctggggtcagaggaggtttctggctcagaatctaggaccttagctcatcaggctggtcccacgtgggtgggtgggtggcgagtctggggctttacttggctttccca

SEQ ID NO: 4274 - DNA, 6000 bp, Homo sapiens
tgctctgccggtcggcccggccagcctgtctatggatgggaatgctgccttgggactcctgttcccagcaccaggatgtgcctaaagatagctggggctcgctctcctccccgctctctgccctttggcttttgcccactgttgctgcgtttgaggcccatagcatctgtcccatgggcacccccagtggttgcttggagattctattcctgcttccttttcagttctgctgatgaccttggagtactccactctattcttgggttccagtttgggactgaagccacctccattcagtgcttgtctctagacacagcctctgaggtgcatagggcagctggtccctgctgagccccgtctcttctaacacaggcagcccagtcagcacatttgtgtcttctgtgtcttcctatggctagtaactaaggaagcttcattctgacagggttcttctttggataccctggtagatcagaagagaggatgttaaggggcgtgtgtgtgagccatgcacttggaccatcccagttctccgtggcttctgctgctctatttgtgccctggcatgcatggagcaggcactggcccctaccatgggatcctcacttctatccccctttacccaggtttgggtgtgaggacactggccctccaagtctcttcagtgtcggcagacaccctgtgttatccttggagcttctgctggatgctacagccagtgccccatgggtaacaagcagcttaccagcacgtgcccaggcccacatgcctgctgcacgtgtccctccctcactccagcccagatggtctctgccaggccagctcagctgcctccctcacgcctcagcagctcctaggacagggctgtgcgagaacccagctggccagggtgcctccaagcctgggagcagctgggatgcttgggggcactagggggtgggtggggtggtcctcccgtggagacctagggcctcatacacgtgcggagcagggccacctaggtctcaaaggacaaggggctggaggagagggacccaggacaggaggcaagagagcccccactagctcagttttaatcctccacccaccaatgtcacaccatttcccaggctggccacctcagtcccctccctagtgccactgcccactcatgcagagtcttgggcagttcaggccttggtgagctttgttgacctcttcccatgtctgagcacactgattgtttctgccactgggaagccttacaatgaacaggaacagactcatttggattagggttctgggtgccagagtgtccaaatccaaggaggccttgcaagcaccacaggccgccaggggctgccccaccctgacgcgttctcatatgtttttccctgagggtttgggcacctcctgtctgtagcatccgtcataggacctggcacatagtggggactcacccagcccaagtgttggcatgtagcaagagctcaactagtgcaggcttggtgcattattgggaggtcaccaagcacagggtttggcacaccttggacactcccttggtagagggcctgtccctgcctgggcactcacctaaccgaagtcttagcgtgtggcaaatgctcaactagtgcagacttggcacacattaaacactcccttagaagacagcctgtcaccctgtaggcattcatctagcacactgccaggtacacagtgggtgctcacccagctcagagctgggcgcacattgggtccttacctggcacagaattcgacatacccggggtactcccctagtacaggacctagcacaccacaggggctccccacctggggctgacacacaatgagtgctgtctcagcatcggacttggcacacaagaggcactctgctgatcagcatcggatttggcacacggtgggcactctgctgatgcaggttctcacacacagcaggtgcttccagcacaagatttgacatccagtaagtgctatcccggctcagggcctggcacacagtgggcattctccttagataaggcctagtacagtggaggtgctcttctagccaggacagcctaagcaatgaccttccgctgatcctagattagcagctaccccatcctccgtgaaatgggcaatatctagatccagaggaaaagttccagccttcctcagcttcctctctggtcgggggccctgccctccctccccctccccacttcctgtctagcccacctactcaaccctgtagcccggcctcccacacagcctccctgcagccctcccccatccccggcacttctcagtcccagctcagcgggaccttccctccagagtcacaggggacaacaaagaccctagcctccttgcccctctggaagcatgcccactcttattaggcaaagtcagaggcgggagctgggggagtcagcatccctaagtggggctagagcagctggatctcgctaatgaggcctcattacggccagggcccagctgggctgctgccgcctcctgtccccatggccagagccagggaaagccgtccagccatggctgcctgttctgggcacccggcccaggccagggcagccagagcccagagcccaccctcggtgcaagtgagcatttgggcatcatgggtgacgggaccttcctggagccagtggcccagccagcgccttggccctcagtctgcgcccatgggaagtcaggggagtgtgtctggggaccaggcgcatgaggctggctcagtgagcagctgagtcggtaggatctgaggccatccttaggacacttgcttgagccaaggcctgtccccatcttccccaaaccaacatggagataataatggacctacctcatgggacagctgggaggacccaatgagttaagatatgggaagttaacttgtaccatactaggtgagtgcccacagggtgatgggctgtctgtgaagcaagcgtcccatgtatgctgagccaggacagtgcctggcccacagcaagcacttactatgtattttctattaccattattactaatgctcactagattcaatgattggtgggtggtttccccgttttagagatggagaaactgagatccgacatgttaatggacttgcctaaggttatatatggtgagaaactgacaaagctagggtttgaacccaggactgtcaaactctaaaggctgtgactttttatcttattttaaaatttattttttattaattttttgaaacaaggtctcactttgtcacccagtttggagtgcagtggtgtgatcatagctcactacaacttccaacgtctgggctcaagcaaaactccctcctcagtctcctgagtagctgggactataggtacacaccaccacaccttgccagttttttgtagagacacggtctcactatgttgcccaggctggtcatgaactcctgacctcaagcgaccctcctgccttggcttcccaaagcactggcattacaggcctaagccactgtgccccacctgtctttttatttttatttattattattattattattattattattattattattattttagagagagagttttgctcttgctgcccaggctggaatgcaatggcgcgatctcggctcactgcaacctccacctcccgggttcaagcgattctcccgcctcagcctcccgagtagctgggattacaggcatgtgccaccacgcccagctaattttgtatttttagtagagatggggttggtctcaccatgttggtcaggttggtctcaaactcctgaccttgtgatctgccctcctcagcctcccaaagtgctgggattacaggcgtgagccaccgtacctggccctgtttttaaatttttaatgtcatcctgtgcttgacaaaactccttatgttccctacggggttgccacactcaccaaactcacaggaaagctgttcttacaccagaattcatgcacgtgtccatctgactgatatttcctgaggtcctgtggtaagccaggccttctgctgactgaccagtttccaaagggcctgacacattcctggcaccggaatgcatatgcccaccttccgagccactggtctgaggtatcttggggtcagcaggagactggccagtgtgtgtggcctcagagaaagggactggatgggtctgagtggcatcccactacagtagtggtgactatagtcatggtgacgacaccactggacctaccagcccacgccacgcacactcccagactagcacctcagcttctgggcatcacggtgcaaatcctcacgggttcttattccacagtccccctttgtctggactctgggatgacttgcccccttggctaatgccatctttgtccagacagctgacagcgtggttcactaggccagggctttcttgcatggtcagttgcattctcctaggaagacgccccatcaccctggcagtttgggagtccccatctctggttggtggggggtgtcaggtacagccctagggcttggtttctcccagcccgcacccctccgtggagcctgagctgctctggtggtgccctgtggactgtgccttccatcctcctgccggtcaccatccagggcccaatggggcagaccccgtcactcatcagacacccaactaccctagcaggagcccacccagtgctaggcctgtgggctcagacagcgtctggtcagctccgtggggggagtgagccaccctctcgcctgctctgccccagtctgtgtgtgtgtgtgtgtgtgtgtgtgtgtgtgtgtgtgtgttgttccagttacttgctgggaacaagggaaaaacacaacaaaccccacacaccccactccagctccggagcacccgtgctgggctgcatggggactggccggaggggcagggccaggggagcgggtaggcagagcttcgggaggagatgaggtgaaagtaattgacgctgcccagcccggcagtgggagaggcaggggatgcgtcagtgtcgcgctggagctggcagaggtgtgaatgagcggcggagacacgcgggctgcgatcgctcgccccaggatggccgcggctcatggacctgtggccccctcttccccagaacaggtcagtcaccttccaggaagttgagccccctccttggtgccaggcaggctgagaggctgggctgcggatggggagaggggctgagtggtctgtgccagggaggggcaggcacagccagcaagcaagacagacaccagccaaagtgacccagaaagttgcaactgtgcaaaggagtgtaggaagagttagctgtgtggtgggggtgagggggaggagagtgggggtgtgagggctcccccagcccaaggacctgctgagaatctgctctgtgtatcaaagctgcattgtcctagctcccggggagacgggccggaggtgcccaggaattgtactaatcaatacagcctcattgtctgtgccacggcagttactcctatgggaagagtgggtgagggggcaggggaacgtggtacatggtttcagtggcaaggggtgggggaaggggatggggcaagagtctcagctgggaagagagagaccccacagaacattttccagggtccagggcaagtgcccgcatgggctgggagccggtgtgtcctcatccctggacgccggggacgggtggagatgtcagcggatggcagcgagggtgaggagactcgaaagctacacttctcccctgtaggacatcctgacttgaccttcaaaaggcaagagagggaatgtcctctgaggcgatgtgggatgggtctgggaggaacagtacgcagggctgccctcaagcctcagtactgctagggtcaagaaccaaagccactttccagagtgcctgcctgctgctagccagtgagggtagacgccgcccccagccgctgcagcacaggacatgaccattgcctccagtcttccctcctgggcttgtctggggtgggaagcgaggagct

SEQ ID NO: 4275 - DNA, 6000 bp, Homo sapiens
aaattagcaactttttttttcagtcacatctccttgtgggcttacacatattcattcttccattcactgaacaggtgtcacggaacacccagtgtgtgcctggcaccatacacacaatgagcttgtgtctgctacaactctcaagcatttctcactgaagctgtcactgagcttccagttagctcagtgctcaacctcaatgcctccatcctaaatgcaggcctcagccgggcatggtggctcaagcctgtaatcctagcactttgagagaccgaggcgagtgaatcacttgaggttaggagtttgagaccagcctggccaacatggtgaaaccccatctctactagaaatacagaaattagctgggtggtagtggcgtgtgcctgtagtcccagccactcaggaggctgaggcaggagaatcgctcgagcctggtaggcggaggttgcggtgagccgagatcatgccactgcgctccagtctgggcgacagagtgagaccctgtctcaaaataaataaataaataaataaaataaataaatgcaggtctttacaatgcccactcccatggtctcttgtctcagccagcaccgcccccgcttatccccccaggcactgtttctgcagctttcatgagcagcctcttctttgtctttactctgaccccggacaaaagcccccagtgcacttgagggcagtatgcgccctctgatattttccacaccccgttttcatcccatcctctcctctctctgcatttctgccctttttcttaccttctccttctttgagctcccaaacagctgtaccctataagccagaaaagtctagttagagagaagctgagcctcaaccagccaagttagaggcaggtagaagggaccaaagatatgtgtttactggagtttccgggcttctctggtggtgaactgaaatctaaggtattcagccaggatgcctagacctaagcggaatacccaggcagcctcactcaccccagctttccagccccacaacactctcaggtgctatccaattgacccgtaattccctgacctgtggagccacacctacttctgcaagacccatctaagtttcctaatttcacagctccccacccccacctctgcttctaacctccaggtctgaaatgctgagctctgttcctatgatgtctggagctactagccctccttcccagaaaaatggtgggtccaggattgatttttcctcctatctgtgatccagactagtgcatccttcaccccttcatccagtccaggcccagggttttctttcctgcagctcttcctctaaagactaagctgcctctttaggaagaggtgagaacgcaaacattgtaacaggggcaaaattgctttcagtccctttgggcttcagtggtgttgactggccaggtgatggagctgtgggcatgtgggcttgtgatctgggttttctgacctggacgtcgccacaactttacaatgggtgatgctgggcaagtctatgccctctttaggtctgactcactagcctttctgcgcactgacgggggctggtctttagaaggccatgttttatttgagcttggaggttccacacagcaactccagcagtggtgcataatggccacaagagggcgggcaacctcttcagctcataagtgtgtagactgaacaagtgaacctcaaataagaatactatacagtgtcttccaagaagggtataattccatgaacaatgttgctgaagagaaaaaaaaaagaaataaaggctgggcatggtggctcaggcctgtaatctcagcactttgggacgctgaggtgggaggattgtttgagcccaggagtttgagaccagcctaggcaacatgacaaaaccctgtctctagaaaaaatacaaaaagtaacccgggcatggtgatgcgtgcctgtagtcgcagctacttaggaggctgaggaggatcacttcagcccagtaggcagaggctgcagtgacccgagatcgcaccactgcgctcccgcctgggcgacagagtgagaccctgtcttaaaaataaaacaacaggccaggcaggtggctcacacctgtaatcccagcactttggaaggctgagatgggcggatcacttgaggtcaggagttcaagaccaacctggtcaacatggcaaaacctcgtctctactaaaaatacaaaaattagccaggcatggtggtgcacgtctgtaataccagccatttaggaggctgagacaggagaatcgcttgaacccggaaggcagaggttgcagtgagccgagatcgcgtcactgcactccagcgtggatgacagagcgagactccatctcaaaaacaaaacaaaacacaaaacaaaacaaacaaacaaaaaaaaacaggaagggtaattaaccgagggcacactacaaaatgactacagagtagggactggaataggagattcaaattcccagtctgaggggaagtcaggagtcccaagaccataggagtggtatggagaggtcttgtgagcagtggaagaagctgagaatatactttggacatttcaatcatttgagggggtgggaggggaagagagggtgtttagggacaagccatggactgaatattgctccagaaggaccggggtgggagtttcaaaatgagacttgaggaatttagggaagcagagatgatcaatttggcttccttcccttccccaacacagaatacaaaatagagaaatggcacgagttattccaggatttgaggaggacgcctcttttgcaggaggatgcagtgaacagccaaagtcatctgacatccttttccatctttttccttctagtatcccagtttcaaggcccaggaaaggcagggactaacatatggagcagttaccccagagttcaaagggttaatctctaagaattcattctctgacaccagccacagctcttgtccccatctctgggaccgtcccctctgagccccaggttggcagcttccctgaattccttctatgatataatttgtaattcggcagggctctgggacccaggctcagagacccaggctctgctctctcctcagtttccgggagtcagggcttgctctaagggaggaagtaaacaggcctttcccttgctccctctccttttccaggatggggccccgggaccaaagagcttctgtctttccctgccacgcccccacgctgcagcctagacaaggagattccttgtgtcccgacctcaggcaggcatccttgtgaccaaatggtggaaggctggggacagggtgggggaagggcagtcacaaagtcagaaaggatgacacctcccctatccaagattctggtacacccccagagctctgagaccttgaggttctctctccctggctcccatcaacaaagggcagaggaggccaggactcatttgcatataaaaggcctggagaaactgaaaaggcatggacacacagaagctgaacctcctggaagggagatatggagtcagaatacaggaatagggccagacacagcagctcatgcctgtaatctcagtaatttaagaggctgaggcggaaggactgcttgagcccaggagttcaagtgcaccctaggcaacatggtgaaaccctgtctctggaaaaaaatacaaaaattagccaggcatggtgatgcatgcctgtagtcttagctccttgggaggctgaggaaggaggatcatttgagtccaggaggtcgagcctgcagtgagcactactgcactccagcctgggcaacagagggagaccctgtcaccctatctcaaaaaaaacaacaaaacaaaacaaaaaaatggaatacaggaataggggcaacacagggacagggtaagacaggggaccatggcagggtgagccaaacagacttgagagaaataaatggaggcccctgaaagcttctctccctaaaagcagtcaggagtgctggcccagacagggatgcagggatggagccacagaggaagtgagatcccctaggataaaatgagaacactctatttaaaaagtaagacctgaaaagaagcacaaacatctgacaatgagaaactttcctgccaggaggagtgacatgttactgttcacaagaagtaatggtatggacgataaataatgtgatctcacttagcagcaggggctcagatgcccctatatgacctactaccatccaaggacccgtacaaagggctacccatcctggcaggaaatgacatcactcagcaggtaggaaggggtgggtctaccagcccaaacgcttctgggagggccaatccatagagggttagtcctgaaggtccatgtccctcctcaatcctccatcttggccaagagagaggccaaggcttctagactttgggtgaagtaattatgcccccatctcttcatctgttaactccagggagtcctaaattccttaaatccttacttagctggggggagtagtgagagatactaaataccaaaagccataggtcaatcctttagagtcaatatctctatagaagtatctctaggggctgggcataatcccagcactttgggaggctgaggcgggaggatcccttgagcccaggagtttgagaccagcctgggcaacacagggaaaccctatctctacaaaaaaaaaataaataaataaacaattagctgggcatggtggtgcatgcctgtggtcctaactatgggggaggctgaaataggaggatcgcttgagcccaggaggtcaaggctgcagtgagctgtgatcatgccactgctctctatcttgggtaacagcataagaccctgtctcaaaaaaagaaagaaagaaagaaagagcaagctagctctagggacccaataattgagggataaaggcagagactccctagggactagagaaatgatgagccaggtttccatggtaactgatttcagtgcagcctcttcctagtctcagactgagggagaatcaattttgggggagaccacatctaatggataaaagagccacaggattacaaaagggtggaatagttgttacaagaaggtcacatcatcctggcactgctcccagaaccagtgggcctcgaagcccagcttggcactctcatcctctggtgactcaggtggtccaccttgaagcctctcccctgggggcttccacacagctctcaagctccctagcctggtggctgccacatccacctcagtcctggccctctctccaccagctataacttttgcccagtccatctcggaacgtggagccccaggtgggccctgttcatccagctcgctgggggccactgtgtccaggaagctgccaatagagacactgtccagccggtcggtggtgctggtgtctggcaggctgtcccagctgcctcgccttgagcggcctgggctcccgcctgtcaggctatattgactgctggtgaggctgctgcaatgactggtcaacgtcccccgctcctccaacagccagcgcactgcctcgatgccctcattcaaggtcaccagctgctgcaggatcttcacatcgatggctcgcaggtaagcctgggggagtgggagaaggaattagtcccagttctggggcatgggtttccccagcgtttccacaggccactaccttgtggttcagccaaccatgtttcactttaagacggatggaattataacggcttgcagtgtaggcttcagaagcagacagactgctgcctaacatttcagctctaccactgattagacatatcttctttgagcctcagtctctttgtttgtaaaacaggattaaatcacttacctcacagggtagctgtgaggattctgaaatgctgtctattaagtactcagcacagtgcctagcacagaggaaggtctcagtaaatgttaagtattaaaatccaatcctattaagctttgaacttcatatttagggtacttctttttttttttttttgaaatggag

SEQ ID NO: 4276 - DNA, 6000 bp, Homo sapiens
acttgggagaggaagtgaaagcctgaagcattagtatctaggaggcagggatcagaggaagtcgattcagaagtaaggaggattttggggctacactttcaggaaagtcgtagtcaggacccaggaggtatggatcagtaggaaaggtaggggcacacgcatcggcctgttgtggggtggggggagggtggtgggatagcattaggagatatacttaatgtaaatgatgagttaatgggtgaagcactccaacatggcacatgtatacatatgtaacacacctgcgagttgtgcacatgtatcctagaacttaacgtataatataaaaaaaaaagaatgaaatcatgtcctcttcagcaacatggatacagctggaagccattaccctaagccgattaacacagtaacagaaagccaaatactgcatgttatcacttataactgggacctaaacattggatacacatagacacaaagatgggaatggcagacactgaggactccaaaaagggatgtgatggagggagggggaaaggatggaaaagctacctattaggtactgtgttcactacctgggctaggagcccaaacttcagcatcatgcgatatactcatgtaacaaacctgcacatgtaccctctgaatcaaaaatttaacaaataatattttacaaaaagagaaaaaaagaaataaagccatgcacctacagccatctgatcctcaacaatgttgacaaaaataagcaatgggaaaaggactccctatacaataaatagtactgggaaaactgggtgaccatatgcaaaagaatgcaactggaccctgacttttcaccatataacaattaagttaagatggattaaaggggccgggcacggtggctcacgcttgtaatcccagcactttgggaggccgaggtgggcagatcacgaggttagaaggtcgagaccatcctggctaatatggtgaaaccccatctctactaaaaatacaaaaaattagctgggcgtggtggtgggcacctgtagtcccagctactcaggagggtgaggcaggagaatggcatgaacctgggaggctgagcttgcagtgagccaacatcaaaaaaaaaaaaaaaaaaagacaagatcgattaaaggtttaaatgtaagacctgaaactataagaatcctagatgaaaacctaggaaacatgatgatttacatcagccttgagaaagaatttataactaagtcctcaaaagcaattgcaaaaaagtaaaaattcacaagtgggacttaattaaactgcttctgtacagcaaaagaaacttgagcaaagtaaacagacaacctacagaatggaagaaaatattcataaactatgcatctgacaaaggtctaatatccagaatccctaaagaaattaaacaattcatttttttattatacttcaagttcggagatacatgtgcagaaagtgcaggtttgttacattggtatacatgtgccatggtggtttgctgcacccatcaacccgtcatctacattaggtatttctcctaatgctatccctcccctaaccccccatgccagataggtccctgtgtgtgatgttcccctccctgtgtccatgtgttctcattgttccactcccacttatgagtgagaacaagtggtgtttggttttctgttcttgtgttagtttgctgagaatgatggtttccagcttcatccatgtccctgcaaaggacatgacctcatcctcttttatggctgtatagtgttccatggtgtatacgtgccacagtttctttatctaatctatcattgatgggcatttgggttggctccaagtcttctattgtgaacagtgctgcaatgaacatacatgtgcatgtgtctttatagtagaatgatttataatcctttgggtatatacccagtaatgggattgctgggtcaaatggtatttctggttctagaccttcgaggaattgccacactgccttccacaatggttgaattaatttgcactcccaccaacagtgtaaaagcattcctatttctccacatcctctccagcatctgtggtttcctgactttttaatgattgccattctaactggcatgagatggtatctcattgcggttttggtttgcatttctctaatgaccagtgatgatgagctttttttgctgtttttttggctgcataaatgtcttcttttgagaagtgtctgtgcatatcctttgcccactttttgatggggttgtttttttcttgtgaatttgtttaggttctttgtagattctcgatattagccctttgtcagatggatagatcgcaaaaattttctcccattctgtaggttgccttttcactctgatgatagtttcttttgctctgcagaaactctttagcttaatcagattccatttgtcaactttggcttttgttgccattgcttttgacgttttggacatgaagtccttgcccctgcctatgtcctgaatggtattgcctaggttttcttccaggctttttatggttttacatcttaagtttaagtttttaatccatcttgaaataatttttgtgtaaggtttaaggaagggtccagtttcagttttctgcatatggctagccagttttcccaacaccatatattaaatagggaaccctttccccattgcttgtttttgtcaggtttatcaaagatcagataattgtagataagtggtgttatttctgaggcctctgttctgttccattggtctgtatatctgttttggtaccagcaccatgctgttttgggtactgtagccttgtagtgtagtttgaagtcaggtagcatgatgcctccagctttgttctttctgcttaggattgccttggcaatgggggctctttttttattccatatgaaatttaaagtagttttttctaattctgtgaagaaagtcaatggtagcttgatgggaatagcattgaatctataaattactttgggcagtacggccatttttactatattgtttcttcctatccatgagcatggaatttttttccatttctttgtgtcctctttcattttgttgagcagtggcttgtagttctccttgtagaggtccttcacatcccttgtaagcagtattcctaggtattttattttctttgtagcaattgtgaatgggagttcactcatgatttggctttctgtttctctattattggtgtgtaggaatgcttgtgatttttgcacattgattttgtatcctgagactttgctgaagttgcttatcagcttagggagattttggactgagatgatggggttttctaaatatacagtcatgtcatctgcaaacagagacaatttgacttcctctcttcctatttgaataccctttacttctttctcttacctggccagaacttccaatacaagcgaaaaacaaacaaccccattaaagacacagacacttctctaaagaagacatatgagcagccaaaaaatatttttaaaaatgctcaacatcactaatgagaaatgtgaatcaaaaccacatctcacacaagtcagaatggctattattaaaaagtttcaaagcaacatatgctggctaagctgcagaaaaaaaacataatgtgtatacattgtttgtggaaatgtaaattagttccgccactgtggaaagcagtttggagatttctcaaagaacttaaaatagaactactatttgacccagcaatcccaatattagctatatatcaaaaagaaaataagttgctctaccaaaaagacacctctactcatacattcatcacagcactattcgcaatagcaaagacatggcatcaaccttggtgcccatcaatggtggactggataaagaaaatgtgatacatatacacagtggaatactagacagctataaaaaaataaagaaatcatgttctttgcagcaacatggatgaattgggaggcaataatcctaagcaaattaacacagcaacagaaaaccaaataccgcatgttctcacttataagtgggaactacattttggatacttatggacataaatatgggaacaatagacactggggactactaaaggggtaggtacagatatgagtaagcattggaaatttgactaatatataccatactcactacctgagtggcagaatcatttgtatccaaaccctcagcatcacacaatacaccagtgtaaaaaacctgcatacgtacctgaatctaaaataaaagttgaaattataaaaagaggaaaaaaagaatgctcatgcacagatatgcatgtaaaaatgccagggagggttaattcatagcaacagttgctatttaacctactttacttgaggttggcaaagcaatcattttttaaatattaatttctgtttagtacagattgtccttggtcaggactcctaaacagagtgcaaagttctgattgtgtaattacatactattgtagggtgaaagagaattggtaaacaggctcctgctgtgactatagtactagactgaagtaggactaaaattgctctaggacttactctggtagaaaaggtagacctatcaataggggaaaaagtcatacctaacatgatgtagaatttttttaaattgtcatgtatatgaattgagaaaaaaaatcatgctatgcatattatgagaccagtttccccaatggaataaaataaagtacttgaacagctgctatattagcatctgtttgtccatatcatcatccagttactagaaagacataattcccactcttcactcaatatatagatggaagtggtttttatggtaaataaaattagatttgcaataagacaaaagtaatgattcagggcttggttaatgttaagtttaaatgtacatatcatgttgagaattttctttgaacacataacaaaaaaaaagtgctactgaatgaacattattgcaatgtagtaaagcagaatgcaaattccttgaggtcagcattcaagtctgttttcctcgcagcggtgcccacacacctagcatactgcctggcacacagtaaatgctcattaaatatttgtgaggtacatggacaggggaatgtggtagacagctgatgaagcttttctcccactgttgccctaggtggatcatccatagtcaattgattctgaactctgaggtccaagttctgccctcctccttcactctccccacaagtgggcgggacaatcctccctggatttgagcacagggggacgggggtggtcagagagaggtaggggcactcagagatccagcaggtgctgcaccatgagtgtctctgtgctgagccccagcagactcctgggtgatgtctctggaatcctccaagcggcctccctgctcattctgcttctgctgctgatcaaggcagttcagctctacctgcacaggcagtggctgctcaaagccctccagcagttcccgtgccctccctcccactggctcttcgggcacatccaggaggtagggaggaactcaatgggggagtgggagggcaaagagggatggggctctgagaccctggtcacaaaatccatagagcaaagccttgttttgtaacaaatgtgaggactcaaaggaacacccagcctacctctctggtctcagcttttcccagtcatgaggagctcacttctcccatgaagcccatcctgctggtcctcagctctatcacccgtgccctccttctgcagatatcaagtgtgtcttggcagtcctgcatgtggagggcaatgcctgattgtctccagactgattaccccataagccttggctttcatcaaagaacaaggcttctagatgctctctgcccagtcactcaatgccatcactctgcctggccctgtgtttgccagggagcacagacacccatctgaggaatccatgccatgaggagtttatggtctgtgaagaatacaggcaggaatttgagaaggtgtcagactgcaggaaagga

SEQ ID NO: 4277 - DNA, 6000 bp, Homo sapiens
cctgggggtggaatctggcacccctgagcagacccctccctggctcttgtccccctgtgctgacactctctgtcccaggctctctctgcctccagaccagagctcctccagggaaaaggtggagtcttgttcgtctgtgtccctcacctagcataaggcctgccagagcaggctgggcgaggtgaacacagaaggtcctctggccctggtactggagaggcatcatcactggggacagagtgagaaccaggatgatgctgtttgttactggaggagctcccattggatggaggagccaacaacgacaggccagtgtgatcagggagattgggacacacagtgccgtgggggcccagaggagcagggaggatctctgtggaggaggcgagaagtcttcccagaggaggaggcatttgaggtgaggcccaaacggtaaacagaagccaacccatgcgggagtgttctaggcagagggcatggcctagcagaggtcacagcctggcaaagttctgaagctccagttcctggggggcagtgtgaaagagtaggctgctggggctcccatggctctggagaccaacatgggacttgggagtggcagggtgccatattgacagcaggtgaaatatcacctacatctgtctcatggggaattcattacattttgggttgggtttgggagttttctttggaaactcagggtaggcagggtctgtaagcttgagtcagcccaggatggagaggcagggtaggggagaaccaaagtcacctgggtggccgaagctttaccaggacctcagtgtccatttggtgtcttgtgtgtttcaaggactgagctttctccctttgcccctcacagaaattaaccagtttatgtgccctgaaaaattcccacttccaccctctgggttcgcatgctggctcagtcacttactagctgtgtgacctctctgctgcttagcttactcatctgtaaaatgggataaacacaaaacctgcctgatggagatgtcgtaaggatcaaagaggaaaaagaatttaaaacatttagaatggtgcctgacccccagcaagtatacaataaatattggctattgttgttattttatgtggttttcttttaactttttcaagtaaatataacttacctcatgcttgttatgtgtcaggccttgtatttatcctctgaagacaaagatgaggaagacatagtcctcctaggggtacaaatccttcaataaaggcagaaacaagcattggtcaaatgtgccctgtgccaagaatccaggaatgcaggagagcgggctcctgtcctccagcagctcacagagtgacgagggagacagttgcataagcagactgtggcaacacagggtggtcagggctgcggcaaagggaagcccagggactgcaggagcccggggaagtggcccaaagtgggtggaggctgagaggagccagaaggacctctgctgaggggactgttgagagacaaggatttgcccactttggcaactggcatccttctcccttggggaggtcgggggatgcctgggctcagtcttgattctgggtattggaaagccatcagggttttgtgaacagggaattatgtttgaataatagtaacaataactaacatttctcatgcagctactatatactgtatgctgtgcgtacacaatctcatctcatatcctcaccacaatgctgtgaggtgagtactatcacctttctcatttttcacatttagagccacagagattgagttgcccaagttcacataactagaaagggaaggaacagactcagacccaggcagtctcacccacaggcccatgctctccatttctctcttttttccttccttccttccttccttccttccttcctttctttctttttctttctttctttttttttttttgagacagagtctggtcctgtggcccaggctggagtgcagtggcgcgatctcggctcactgcaacctccgcctcccgggttcacgccattctcttgcctcagcttcctgagtagctgggactacaggtgcccgacaccatgcccggctaattttttgtattttagtagagacagggtttcaccgtgttagccaggatggtctcaatctcctgacctcatgatccgcccgcctcggcctcccaaagtgctgggattacaggtgcgagccaccacgcccggcctcttttcctttcttttcttttcttcatctgctgcctctagacttcggcccacatactaatcttacagttggaatgaacctcagaaattccttatctcttccatttcccagataagaaagtgagactgggagataggattgactttcctaagaccacagagtggaggaggaggagggactgagttggataggtcagtttgggcagcaagacgggcttctatctttatcccacagtcccaggcaccattgtgcttgacacagaatccaaactcccagctgtggcctacaaagccctggtgatcagggccttgccaactccctccagcctcacctgaggcacccactccttccctgtcatcaggccccggcccaccttgattgccattccctttgccaagaatgcccttccgcctgatcttcatgggtcaggatccatcttgccattcagtgaaatgtcacctcctctgtgaggccttgcctgatcacctctacagttacccccattgctctcacctgggtctgttttgttttttccatagaagttatgatgacctgaaataatcttttgttttcctgcttttgtgtgtatctcttccaactaagacataactgcaggagagcagggaggaaccttatctgtttccactgtatccttgagccttgaagggcgtttggcacatataggtgaaaggacgcctgcatttcgttgtctgtgtgctaatggtctgtctccccacaggtcagggacctctccggggctggcaccatgcctgattcaccttggtacccgcaggcccagcacagggttggcacagaacagggcctgaaatgcttgctgaatgactgaatgaacaagggacaggaggggtgatgatggcaggagcaccgtgccgggctctctggggatctaagtccctttctggtggggtggccacagatattgccgctgggctgccctttgggggactacggctcaggaggctgctgaggagacagggtggtttccaggccaagggctaacagcacctgcccatccgcgagggaggtgaaggggcaagaggggagggagggtggacctaacactggctcttggcacctgcaggccggttgttttgagtggccaatgccctggaatctcattctctaaagaaggttgtgtgggttggacccggctcacaagtctgaggctgaaatcgaatcccagctcgctctccgcacccattctccccagtgtgggtgaggcgggctgcagccctccagaggaagaggtgccttctccttcctgcagaagacagcaggggcggacagcgcgggcctaggtgcgcggcccctagcggcagggatggcatcccttccgtgccctccccttcccccccgcccggcccgccccacagacctcgtctttctccatcacagcgaggattccttgtcttccctgcgggccccccctggttgcccctctgactaggggcctggagcgtacttaacgacgatgaatagtctgtgcaccaggcccaatccacctgcctcacgtccccatgatcacatgagcgtgcaacatgcacagatgcacatggcacggaaaccaaaccagccacagggatttataatatcccagccggagcccatgacaggtgcaggggtccagccctgcgcccccagcttctccctgctcatccacatcttgggatctcacccctatccctccctcccccgccccacgcgcacactgcacaggcctgttcgtcctgtaacatcatttcccctcccgcccaggctcactcctagacatccctcagcctctgatccgcctgtcacctcctccaggaagcctctgctgcttcctctggacctgctacctccgtggtgaggggctcgcctggcccatccctgcgtctgcagagcccagcactcaggcgagcccagagcagggccgtggagcgcccgctgagagaagagtggacgaaagacaggagggaggagggcgaggaggcggcggcagggggagcgtggggcggaggcggcagcgggagggagcgcgcgcgctggcggcggccgcccagggccggggccgcgcgcccagcctgagcccgccccgccgccgagcgtcaccgaacctgcttgaaatgcagccgaggagccggggcgggcggcagcggcggcggcggcggcggcgggggcagcggcaaccccggcgccgcggcaaggactcggagggctgagacgcggcggcggcggcgcggggagcgcggggcgcggcggccggagccccgggcccgccatgggcctccccgagccgggccctctccggcttctggcgctgctgctgctgctgctgctgctgctgctgctgcagctccagcatcttgcggcggcagcggctgatccgctgctcggcggccaaggtgcgtgcagccggtctctgactcggctctgctccgccctagccaccaacaaagcgcggccgggaggccggagcggggaggggtccagaacccggggctatcgggggctcccgggcggacaggctccacgcgaagcggctattcctgaatttgccctcggccccccgcccccgcgggcctcggtgttgagggctctgccctctgggcagcggatcttgggggaggggtgcaggggggcttggccagcggggaactttgccggaggggcggccattcatggttccggatgagctgtgtgattctcgccgttggggtttatttgacacgcgcgctccgcggcggtaatgagcagagccgggcggcttctccgcttgacaatgcgtttccgcagacccctgcgcgcggcggagagagagggggctgcctgccagggtgatgtgcctgcggctcccactgcgcctggcgcgcgggcgcggggactccctatgggctgtatctgagcagatctctgactatgggtcgcgtgtgcgggtgagtgcgtctgaatggagggtatacccaggtcgtgtgacactttaagtaggtgcctggtctcgccgtgccaccgagcggcccgacatccacggaacccctgccatcgtgccctccctttggatggagtgtgcctgaagcccccggggtctccataatcgccccctttcctcctccccagcgggtccttccgggtggcccggactgcatggtggggagtggggccgagtccgctgatccagctcacgctccctccccctcgcagggccggccaaggattgcgaaaaggaccaattccagtgccggaacgagcgctgcatcccctctgtgtggagatgcgacgaggacgatgactgcttagaccacagcgacgaggacgactgccgtgagtggcgggccagggagctcagacccggggagagaaaaggaacggtggggggcaccatgcttggcgcgcacgtggctgcagccgccgcgctgccacctgcgcgggacttgccgccggagcctgcgaccgggaaaccgcctgggcaccgcctccctcggggccgggtggctcttagcgacccggagcgggcaggaaagctggcgtgtcctggtggggccggggcggagccccgggcagtgtgccggaggaggaaggcgcaccatgctggggagactgaaccggagctgtgggcggggacgcggcagtccctgcaaaggtctagcttcccgaaacacggccctctcggactcttgcctcggccccgcgggacgcgcgcgtgtttcaaagttccacgcagctccgggccgcactgcgctccttttcctgctcagtttttgtgaatgaatgggctccccagggcccctgattgg

SEQ ID NO: 4278 - DNA, 6000 bp, Homo sapiens
acacctaccctaaggtagggcccgtccggagcgggctgcgacccttcccttgcagcccatttctcggctccccacacgtatgtcggctctggcaacctggctgttaaatcggcccttcaatcgctgtctcccatctgtgtagctcctgttttcctccctaatcctgcctgcaccccatttctgctgtcattaccggaagtttgtcctgcactaccctgtgataggctgggggacacaaagatgagaaagacgcgatccctttcctctgggagcttgccgggctgcaggggagtcgagcactcggaggaggataggggaggatatggatgattaatgcggggtcctcacctaagggagcgtaaggggggattgtagaaagggaggcgcagatacgcgagtccacaaatgattgattgataacccttgtttactaagcgcctctcggggccaggagcgcagtcttcggggagtcagacaagtagacgattccactgtggtataaaaagcgtcacgaaggcagctcagggagtagcgagacgctcaggaatgctgtctgcctatgttgagttactgtgtccaagacgctgccaagagggactgggttagagaagaggcaattaggtgtctgcctaccagaaactgaccactcagtgcagaaaacggggaattcgtggagtgggtgaagaaatgagactgtggacaggagggggttcgcagcttacagagaggaatggccctcctctctatgcttcccccctttcttttaattacatacctaaccctcttcacgttggtttttcagcctaagaactctgtttactcaacattctaaattgcttgatgattcccaccacacctttcccatgtatgatttgagtatatgccctcccccacgttgttttatgagagcttttgttgatgttgctggtggtttcctcttcgtttttccttcatctcctctatgctatttgcttaaccattgtggctggacctccttgctctctaaaactggagtggctacggagacagttccagtgaagcttaggatgttccatattggcgagtattttcaggtctttgaaatgaaaagttctaagtgccggcacttctcagattttgttacggctggattttaaactgcatggagattatcaattttcaaaaaaaagtgtgggagaagggactgtactaaatttttccagagatttatgtaacaatcgagaaagaagtgagaagttttaacttcagacttaaatcaatgaatactgcttctaaccacgttatttttctccacctcttgtaaacttctcatcattaagaggattgtatgaagaagctcattaatattgatttggcctggaattgggttgagacttactttctattgttctagggtttgtttccttttttgggattttctcggcaattttgtggtataaaccagaatgttgggaaaataatcaaataatttgaaaggataccttcctggaagttgtaggtactttaataatgtccactattttctaacaattggtgttatatctataaactatttttacttatttattaaagcttttctcacaaagaactccaaatcatctggctccctataggtcctggacttgaaatttatatagactccactgttagccagagtgatgggagatttatcataccattatccctaattctcacaacaaccctgtaaagtagggttttaaaattaaggaaattgaggctctgaaaggttaagtgacttgcctaaggtcacatacccaagaaatagtggagcaggaattcagcttaaaactggctacactatgctgcctcctattaataaacttgcattaaacatattcggccgggtgcgatggctcacgcttgtaatcccagcactttgggaggccgaggtgggtggatcacctcagctcaggagattgagaccagcctggacaacatggcaagaccccgtctctggaaaaaagaaaaacaaaaaaactagccaggcatggagacgagcacctgtagtcccagctactcggtgggaggcttgcttgagcctgggaggcgcaggtcgcagtgagccgaaatgtcgccagtgcacgccagtctgagaatgagaccgtgtctcaaaaaaataaaaataaaaaaatgccgggcgcggtggctcactcctgtaatcccagcactttgggaagctgaggcgggtggatcacctcaggtcaggagttcaagaccagcctggccaacatggtgaaaccctgtctctactaaaaatacaaaaaaatttagccagtcgtggtggcgggcgcctgtaatcccagctactcaggaggctgaggcaggagaagcgcctgaacccgggagacagaggttgcagtgagcccgcgccaccgcactccagcctgggcgacaagagggaaactctgcatcaaaaaaaaaaaaaagaaacatatttaattatgtcactgatttctattggctctcctctgtgctttgtgctccaggaaaaagcactgtgtattgtaagaaattagatgaattttcaaactcacatagcgtttgaaaaacgagatagaaatctcgttttaggctgggcgcggtggctcacgcctgtaattccagcagtttgggaggccgaggcgagtggatcctgggtggtcaggagttcaagatcagcctgaccaacatggtgaaaccccatctctactaaaaatacaaaaattagccgaacatggcgcacgcttgtgatcccagctactcaggaggctgagtcaggagaaccgctggaacccgggcggtggaggttgcagtgagccaagattgtgccactgcactccagcctgggggacagagcaagactgcatctcaaaaaaagaaaaaaaaaaaagaaatctcagacactttttgagaactaattatttgttgcaagaaagtagaatacctgtttgtaaatagttatttttaaattattctatgttttatctacagaagtgcaattgcataatttatctcggtcgaaaaaacaagagacataaatcatgttaataaaaaagctaattagagccagcctggtcattttttaatggagtgtggtctctagaaccatacagacctggttttattcccagctccttgattactgtttgtccttgctgatcacttaacttctatttatttattttttaatttaaaataattgaaacagggtcttgctgtgttgcctaggctggtctcaaactcctgggctgaatgggtccttatgtcttgacctcccaaagtgtcgggattacatgcatgagccacggtgcctggcctaaatagtaccattgagggaccttctaattatgaatttagctggtatttcatatggtggaagcactatttattgtgtcctaaatcagaggagatacatgttatataaacttgccagtcatttgggatacatagggcatgaaatatttacttgaaatcattatttttgtatatataacatgaaatacttagaataaagatatgattcttgatagctaccagttgagtgcctgctccataccagatgtttcataatttgttaagtcttaatacagtgcctggcacattgtggatgctcattaaatatgtctgtctattagatagtactacatagtagtaatgctattgtagatataaatatataattctcctaatagtgaagattgacactctgcaattatacaggcagtagaaaataaatgaatagtagttaggattgatgtaagagtattgtccttattttacaactgaggaattagattaagtaacttgtcaaaggttgtgcagaataagtggcaagtctgagcttcaaaccagggccgattcctgaaacctcggctcttttcaccatgccatatggttttccgaaattggtactggatgacttattaaaggaaagcatatctgagaatgaaatggcatgtggtatagctcatactaatgagcttatgcttcctttgtgcaatataaggaaatatgtggtgctccagagacataaaataattctttaactgttttacaaagcctgcaacagctactcagatatgaaatctatctcaattgttaaaattctttcaatttcatcttaacagtaaatgcagttggaactgaggtccaaaagtgtgctaccttcaaagttgtatgataaagtatatttaatattagactgcaggcatctcttcttgatggattgttgctgctgcgtaaattttactaatccttttgctggaaagaaatacatagcttgtatttcattggttgctaactggtatatgcacatgctgtttccttattaggtgtctgccagtttgtacacagtggatcacatagtaagtcgagggggctcccccatatgcaatagctttttttaaatacttttattttatcaaagaaaaacagctgaagacattagtcttattaagcagttaatattttacagtaatgaagaaccagatgtccatcctgtcttaagctttcacacgtatacattgatgcctgtaattgttttctattttaaaaatctattaacactattaccatttattaagcaccttctacatcccaggcactatactggaaatagcttccaaattattgaggaatttggagataatggctgttctctccttttttgatgagaaagctgagattcttagacaggtaaaataacttatgcactcacccaaaaggtttgatctaggtctggctgattgcagtgtcctttcccatacaccacactgttgctcctgtgttttcatttaatgtaagcccagttttaaaaaatcccttcatataaacatttttatagatgtataccttactttatcaggcccttgtgtcaccatttgccatgtgaagctagtctgatacttttcctgataagcctggtgattcatataaacagggatgtggcagaagtatgccattggtcctagggtacttgcttactcctatcgctgttaaagttctagttatatcaccgttgtgttttttgttgttgttgttttttaagcaacagggtctcactttgtaccccaagctggagtacagtggtgtgattatagctcactgtaccctcaaactcctgggctcaaacaatcctcacacctcagcctactgagtactaggacaacaagtgtgcactaccatacccagttatttttgtgtgtgtgtttgttttggtacagatggggtctcgctatatagtccaggctggcctcaaactgttggcctcaagcagtcctcccacctcagcttcccaaagccctgggattacaggtgtgagccactgcacctggcctgtcactattagttttatttttaatttttcccccccacagattgtaaccaaagaaaatggaaaaagggtggtggttttacctactaggcttttttcttcgtatcacttttaaaataaggaactaaaacctctatatggcaaaggtcttgagtatcaactggctcctatcatttttttctttcagttatgaaacttactggacgatttgtaataaactttactaactgctttcttcctaacctgttttcccctgaggaaaaaaaaatactattttttggtaacccttcctgttcttgaactccctaggaagaggagttgtacgcatgtcagagaggttgcaggctgttttcaatttgtcagtttgtggatgatggaattgacttaaatcgaactaaattggaatgtgaatctggtaagatgctatgctaacgacatcagctgtatgtaacattgttttctttgtgataagcttttgaagtattttctttaggaaatggaaaacacactgttgaaactagtcatctaacatattgtaattattatggatctaagagttttcgtagctgctgctagaaatttcatgggctttaaatttcatctgtttgttgagacagtgtttattttctgctatgaataggacacctttgtttaaccaagcattctgt

SEQ ID NO: 4279 - DNA, 6000 bp, Homo sapiens; identical to SEQ ID NO: 1514

SEQ ID NO: 4280 - DNA, 6000 bp, Homo sapiens
gccttctctggtttttactgaacattttatataattctactttctctcttctcaacatatcaattatacttattttttaaaagttttgtggttgaaatggaatttgtccctgggatgcaaggatggttcagcattctcaaatcaatcagtagaatgatatgatacatcatatcaacagaatgaaggacaaaacccatataatcatttcaattgatgctgaaaaaatatttgataaaattcaacatctcttcataataaaaaccctcaaaacactgggtatagaagaaacatacctcaacataataaaacccatagatgacaggcctacagctagtatcttctgaatggggaaaaactgatagcctttcctctgagatctggaacacaacaaagatgcacactttcaccacggtcattcaacatagtactggaagtcctagctacagcagtcagagaagagaaacaaataaagggcatccaatttggaaaggaagaagtcaaattatccttctttgcaaatgatatatcttatatttggaaaagtctaaagactccataaaaaaagctattagaactgataaacaaatatagtgaagttgcaggatataaaatcaacatacaaaaatcaatagcatttctgtatgccaacagtgaacaatctgaaaaagacatttaaaaagtaatctcatttacagtagccacaagtaaaattaaaaaagaattagccgaaaaaatgaaagatcgctacaatgaaaactataaaacattgatgaaagaaattgaaaaggacaccaaaaatggaaagatattccatgttcatggattggaaaaatcaatattgttaaaatgtccatactacccaaagcaatctacagattcagtgcaattcctattagaatacctttggcattcttcccagaaatagaaaaaacaatttaaaaatgtatatggaaccacaaaagacccagaatagcccagaaatatcctaagcaaaacaaaacaaaactggaggaatcacatgacctaacttcaaattatactacagagatatagtaaccaaaatggcatggtgcttgcaaaaaaacagacacatagaccaatgtaacataatagagaacctagaaacaaacctatacacttacagtgaactcatttttgacataggtgccaagaacatacactgaggaaaagagtctcttcaataaatggtcccgggaaaactggatatccatatgcaggagaatgaaactagatctctacctctcactgtatacaaaaatcaaattaaaatggattaaagacttaaatctaagacctcaaactatgaaactactaccagaaaacattaggataactctccaggacattggtctgggcaaagatttcttgagtaatacctcacaagcacaggcaacaaaagcaaaaatggaccaatgagatcacatcaagctaaaaagcttctgctcagcaaaggaaacagttaacaacgggaagagccaacccaagaatgagagaaaatatttgcaaactacccatctgacaagggataaataaccagaatatataaggaactcgaacaactatacaggaaaaaaaatctaatctaatttaaaaataggcaaaagatttgaatagacatttctcaaaagaagacatacaaatagcatataggcatatgaaaatgtgctcaacatcattgatcatcagagaaatgtgaatcaaagctgtaatgagatcatctcaccccagttaaaatgggttatatccaaaagacaggtaataacaaatgctggcaagaatgtggagaaaagggaaccctcatacactgttggtgggaatgtagattagtacaaccactatggagaacagtttggaggttcctcaaaaaactaaaaatacagctaccatatagtccagcaatcccaccactgggtatatacccaaaagaaagaaaatcagtatgtcaaagagatacctgcactcccatgtttgttgaagcactgttcacaacagccaaaatttggaagcaacctaaagtgttcatcaacagatgaatggataaagaaaatgtggtgcttatacacaatggagtactattcagccataaagaagaatgagatcttgtcatttgctgcaacatggatggaactggaggtcattatgctaagtgaaataagccaggcacagaaagacaaatatcacgttctcacttatttgtgggagctaaaaatgaaagcaattgaacttatggagatagagagtagaaggatggttaacaaaggctgggaagagtagtgggaggctggggggtggaggggaaggtgtggagatggttattgggtacaaaaagaacaaaaatgaataagacctactatttgataacacaacagttgactatagtcaatcataacttaattgttctttttaaaatatttttgctttgtaaggcacttttgttgtagcataaatgtacattttaaaataactaaaagagtataactggattatttgtaacacaaaggataaatgcttgaggggatggatacccaattttacactatgtggttaatatgcattgcatgcctatatcaaaacatctcatgtaccccatacatatgtacacctactatttacccacacaaattaaaattttaaaaaaatttgccctagatttgcaatatacacttacaactaatccaagtccactttcatgggtagtacaggtacattataactgagtattcccagttcctctctgccatcctttatagttgtcattcatttcacttatccacatgttgtaatcactgaatacattgttgctattattactttgaacaatgatctatttattagattaaaaaaataaaagattgttttctcttcatttattcctttcctgatgctctcctttcttatgtagatccattagttatctattgataaaaaactaatcaaccacaaaatttactggcttaaaatatttactagctttagtttctgccagtcaggaaaatctggtcactgcttaactgggtcttctactctggatctctcacagggctgcagtcatcttaggctcaattgggaaggatccaaactcactcatggttgttgacaggattcaattccttactagttgttggacttaggcttctgttccctacaagctgttggccagaggccttccttgtttcttgccatgtgagcctctctgtaacgcattttacaacatggaagctttgcttcatcagagcaagtaagagggcaagagaaagtgccagcaagagaggacaagctagcaagacggaagttacaatctttagtaacctgattatgaaagcaacatcccatcacatttgccatgttgtatttattacacaagtgtatgaatatcagaaaggcagggatcattgagagccatgtcagaagctacccatcaaacccatacccaatggggctatatcctatgtgaatcgtgtgtgccctaggttgaggatatgaccctccagaaaggtttttgcatttcctcctcccaggcattccacgatggaggactacattttatattgttctctgcttgagtctctgaacacgtgggtagtgaaactgtgaactacaaatttgcttgatgtgtaagcttatagatgaattacctggtgaacttatattgtttttttcacatatgacttgaggccaagacggacaagctttcttgtgatctctatgtactggtggactttttaaaaaaattaacccttttactgatggtatgacccttcaaagatcctagctttatgcatagttcttagttcctgccccttacataattcagccccaaagcttcatgacctgtcctcatggggatattaaatctcaagctcccaggtaactgtgacaagttaacccccttcacaaacttccatttaccactctagttttcatgtcttttttttctttgcccttgctatgtagttggaaagattgttttcaaaatataatccagcatttccagggagttttatactgggagggcttttcggttatctgtatattgccaaattagatgtccctctatttaatgtttaagtacccatttgtcagcatcaaaattaatgtctatgtttccttttaacctaacttttaacagttttactattatccccatcatgttccattgaaatcaactggaatttttgttccagattatggcttttttttttttttttgagatggagtctcactctgtggcacagactggagtgcagtggcatgatcccagctcactgcaactctgcctcccgggctcaagcaattctcctgcctcaacctcccaggtacctgagattacaggcgtgcatcaccatgtccagctaatttttgtattttttttttttattagagacagggtttcaccatcttgcccaggctggtcttgaacccctcacctcaagtgatccacccacctcagcctcccaaagtgctgggactacgggagtaagccaccatgcctggcccagattgtggcatttttagtatttattttgtatttttaaagtgtattttatggccaggcacagtggctcacacctgtaatcccagcactttggaaggctgagatgggcggatcacttgaggtcaggagttccgagaccagcttggccaacatggtgaaaccccatctctacaaaatacaaaaatagccgggcatggtggcgcatgcctataatctcagctactcaggacactgaggcgggagaatcatttgaacctgagagccagaggttacagtgagctgagatcgcgccactacactccagcctgggcaacaaagcgagactgtgtctcaaaaaaaaaaaaaaaagtatattttatgattttttaattaaccttccatagtcttaaaaatcatttttcacaatttcattaagcctgacagccactaccaataactgctttttaactttgttttactgaaatcttttcttagctttgttacattgcttgttttctgatttaatatatatattttttgtttttggagggtatccttgagtaattctttgagaatgttttgagtccttggatatctgaaaataactttatttatttattttaaaattttattttagagatgggttttcactgtattgcccaggctggagtgcagtgactactcacaggcactttcatagaacactacaggctttaacgcctagcctcaagtggtcctcccacctcagtctcccaagtagctgggaataccagtgcatgctaccacacctggcaaatggctttatttttgctttcatgtcagtaaatatctttttacttgggaacattgactacatggctccattatttttttccatctaatgttatatgtaagaattctgatgctaatcccaattcttgtattttgcagttctctactacttctgctacttctctttgatagaagattgtactttttaaatcctttggaaaactccatattttatggtcttttttcatttatcctgcttcacatttattagatcctttctgtctgaagattttcatcttttgaaacaggaatttttcttctttgtgggttttttgtttttgtttgacgtggagtctcactcattcttttgcccaggctgaagtacggtggcatgatctctgctcactgcaacctccgcctcctgggttcaagcagttctcctgcctcggcttcccaagtagctgggattacaggtgtgtgccaccatggctggctcatttttttatttttagtagagatggggttttgccatgttggccaggctggtctcaaactcctgacctcaagtgaaccacccgcctcggcctcccaaagtgctgggattacaggcatgagccaccgcacccagcctatagattttaattgttacatgtcttcttcatttcattgggatttaaagaagaaaattatgtacatttagccagccatttgaaaccagttctgttgaacaataa

SEQ ID NO: 4281 - DNA, 6000 bp, Homo sapiens
tttggctcatggtttctgcaggctgtacaaacacggcactagcatctgcttctggtgaggtctcaggaagcttttattcatggcgggtgggaaagggaagcagatgtgtcacatggcaagggagagcaagagagagaggaaggaggtgccagacacattacaacaaccagctctcacgtgaactaatagagcaggaactcactcattaccatggggagggcaccaagacatgcatgagggatatgcccccataacctgaacacctcccactaggcccacctccaacattgggggttgcattttaacatgagatttggaggggacaaatattcaaactatgtcaaccccacacataacttatggaggccaaatacaggagaggtcaagagtgtcctcttaggatagcccctctatctgactgaggaggatactctactttcagaagcggggaaaccaaggatcctgggatagcggcaaaagggagaggtcagagttccaatccagctatgcagcctcacatccttctggagtgtccctctccaccagctaccttcaggttctctatcaataaaatgatggtaatatctacagtgcaggattatggaaaatctagcaaggagcccaacatatggtggctcctcagcttacagctgatatgctaagccaagcatttgcaacgttgctttcatcccttggacagcctcctgtccttcagagctcctcttcctgctagcagcttcctgcgggcccatcgaggtgaaataaactctaatagcaactgaataaaagctcacatgcccagctgtgggaataagggatggaacgcaatggcagtatgaaagtgagagtaccccaaacccaaggggagccttggggagaatgaggtgccaccctcctgagtttctcgctggagctcactttcaaaaggccttgctttcagtggttaaataagggaggctgggaccacatggatagtgaggggcccgggacttactcttcagcataaaatcggctcccaagaaatgtcccatgggcttctgacatggtcaagccccttcctcatctctatccctagactcttcctctattccttcaacagaaatctcccttttctgggacttacagaattaactatctcagcaaggtgaacttgactgcctgtgggctgtggcctgccatttttattgttacatgcatgggtgggtgagtgactatatgtgtctctgtgtacaatccggcagttctatcttcctcctcagacagatttctttgcacctcctgcctgcaccactcctaccttgaacaacaacaaccaacaattatattgtacttcccatgttccaggcacgattctaagcactttatctgtgttacttcatttaattttcacaaccctataaagtagatagtattatttattgccatttgagagaggaagaaatcatggcacagagggattaagtaccttccacatgatcacacagctaattaacagcagacgcaggttcaaacccaggcagtctcacctcaaagtctgtactttttacttctaaggtacatagcaccctaaatgtagaaaggctgtaaccctcagaggtacagcccacccccaaaattcttgccccagcatggggcagattgctaaaatgggacagctataagcagtgagggtgggagtgacccttaaggacattctcaggcatatgaggcatagcttcaaagagagagcctgaacagagcagccctgggaaacagccacgcagacacactagcctggcacgtcagcaaagaagcagccgactttgagctgggctcccaattaccctcacagtccacacggtgacaagctttgcaaataccggccacagccatgagactaaagaagaatcctcatgtgtgcacagcttggaaaggacacacacacagagaaagaatagtcatccataggagcaccgtctttaaatagaaaagatagcctgaaatacaccctgagctcgcgggtgctcacacacacagacacacacggccagggccagaggagtgactgaacaaatgcctcagctgtgctggtggcaacgggaggaaatctagtgccctggcagctcctgactttcagttcctatttaaaatgtctgaattgggagcatcgacaagctcccaaattagctttttaaatagaagctgagagttaaaggaaaagcggccgtgtcatgggggaaaagcaagtgaaaatcccggccaggccgggaccagaggcagagggggaaggtgaggacaggcagtgctggaaagatgcaatagatgactggggactggtgggagggacagcatctcctgggcagcaggactactccagctgcccgaatcaaggggcctcctttctccccatcgcttgctctcattttgcagatcacctggttgtaggaaggactggtaaacaaaacccacactggcctagactagaaatcccagtctttcctattttccctagatggttaagacagaaaggagagaatagtctacagctaccacacttaagcaatgagttacgagcttatgaggaatgagggggcaggtgtctggaccagtgtctggtcttcaaacggagcttacgagtctcaggaggccacaactgtcccattagttgactttctgaggagaaatgatgtgcccaactgtctcctgaagcctccaaacactgaggggggcactcaacccctgagctgcccccaagatgctaaacaacagtgagaatgtacaggagttcaaacctgggcagaaataaaatatgggtttcactttcccgaattgaacatgggatggagtactgaaggaaagtgcccctgcctcctgagtagtgaccacccaggacctgaggcactttatcccaggggtcagagcaactgaggagtgcagttgccagaaaattagcccttccccagaggaaagggaggagggaggtgggagcagcgccagggccttccccgaattcttcccctgtctgccagggagtggcagtgttgttaatcattattactgtatgcaaatcccacacagctccgggactcctggcaaacgctaatggagcccacgcccacctcctgaagggccaattgtgtacctttcaaactgacagactgaagggggctccggaaaaagtaagagtgagtgaatgagggactccaaggtgccaggggccacaagggcccagaccacaattaccgacttccactccttcatctggaagagggctaggggttctcacaagccagaagccccgttccggattcagggaggtccttttccagccctgggtctacaattgtcctagggtctagaacaccctcgcagtctagaacaccccagaggtcacaacgcactttgcatttctctgcctcggcacccacctctccacacccagaaatgtgatctctcaagccaagcgttccccgtccctgctggggcacggagctgcctcgcttccggagcgccaggccgagatccaggattccgggcaccgaggctggagacaccgggaaagccggagccgcgggtccgcccagcggcggggactgcgccctttgcgcgccgccgccctgagggtgggaatctgggccggacacctggccctgtgggcacatgctgaccttcccactccccatcctgggtcgacgaggcacggagcagtggggacccatgggcttcagggagggactgaggggctgggcgggctccagttgtaaggggaccggctcgggtgagagttcacgctcccaagtccagactcccggtctaggtagtgggtagacgtggcgggagaggagggcgaatctcgaccttctgatggtgccttcgtcctccgagaggagagcggctcataggtggggttagaggcagtgtgtcccccgggtacctcttcagcctctgcactcggagctgagagccgggggccagccgcaaagattgcgcggtagggggccccaccttgccaggtcgccgggcttggtctcaagcaggtgctgctgccctgtggacagtcagcgagaaatagacacacagctaggtgcacacataccccacgcgcgcacacgccggccctccctgccacctctccgtgggtccccagccacacacgcccccgaacttacgctcacgccgtactccctgctcctcccccacccccaaacccagctcaccttgccacgctcacccccgtgcccaccctcgctggcacacgcgctcacacccgcgtcggtacactccgccacctccaggcacaccctaggattcctccactcgcccggggagacgcactaggctctgcctcgtctccccaccccccgctcacgcgcgcgcccctctccacacacacagacacacacacacgcactcacactcatacacaccctcgcgcgcggagtcactccccctcgcacgccctcgccctgggcaccctcccgcggcgagactccgggtcctcctcctctcttcctccactgcctggcggctcggcgctctccggcccggcctggggccgctgggcccgcggggatcggaggggagccgagggcgcagccttgccgcctcccccggactctcctctcctccccgccccgcctgcgccgcgcccccaccacctccccccctcgggaaagggacctcgggagaggcagcccgtggccggccgggctccgctcggcgcggcgccggcagcggcgggggaagggagagagcgagggagcccgcgagcccgcgagcggagcggcgaggcggggaggggacgcgctgccgagccggggctggagcggcggaggctgcggcagcggcggcggcggcagtggcggcggcagtggcggcggcagtggcggcgggggagggagggccccacggacggacggacgcacgaaccgaccgagcgagggaggcagcgagcgagactgcgctggcgaggaggagccgcgcgagcggcggctgctgggcgcttccccgcgctgctgggcgctcggcgcctccgcggccccggctcccggccgcagcttcctcgcgcgcgcggggcgccgggcgcggggcccgggctggcttcgcggaaggtaagagggacgcgaccgagccttctggagccaggaagtgcgaggagcgctgctcccacgcctgttgctccggctgcccacgcggcaccctcccactcccgcgcccgggtgggtgggcgctggggcgccggaaggattgggggtggggcccgtgccgtgggggagcagacagccggcccgggggcgtcggttccctcgggctgtggagccacctccgggcagccaggcgctggggttcgggggtggggtgtgaacctctgccctctttccattggcctgtcttccctcggcgggtgccagagacaggtggcgaaggcttgctccgtccccgctcttggtgaggggacaaggagagaaatggctgaaagtggaaacccggagcggtttggggcgcttcgcaaagttctccagctcggcgagccggcggtgtgtctaccagaggctgggggccagtccatctggtcctgcccgacgccacttccaccccgcgagctctgggaaaggtctctacgtgacgccaagggccgtcgcggccccggggagagggatcgaaagactcactctgcgaggtgtttacactggaggtgggggacgggaagggactgggcaaagttacctggactcaactaaattcctgcgcttgcttagtgttgacatttgaataggatccgagatgttctgcttttatcccgggcagccctgatatgtcagcaacaggctgaggttccagacctgaaatcgcactgcaagaaaaagggtccgtatttcttaagagagagcgtctgaactttctcggggtcctaggcacaatgcgatctgtttgtaagaccaggcatgcgttgctgtattttgcatgaatgtacgtgatggtcaaatgtatgccttgtttaccttacttcgagggagcctg

SEQ ID NO: 4282 - DNA, 6000 bp, Homo sapiens
acaggcacgcgccaaccacgcctggctaatttttgtatttttagtcgagacggggtttcgccatgttggccaggctggtcttgaactcctgacctcgggtgatccacctgccccagcctcccaaagtgctgggattacaggcgtgagctactgcgcccagccactttctacatacatgttaatcgtatcctagatacatcaagaaccttgtgaacatccattaccaaggtgttttcagcctgccctgccataaaagagaaagattaaggataacttcaggtcttttgtattttagtaaaattccatccagtatttttagatttagaacctgcacaattaattatgttttctaacatctttattttagtacacatgtgactcagaagtaattatagaaaacaatattcttatcattgctgcttgtttattttggaggatttgtcattcattgtcattcatacttgtgtagatgtgagggagcagtttcctttatattactacatttttggttgtcttttaggtcctatcagcagtatcctggtgaataaatatggaagtcgtatagtcatgattgttggtggctgcttgtcaggctgtggcttgattgcagcttctttctgtaacaccgtacagcaactatacgtctgtattggagtcattggaggtgagttactactgattcatttggaagcattagtttatggctggctattttgtatttacctgcattcatctttcagatctctggagtgaaattcttttcttatagaaatgacttgattatcattttgaagaactagagataaaagtactagaaaagcaaacttttaaagaaattgccattatataatggatatttattgtttgtcgaatgagtgaatgaattgaaagaatgattgcattccttgtcctaagaatagccagtagtggtagatacaatgtgtgtggcaacttggtgcgagagtggcaatttgatagaatgtccacataacatttctgaggggtagaggatacgcttcataattcctccccccattttaaaaatcactaaattaagataatgaactgttgatgagcataatgaataaaagttacccataacctcacaatccaaagaatatcattaacatttctatgtatatccttccatgtgtttttctatgcacagatacacctttttttgagcaaaaaaggatcaaattatgtctaatattttataaccagatttttgtcagtattaagttgaaagttttgtgaacatgaatatattcttcgtataaatttgtagaaagggaactgctgtgtgtttgttttaatatatgtatgctaaattgtcctccaaaaaagttatactcacttattatcccaccacaatatatcagagattccaagattatcccttttgtcaacaatgggatattgccttttttaaaaaaataattgccagtttaacacgtgagaacagtatctcttggttttaatccttattttcttttcttttttttttttttttgagacggagtctcgctctgtctcccaggctggagtgcagtggcgcgatctcagctcactgcaagctccgcctcctggattcacgtcattctcctgcctcagcctcctgagtacctggaactgcaggtgcccgccaccacgcctggctaattttttgtatttttttttagtagagacggggtttcatcgcattagtcagtatagtcgatctcctgaccttgtgatccgcctgcctcggcctcccaaagtgctgggattacaggcgtgaatcaccttgcccggccttctgatgttgaattttgttaaaaagtatttttaaaattcagtcttttccaatgtttttcccttattaaacatataaatttttatgtattcaaaacgtattttatggtttccatcttgtatgtcatcctgagaaagttgttttctactccaagattatgaaaatatttgtccacttctgtttactgcactttagtttttatattttaaaaatctggttttgttgttgttcttttgttttgttttgtttttttgagacacagtttcactctcactgccaggctagactgctatggcatgatctcggctcactgcaatctccgcctcctgggttcaagcgattctcctgccgcagcctcccaagtagccgggattacaggcgcccgctaccacacccagctaatttttgtatttttagtagagacggggtttcactatgttgtgcaggctggtctcaaactcctgacctcatggtccgcctgccgctgcctcccaaagtgctgggattacaggcgtgagccactgcacctggccaatttttgtgtttttaatagagacggggtttcaccatgttggccaggctggtctcaaactcctgacctcaggtgatccgcctgcctcggcctcccaacatgctggaattacaggcatgagcgaccacgcccagctacatttaaaaattccaaatggatgaaaacatctgacataagatgagaaaaaagaaatataactctatttgttcccacatggttaatcagttggttcatttgctcttttattaatttatttatgaaatatttattgagcaacaactgtatgtgtgttaggaaccattttaggtgctgtagagatagagcaacaagtcaggcagttacactctttaataggaggagacaaacagtacaactcataaataaattaataaataagaaaaatatcaggtagtgataaatgctatataaagcctttaactgagtgttgtgacagggaagaactgggcaagcaatgaaggtcagggctcactgaagaatcaactttaagtagagacctgcataacaacagggaaccagatttgtgaaaatgtaagggatcatagaccgtagagcttattaacaaatgtaagaatggtttgctatgaggtcagggaggaagttctttgaatattacttttgctagcactatttattgaataatttctctctattaatttaaaatgctactttatcttacattaaatgtttccatgtatttcaactctgttcctggactttctatagtgtttctgcactttcactgacgaatttttactggttcctgaaacagggccacactgctctaatgactgtagcttttgtaaagccatttaaataatttgttctggttggtcccactttttcctctgcaccatcaaaaatttcctagtagctctgtatttgttctgtaagtatcctttagaatcatttaccttaatccgaaagtaaaattcactgacattttcattggattgcattaaattagtacattcaggctgggtgcggtggcttacgcctgtaatcccagcactttgggaggccgagccaggtggatcacgaggtcaggagatcgagaccatcctggctaatacggtgaaaccccgtctctactaaaaatacaaaaaaaaaatgagccgggcatggtggcgggcgcctgtagtcccagctactcgggaggctgagccaggagaatggtgtgaacccgggaggtggaggttgcagtgagccgagatcgcgccactgcactccagcctgggcggcagagcaagactctgtctcaaaaataaataaataaataaataaataaataaataaaataaattagtacattcatttcaggagccttggcatcttagcaatgttgtgttttattttcccaaaactttgtgtgtattttaaattctctgatctctcaggaaagtttcacaattggagtcttaggaattggcctgtttttaagttttggtgctatagtggaagggatcattttgtactatatgttatttctttcgtttttgggtttttgagacaggttctttctctgtagcccaggatggagtgcagttgtgtgatcatagctcaccatagcctcaaacttctaggctcaagtgatactccagctttagccgcccaagtagctaggactgcaggcacacactaccatacctgactaattttcgaattactttttgtagagacaggtcttgctatgctgcccaaggtggtcttgaatgcctggccttaatcaatcctgccgccttggcttcccaaagcactgggattatagacatgagccactgcagctggccttatgcattttctagtgtaaatttgttttatctctactgtcgacttaatgatcttatatggttataataatccttccggtgattttgttagattagacaaaatagttattcaccttcaaataataaaaacaacaataataaaaataacatgtattaagtgcttactacatactgggcactgggtactaagtgcttaacaaatcttttcttcctcacaacagtgacctgtgcccgttttacatattaggaagcagtcataggagggtatacatgtctgagattatgcaaccagtaagcactgatactgagatttgaacccatgtctgttttagaagtcatactttaaaccactacataacatgtcctctaataatgaggatttatatcctattccttccattatttatacctcttattatttatttatttatttatttatttatttatttatttatttatttattgtcttcacaggtcttgggcttgccttcaacttgaatccagctctgaccatgattggcaagtatttctacaagaggcgaccattggccaacggactggccatggcaggcagccctgtgttcctctgtactctggcccccctcaatcaggttttcttcggtatctttggatggagaggaagctttctaattcttgggggcttgctactaaactgctgtgttgctggagccctcatgcgaccaatcgggcccaagccaaccaaggcagggaaagataagtctaaagcatcccttgagaaagctggaaaatctggtgtgaaaaaagatctgcatgatgcaaatacagatcttattggaagacaccctaaacaagagaaacgatcagtcttccaaacaattaatcagttcctggacttaaccctattcacccacagaggctttttgctatacctctctggaaatgtgatcatgttttttggactctttgcacctttggtgtttcttagtagttatgggaagagtcagcattattctagtgagaagtctgccttccttctttccattctggcttttgttgacatggtagcccgaccatctatgggacttgtagccaacacaaagccaataagacctcgaattcagtatttctttgcggcttccgttgttgcaaatggagtgtgtcatatgctagcacctttatccactacctatgttggattctgtgtctatgcgggattctttggatttgccttcgggtggctcagctccgtattgtttgaaacattgatggaccttgttggaccccagaggttctccagcgctgtgggattggtgaccattgtggaatgctgtcctgtcctcctggggccaccacttttaggtatagtatatctccctactaatgtgggtctattacaaaacaagcatgtaagatgggaatgctgacagaaagcaaacattagtgagctatttgggtaagaataaatctttctcatttatgtacccttgatgctgggacaatgcttggcacagcataattgctcaaatatagaatctaattaaatggaaccatcaaggcaaaagggggatcaaatattgttacaaatgtcagtgttttttctttttttttgagatggagtcttgctctgttgcccaggctggagtgcagtggcaccatctcagctcactgcaacctccgcctcccaggttcaagcgattcccctgcctcagcctcccggtagctgggattacagatgcatgccaccatgcctggccaatttttatatctttaatagagacagggtttcgccatgttggccaggctggtctctaactcctgacctcaaacgatccacttgtctcagcctcccaaagtgctgggtaacaggtgtgagccactgtgcc

SEQ ID NO: 4283 - DNA, 6000 bp, Homo sapiens
ggaggagggaatggggaaagggctccctatttagaaattgcattgagatggaaagacaatatgacacatcggctcatgtcaaaggagctcattcttcccgcctacagcattagcaatttcctaccaaggttcaatttttttaaagaaattattatttggttttaatttattttatttgcaacataactcaacaagacattgctgctcagagcagagtgggagcctgcccaagggcagagacttaagttgggggcaggagatgagcacattggctatttccgaagagaggagggcataggagtgggaggcctcttgtttctgtctcaaacctcctctcattctgcctcccattccaccccagctcctcttcctgcatctgagaagtctggtctggaggtgcccagactcgggatgctccatgcatggctgtaggcgcaatgagaacgatgggggagggggagctgaaagtgagttggcctctgtaaaaccaccctcagcttcagagccaggaaaggctgcctccctcctccctttgccccagcctcctcttttctccctcatgtaaaatcctagagtgctgttgctggaaggagcctcaaagagctcctaatccaacttcacataggcacactgagccccagataggggatgtgacagcctcgtggctgctttggtgcaccagccctgaatcccagccctcccaggccctgtccaatgtacttatttgccaccactccatgcttaactgtctctgctcctgcttctctcctccccacccctaaacccaaactcagaatgggatttctctgagagatagaattgaagggcaacaattccacttctttccacctctttccctctctgggtttgagtgggaccctggatcctccctcccagctcttggtgggaccctgggactctgaattttatctcttcatatgggaagaagcaaaggtgtgtttgggggttgggtttgcagggcaaaggggtttgagagacaaaaaagtttccatcattacatgaagaatttttctgctttgtggctggttatgtgaccacagtggtatcagcaattgacctgggggctgggggaggtagcgggctaaagaggacaactagggtgaggctttaccttaatgtctccttctgaatgtgtgtttctttacctgtacatctgtctccctgtctgtttctctgttctctatttcctataactgtctctctgtatctctgtctcatcctctgtctctctcatttgtatctgtctcttgcctctatttctgtctctgtttctttctctctgtctctctcatctctgtctctcccacacacgctaactcctacaatccaacttcaatagctattgactgacccaggggccctaacctgtttctgcagccctatcagggcagcagctccttcacactgctagattgagaaatgccaggtccggagctgctgccggggcgccagagacgctgcagaagcgcctgccgagtgtggaggctgaatccaggaacaatgagaaattatctgttaattctcggctcctgccacctgctctgctccaaacaagctcctttgccttcagtttagatgcaaattcccccactcgatgtaagcaaaatattgatttccctgcatcacaggtctgggcccttggaatggtcctgtgttttttcattctctgcaaaggcaaaacaaggtgctttgttctgtgaatttcccccaggaactcgcgagggggagggagaaatagcaggggagtgacagagttgccataaacacgggcaaagagcagttctccatttgtattttacataaacacaaacctgccacttgggaaactgctaataagcgtttagccagaggctcttctgggtgctgagatctgcatcgggtgatggaaaagaaattaatggggcctctaggctcctcaggtgggttttcagaagcaccaggaaggcgcatagggatgccagagccccacttgttcttggaacagcaaccaaacacctccagcaggaaggcagcccggattgcacagtatcgcctgcgtcgtgtctgcttggtccctgcctgagttcctagccttctgctatcacaggcacaggggtcagggtggaagctgcgaaccttcaacaattgcctctccctcgtcccctaaacttatgcccacgcgatggtagcaccaactgggtcttcagcaccgtggacagagccagggggcgcctcacggtggaaaagccgcctggctgggccagggtcctcacaggccttgccttagcccttggtgccccaggcaccagctgctaggggatcgcaagtccaagggccggttggcacagatggcgcgcagtggagaccgccaggagctaaggctccgaatctcctccctccggaacgtgagtcactgcccgagtcacttccaataagcgtgttaattaagaggcaagacctttctccctcgccagccactcgggcatacaccaacccagcagcctccaggggctgcagctaaagcttccttcccagctccgggagagcaaatggacctgagtctggggcttcaggcgagccccacacagaaggggccccaccgccgacaggtgtagatcaagagactcccgagataggcccctgcagggcgctggtcccccggcctccctgaccatggctcacagacttccagcgctgagtgaggcagctcgaagcctctcagccgatctgttcctgggcctcactccacagtttctgaggggatctctactttaagtctagcctcaatcctcccgttgagctttctgtctttcttgttatgcttagcagaaagatacatgatctctggtgctgtttcaccgaagcaaggaggtgggtcggcggaactgagcgccctgcgccctcttgaaatgaccccccattcctgtttgccagaaacttttccctcccgttgccatggagagagacggccgctgcctcccgtcgccatagcaacatgcgggtaccgcggaccgcaggattgcggagctcggaaagtcttgcagttcgcatcgcccgcctgtcttggggtcttctacctccgaagctgggactcgggggccagtctaactgctcccgtcaggaacctcggccaaggtcctcccagaccctgcctgaccgtcgctctttctgttacggggttatctatttctctgtcattcgtgtggcatgtggcagtttacccagtgttttcacaaacacgatctttctatccccagggagtccgtgaagtacttaaaatcattacacctcctttacggagaggaaaattgaggctcagagacgcccaaggtcacaccaggcagtgaatgcggagtgggaacccggactctttcctggccttgcaccctccgagattcgggacagcccggcttcccgcctcgaaacccccaccccccggactcaggccagtccctgagtgtagagggggcggccgcgaggcgccagactcgccagctgccgcgggatgccacgtgaggggcggggaccctgcggggaagtgattaaaagcagagcggagccgcagggggccgctgcagggagggtcttcttggggccgtcgtgccccgccccagtgcggccggggcgcgggttcgagctgctgctcggcaagcctgggtgtctagggcatgagcggagtgtggggggccggcgggcctcggtgccaggaggcgctcgcggtcctcgcctcgctgtgccgggcccggccgccccctctcgggctggacgtggagacttgtcggagcttcgagctgcagcccccagagcggagtcccagcgcggcaggcgcaggtaacgggagacccagggccccctcccttcctggatatccgtcctgcgatctcccttccccaaagccccggtcccaggagccccagaacctagagagaactccccagctcgggattctggattgggagccagcctcgtccagccctctggcccatcgcttgcacagccaggagagacccgaaggggagcggaggttggggtagaagcccccggccctcctgtattactactgcggaatgcgggggaccccgcagacagccaggctcccaggacggggcacccttggggcttcagtttccctcgcatctccaagctcgctctgcgggcgatttgccaggagaggggtccatggagagagcgggagacgaggggcgcccggctgaggaatagggcttgcctcctagcgagtgtcgaggtccccgggtccgtgcgtcggtctgtccgtccgtttgtgtgttctcgcggtgaacgcgggcggacccccagtctctccgggagaaacttgggtctgcggctggcacgaggtctttgtgtccgggtgtctctccggctgcgagtggttttccgcgtctccgctggggggcgggggacagggggcggggtgggggagggtatgagggtgttgcggcgtccttcccccaccccctctcgcccctataactcgctccctccgtccctctcggactcggactcggggccggtgcgcgactgagctggcgcctctagccgactttgccaagagggcgcctcctgcccgatccgcgctgaccctgcgcgggacgcagccccaggcggctgcctagccgaggcgggagcccgagctgagtcgagctcgccggagcgggtgagtcccgagcccgatccccgccgggctggaccctggcgcgcagctgcggcgtctccggggagtcgcggcagggggaatggcgtgtcgcgccctggcggcgggagctgcgggagggtcggcgacgtggcggccggcccagggtatttacctgctgcaccagtgcccggcagccacgctcgccggctgccgcggggcttctttgtcccgatatctggagggtccggggcgggagggagtactgggtcgcgtcccctccatgggggaggggctgggggagtgagaggcctggagataatgcggagtgggggtggggagatcctgcaaggaccaggacgccggggttccaggagactctgcaggctccatccctccttattcccccaccccgaccccagtagcgctgggcctaggagcactcgggagttgctcagtggctctgcaccgctggcgcgggaaggggagaaaggggctgccagaggcgggaatttggtccccacgcgctgctccagggacgagaagccagggaccggcggttctgggagcaggtacaggtggggtaaactccccagcggctgcaggtcccagggtcctgttttctttcacttgaggttaaaggtcgtatatagaggtagatacccgtgaggagcagttcgggggagggggcggtgggccaaggggaggcttgtgtgtgtgagggggctgtatccagccttggggtgagcggagcccacctgagccctgtgagggtcgtaggaggcgctgctgtccctagttgtggcaatgtttagtcaatggtttgatcactgcagcagaagggactgaggttagacataaagaacttttagagggtggtacagagatggaggttggggaagttgattccctgccttggagattcgcagaacacattaggcctaacaagttattattataagactctggttctctggtgccatcccctcctacaccacgcatacacaccagacacagaattttccctatcagggagcctcttcctgcctctccctactccccagctcccttccgtcttttccaccaatgatccatctccagtggagccttaatgctggtcctgaccctcagagcctagagggtgagaacatacctgtggagttccatctgggatggaagctgactctcctgtctgttcagggcagaaatgctgggggtgacggtggaagttgctggaagtggggcagggctgtatgtgtgcagcacatcttggtagggggaggcacaggtgttctgactccacagagatacccataatctggaatgacaggtgcctggatggccaggtt

SEQ ID NO: 4284 - DNA, 6000 bp, Homo sapiens; identical to SEQ ID NO: 1547

SEQ ID NO: 4285 - DNA, 6000 bp, Homo sapiens
ttcatgcagtcttgcctttgtctgaaatcccctcatctcttctgcaactcctccatccactccacacccctacagacatcacatacccctaactcctacaccagagttatctccactgggaagtcctctcgaaggtctaagaattgatgagctccactcttggaggggagatggaatgaaactttctggcatgcaccagacttgaacagaaactctggaatgaagccctggttcttcccccattaattgtttatttgaacgaatcacttttatatgtttcctcctctgcaaaacacaggcaataacaatcaccccacagagtggttatgaggattcattcattcaacaataaaaattgaatgtctataacattctgaaggtattcggtcttgaacagaacaaatatgatcctgctctcttggaaccaacaagagaatgtagaagcacattttgaacagtatgtaagcttttatttttatttatttattgtgaggttttatttttactgctgaccttaagaagaaagacttgagcctccttaggacctctttgcaatcttactgctagccaaacattttcttcaatcattaagaaagcatttattgtgtaccaaatgagagaacctaatgcaataagaatgcaaagtagaagacagggcttttaactttgagaagcatactacccatttgagagaaaaagctgttaaatacttgacagaaggaatcatgcctgactttattaatttttttttttgagacggagtctcactctgttgcctaggctggagtgcactgacgtgatctcagctcattgcaacctccaccgcccggattcaagcaactctcctgcctcagcctcctgagtagctgggattacaggtgcccaccaccacactgggctaatttttgaattttattagagatggggtttcaccatgttggccaggctggtcttaaactcctgacctcagatgatctgcccgcctcggccttccaaagtgctggaattacaggcatgagctaccacacctggccgattttattaatttaatagacaccattgagtgcccagtgtgtgtcaggccttgcacctctttggtactgttctcattactcagaacagtggtaggcacataaaggggactcagcaaagtatctgtaggttggctgatagacaaatgtttggaaaacaagtctaaggaaatatataaccaagtgtgaggatgtatcctccatgctggatggtaattaaaattgctaccatgtaccagatgctcagtcttctggagttcaggggacaccaaagagggctgaggtcaattttagaagacttatccattttgctgtagatttgcggagtcagaggaagaggttctggctatgagtttatgattaatctggattgctctgaaatgattttctttgaaaaacactggccgtgtagggggaccacaagaaggagcactgggccgggcatggtgggtcatgcctgtaatcccagcactttgggaggccaaggcgggaggatcaactgaggtcaggaatttgagaccagcctggccaacatggtgaaaccccttctctactaaaaatacaaaaactaaccaggtgtggtggcacacacctgtaatcccagctactccagaggctaaggcagggagaattgcttgaaactgggaggcagaggttgcagtgagctgagatggtgccactgcactccagcctgggtgacaaagcgagacttcatctcaaaaaagaaaaaaaagaagcactggattcagaatgtaggtgcctgagctttatttctggtcattggccatacagtacatgaaataaaatcataaaatgattcatgctcactatacacaaaatccttcctctggccctcttcctcttatctaagcaccatgttgctattgccaaacaagtttcctagtggcccctccaaaatttgctttatctcaggataggacaagttgaaagaggatgttgaaggtttgggagtgaagaacctttagagttgggatggttctcttccaggttctagggaccatctctttttgccttgctgatttcagaacttgtatcagtagcagagggctttagaacgcaattccctaggactctccccaaaacccaaaaaccagattcaggctcctgccccacattcccatgacaccttatacttcctttatgttaacacacattgtgttttactgaaatcatgtatttaatgtctgctgttaataaaggggtataaaggcagttacactcagtgaagtcagggaatcccttgtttgtttcccctccttcctgctgtatcctcattgtccagaatgatggctggcaccctgtagccactcaataaacgtattaaatgaattttaaaaaggacattctaggcagagggaacataagaagccaagataaatgggtgagaaatggtgagatgcacataagtacatgtgaaattgtgtagcttaagtattgagtgtgtgagtggaaaagtggaaaaatgatagcataagactgtacagggtttcacatggcaagttaagcagtttggactttctaagtggtaggaagccagtgaggataactgctaaagcagtgaggtaaattgccattgtgtttgatagcatttattcatggcatgggcagcttcctttgcccctcctaatacacttcctgccaagaagcagataataatctacaaagtattttatatgctatacgcccagtaaactcactgagtatctaatctacaaatttctttggctgagatggggtatccaaagggagccaacgtagctggaaaagtaactacagccagagacctttcacattataaactgagcatctggtacatggtagctattttaagtttctctgaccttgcctgagcgtcagcaggaagtcatacatgaaaaacccttcaccctatttcctctgcctgggcccaggaggtctgcctcacccctatacctcctcagatagtttctctttttccctcccaataagatatccttcctaatactgcctttctggttttccaaggtgttcctttcttgtatctgtgctttacctcttccaggtggaattccttggacagcagtgaaggagtcagcagtcaagcctcttggcagactagaccaaagggtcacattctttgcctggaactatttttatacttccttggggacttgcaaggaatgagtgacagagtgagaagatcaagggagaagtcttcagggactgagtgtggaaaacttgccccaaatcctggaagaatatgacatttgtttctttttttttctatttccattttcctctcatttcctccccttctactcttgctcccatttcttttctcctttgtaatgcacctttctctactttctgctttctctttttccctccttcttctactctcatccttccccactgctcttgttgctagtaatggctaccttttattcagttcttatttgctgaacactgtgttaagtgctttgcacgcatcatctcatagcactctatgagttaatagtatgtccattttgcaggtgaggaaagtggaacacagattgagtcatttatctaagcccagcagatggtaatagaaatttgtcaaacctcagtaagctaactcctgcatctgtcttttcttaaccctacatggtctttttctccatttccaactctcccttgtccttcccttttcttctcttctttttattcctccccttctctccctccctctttttctcagacatttaccatagttcagtcactgcacgtgtgtggctgaccctgaaggtgctgaacactgtacatgtgcccagaagagaggacagacaattcaaactcttatctaatcagccattttccttttgagcacatgctccacaattttccacatttggaggctgaaagagggggcgcttcgccacctaaggaaatggggcagatgtctgatcacaaatgacaggaaaggcctcaagacctggatgggtctttgatatagagaggagcagagataagatgctttccgctcactcaggaactccctcattcccagggacactgtatactctcaagtttggggacctggggtctgagagaatacagggccaggaggttggtccctgtcaaggcaacaatcaactcaagagctgaggaagcctggactatgaaatgcaccaccctgaccccatctttccccataagcaagaagaatgttcagacagaaaccaggagcacgttggcagcaaagatatgacggtcaaagtttgaatttgacaaacctctaaggacccacccaaatctgaggtttatgattctaagaaaggaatatttatgctccattccctccgagacgtttgtcatcctgttggttaggaatggttagaggcttaaactgtaagaacattcgttattcactaagtaagaattctggaggtagggagcctcaagagttgcttcagaggcctcagggcactggttgacatttctgagattctctggacagctttagacatcttggttcatacaactctgtccacaggcaggaagcggtggggctaagtgaggctcactcctattcaccgggggatgggagcactgtgagtagtctccctcctgttcaccaggggatgggagcactgtgagtgaggttccctcttgttcacagggggatgggagcactgtgagtgaggctctctccatttactggggggtagaaaaaccttttctggagcattccctctactttagattctccccatacctcacctaccagaactaactgcagaggagattaagaaagtgatacctggctttttcaccctgccaatgggaggcaggcaagaaacagggaattggttttctattgggtaggaaacaacagtgcctgtcagcccctccttcattcactcaactaagatgtattaaacacctactctgggccaggctctggtgatacagaagaaaagacagtctccattttcaaacagtccctcctgggagaacacagacaggcagaggattacaacacaaggcagcaagcactgggagacgagtaagtgtcccgggggccatcacaggagctgaagaggctcagcttgagggaagagggagggctggaggaggcaatgactgggttaagttttgaaaggtaaatgggattcagctaggggtgaggggacatgtaggggtacagaaggagggcatttgggaagacttggcatggctggacaaaaggaactcatgtggacaggcaggaacaggctggaaaagcagacaaaggccagatgagggaggattttgtaagggacataaagttttgggacatttattctggacataagggtgggcagatctgtgtgtgggaaccttatttaaatgagacacagaaacttagcagcagggcgagctgagctgtgtggctggaatggctgtgttgcaccgaggcatgggagatcaacattgccttaccagccaggggaagtgagcactcatctgtgatactgttagctggtgtgaccaaagcacactttttgtttgccacctcccaacacagctggtccatgctggatggttctgatttttgcagagtgcttcctgaggggccaaatttgccaatcccatcctcactctttcctcctccacctagttctgccctctggagccataaaaaaattccttttccatccaacagccatttaaacatttggaacagttgtggaatgattttcagaatatcacacacctcatatcatttaatcctcagaattctctggtgtagctattcccatccccattcgataaatgaagaaacagactcagtgaggtaaatgcccagagtcacatttgcagaccccagtcttgtgttctttttaatactcgtgtttctccaggtgcggtccttcaccgcctgcatcagaattacttgggctgcttgttgtaaatccagattcctgggggccatcccagacctcct

SEQ ID NO: 4286 - DNA, 6000 bp, Homo sapiens
aaaccacaccttgttatctctgctttctctaaaatgtccaggtaaacttggaataggagcactctggatttgggagactgttgtgaaaaaggagtttgagagcagtggagaaggcaagggaggtgttttgaaggcagcaaaagcccctgaaattattgggtcctgccatactgagactggggtgctaaggaaggggctgccacattccccatctccctgtcttcccacttgtcttcctaacatcactgtttttttctttagttccttctatcttttactaggaagggcctgggaagggctgggtgccatttccagctgttcttgtgacaacctccggccctttcatcatttctccccgtgccctgactccctccccatcctcttttctcctctccccaccaatggtctctcccgatgctcagtggcgcggggtaggggggggcggaggcggggctggagtggtggaaggggggtggcaggtctgcattgccgcttccctggtgccgggagcagtcgccgctgccgcctccgcccgcggccgggacccccgtcctcgcccgggactccttacccggggaacctagaccaggtgagacccctttctcagtcgctcacctcctccccgcccctggcagaagcatctttgccttgccttgcagccattttatcctccgatgctttgcttatggggagggtgacgatcccctctctaggggtgaggggggttggtgggttggtggtggtttggggatggacatttatttcagttgtgctcttcaggacacacacacacacacgcatatgtataatattggtgaatggggaggaggggtgtttttctctaccttaaccaagtccccactatccccttcggagattaacgtggtggtggggttgtgaggtgggatgaggttccctcaaactcctatcccctcctcaccttgacgtccccccacccccaggatgaatgataaatgaccttggctggggctggagaatggatgctgcctcagtgtgcacgcctggacttgggtgggtggggggcaggggaagaagggcaggtgaaggatggagggaaggggagtgaagaatggaaatactggggagacagagatgtagagccgccaggtgttgggggcatggatggcgggggctggcggcagttgctccggggtggggggaagggatgttgagtgaaggtggacacttgtctagcagcaggaccaagggtggaggaggtgctcagagcagggatttagtcagttctgggggcttttcccttattccggagctgaggcaagatggggtgtgggggggtcgctgcaaatgctgataggggcggtctctatgtctgtgcatgcggaggtctctccctgcgtccccctctctgcctctccgtattcctcagtgtgcattctcagctgacaccctcatttttatccctcagaactgtgggtgctcctatcttcctaaccttggtaggatgtggggaggggaggcgcagtcttgatggtcctgggtgggggctgaagttcgatgaccgggctgtcatggggaaggggtgctcccgcacctcccacattctacccccgcccccgcggacgttttgataagtgattgctttttaatgaccttgtcacctgagctaggaaggcctggggatctgggtggaccccaaagtcaggggctttgactgggagggtggggggttctggacccagggctggatgagctgttctgaaagaaagcatttgctctggagtcccctgcctgtctccaccctctgcagaaaatctcctgggcacattttttcctgtcaggtgaagtcagccagcctaggaccttgtaaccctgaaccttgtctcctttaacctccacctctccaagtcttgtctcactcccccaggcttagccaccctgtgctgttttgggggctaaaaatagcaccacttcctcaccagctcaaagaatttgtcttctttctttctctcctgacctcctgggcttgctggccctgaggaagctggctgttgagacctcatatcctgctgtggttgtggaaggcttccctgccctacgtgcccctctcagggggaaatagggtcaacaaacatagagtatggctcctggtgggtcctgcctccttcagggctggaggggagatcctggttaggaaagagaggaaagctagcaaattgccatgcgctgaggggattccgcagttccagctctttcatgggggatggttgggccctgaaccatgaagaaaaggtgacataggggtcactgcttctggtcaccgtggtccactgcttacatctgtcctgaggggataaggcgctgcttgccagtgcttctctctgaaccacatagcattgcttaccgtcttctaccagggcgtgtgtgtgtgtgtgcgtgtgtgtgtgtgtgtgtgtgttttaatgaaggccctggatgggtgggagcaccggaggcaggatatttttagggggatgatttctgatcagaatctaggcctgcttcctctgctcctatgaaggaagggggctatcccatgccttcctctggagaatgtcttttttggggggacacccaaaccccctttattctacatccgcctcctacgcaatgcggtgtttgtggactccttcttccttgactcctggaggaggagcagaaaggattaagggggattaggaagggaggccctggagggatgggatgcaactgtaggccttagaacctcatgttggaaatgtatgcatttgacagtcatttccattctcacccccatctgtggaaagggggcctatctatgacattctgaagcaaggtggcagtggacagtcatcacctctttcttagctttccatctttcctccactttacttgggttccaggtcccccttttctggatcttcccttgttcttctggaggtagttaatgtgggcccagctactggaattagttgaaacatagataggggtgtcttgggactctgtttgcaaggatgctgggcaacagcatctaagtatgacccccctgttgtcccttgctgcttcctgtttctttcccactttcaacatcataggaaggaagaaaactaacatagagtatctactgtgagattacattctcacatcaactccaagaaacagtctcccaatttaattatccccagttaaaatagatggacactgaggcttagggaggttaactaccctgactgagatcagttagtaagtggcagagttgggatttcaacttaggtcacccctaacagtcatgtgctttgccctgaaccaggattctccttgccagtgtcccttcctgctgctcaccctaaagagcatccaagatagctttcatctggggaccttatgaggtagtatagggcatttcactatattactgtcaccacaaaattaataattaatatttattcatcatttttatgtgccaggtgacttatggtaaggagcatagatacattatatcattcgacccttactttcccctttttaaacaagaagaaactgaggcttggtcccttagctagtatttgccaaaacaggaagtcaaccccatgtctttgtgactctggaagctgagcatttacccattagactatgttgagagaaaatccctccttgttgaagcctgtaaacatgggacctgagggaaggacagtggaagcccctgccttcagatgccatcagaggagggaaggccacaggttggagggcttgtcctcttacacatcctcctcaactccacccctagtaagaaacccaggcaagactaaagaagggaattctggtttctcatatttcctgtttagttctttgcagattggtgataaagcaagggctggggtgggtttgggggtaggtgactgcgactttggagcaaattccacaggccaggcctccaaggtcaaagtaaggggacttctatgtgagtgacccggttagcccagatagccatccctttttagtgtgtggatgggagcctaaagcgagaagaccatctctgcaccacatggtccagatggggctctgggttgagaggctttatactggccttcttcaccaccttaggactcacaacttccttttgctgtctgttattttttctaggtctccagaggcttgtggaagagaagcaggcgacccttcctgagttatcctggcttagcctcccaatctggctccccttccccttcccattcccctgctccccctgtcccttccccatccacccaactgaactgggtataggtcaaagctcctctctttccttttccttcctaggcactcattggctaggacctgtttgctcttttttttgtgcccagagatactggaacacgcttcatctaagtaactgtggggaggggtctttttgactctacaagtccttgagcaaaaagctgaaaaagaagcaggaggtggagaagacccagtgaagtgccccaagccccatcatggaagagggcttccgagaccgggcagctttcatccgtggggccaaagacattgctaaggaagtcaaaaagcatgcggccaagaaggtggtgaagggcctggacagagtccaggacgaatattcccgaagatcgtactcccgctttgaggaggaggatgatgatgatgacttccctgctcccagtgatggttattaccgaggagaagggacccaggatgaggaggaaggtggtgcatccagtgatgctactgagggccatgacgaggatgatgagatctatgaaggggaatatcagggcattccccgggcagagtctgggggcaaaggcgagcggatggcagatggggcgcccctggctggagtaagggggggcttgagtgatggggagggtccccctgggggccggggggaggcacaacgacggaaagaacgagaagaactggcccaacagtatgaagccatcctacgggagtgtggccacggccgcttccagtggacactgtattttgtgcttggtctggcgctgatggctgacggtgtggaggtctttgtggtgggcttcgtgctgcccagcgctgagaaagacatgtgcctgtccgactccaacaaaggcatgctaggtaagacatggggggctccagccttatcccctcaaactctggaaacctccttgctcctggaaattgctcttgtccttaccactgggttccctaggaccctgcacccaagatgttcccagagggctcagggttcctctgcacactcttccctcacacactccctcttcttggccttgggtcagggtgaagttgaatgtgacagaggggcttgcgggagggcagctggactggggcttgggccagtggttgggtggtggtctgcttcattctgcaggaggtggctgtggtaggatggtccctaccatttaatgtttcttcatagctttccctctggttatcctgttccctttcactgattggggaacaagaagccagtatccaaactccttggtataaatggggagagtcagtttggggtggttgggggagggggggagggtcctggatcttctgccagagaagctggttagactttctctcactcagatgggagtttccaggggacaggatgtagtctttgatggcctttcctgacagggactctgaggaggaaccccgtagactcacagagaaagaatcgaggccttactctgccaccaaattgccatggggtcttggacaggtctcttcttcctggggcttggtttgggcatgggaaaatgcaaagtttggagtagatgattttaaagattaattccagctttggttttatgaaggcagtgaaaaacaggagagtttttggaccagaaatattgagactggaaggagtaaaggatggattttgtgtgggagatttcctgggaagatgaaatgaattggagcccctttccccaggaacaaatgagagctctcctgctgctttgagggatcaaagcagggagaatagagagg

SEQ ID NO: 4287 - DNA, 6000 bp, Homo sapiens
ccatcccttttctacttttctgcagctcagaggataaggattggttttggaagcagaaagttttcaatttcccccaatcagcaaactgtttaggtataaaaaaatttctttaatcagaaaggatttatcttccctcaacacaaatgcacacattaatagtaaaaatacatatatacataaatatttacacaaattagaagtcacagtggacagctgtatgccctgggctagaggttgagaagatgagcatcagcagcaactggaggatggcttctctgctgctcccggtgtcctatggtcatctttctggccaaggtgggtagactgggaggggatagggtatagctccagtctgatggcagagttactggcaaactgtagcaacgaggaccctctccagatagtttcataggctcaccagggatgacaggagatgctgtagtaggtgggactggggtggttggggcagagtgggtgaagggttgcactccatgctggaggaaaagaatgacgccaatgccggttccagtgcctaaaggaccatggctaaaggagatagtacctggggagctgagaggggggttgcaaattggagtggtgtggatccaggtgaggttcatagctggccattgtgtgaggtgccaaggctgctttggttttaaagctagatgtcctagctgtgtctggtccatcttttccataggagatgcaggagaggaagcagctgaatcactgtggtggcttggaaaatgctagagaggggagaaatgagaaaaaaagaaatgtggagaaagcattcagatgagctccacctggttacttaaacctttgcattccttgggaactcagtttgcaatgcaaacatacctcgttttatgcaacagatatgatcttgccaggccatgattaagtaaaagttttggtaactaaattatactttcatttattaaacaaataaatggcctactatggaccacatactatattagacactggatatccagagatgaagaaaaaacaaacagttccataggttctcactatttataaaataatcccttttagaatttctttgaagtctatttttaattggaatcatcatttcccaaattctgtatttaaattcgaatattctatcttgagttctttaagaagtgtaaattaatattcaggcaagatcctcctactgtttttttaaaattttatatttgagacagggtctcactctgtcaacgaggctggcacaatcatggcttactgcagcctcgacctcccaagctcaagagatcctcccacctcagcctcccacccagcctcagctgggactacaggtgcacgccaccatgcccacctactttttgtattttttgtagatagcagccttcaccatgttgcccaggctggtctcaaactcctgggctcaagcaatcctcctgctttggcctcccaaagtgctaagattacagtgagccactgtgcctggcctacttattttttaatagattagtcacagcaataataaccatggctgattgaaaattaggactggtgattatctacaggagactctccttctccgtcatttgaatgccctctacataccctattatttgaggacagaaaataggtcacttttttttttttttttagatggagtttcactcttgtctcccaggctggagtgcaatggcacgatctcggctcaccgcaacctctgcctcccgggttcgagcaattctcctgcctcagcctcccgagtagctgagactacaggcgtgcgccaccatgcctggcaaatttttgtatttttagtaaagacggggtttcaccatcttggccaggctggtctcgaactcctgacctcatgatccacccgccttggcctctcaaagtgctgggattacaggtgtgagccaccgctcccggctgaaaataggtcacttctataccaggtctaagaatctatcaacactgctgctattggtgcccccctcccctacttccagtgaggtacctcttatgaccagtccttgaaacccagtgtagactcaaaaactgtcaaagggtttggcacaaggatacgtgggcagaaatgaaaagaaggagaagggaagggtttgggggcagtagggaaaaaagagtttgcagagagaagctgaggtgtattcccgcatgaatcatttggccaggtaaaaagccttttgtatctacgcagaaagcagataagctgtggcatgagggataggattaaacttcatggagtttctcccagtgattcaaacaaaacaacaacaacaacaacaacaacaaaacatgtaggaatcaagacaatgcagaaagtttaggaatttccttccctgaaaagaaacttgaagaaaagactcaaaagaaaatggcaaaaggggccatttctgcatgcacatttcattttcttggctattttcccacctcttcctcgtgttcttaagttcttaccttggtcagctgatgcttgccaccacccaatgatgacttctgggcagctatttgtggaaaccaagtctttaacatcccttctacctgtagcaaggttcctaggtaacgttccctgtgaaaatgacgttgctttaaaaaaccagcaacaggattggagaaatctcctttttatgaagacccaagcaaagaaccagcgggacttaccccatctgtggcttctgcaaaacacctacaatacgctggatcctgtccattgccacactctgctgaaaactgcttaatcctggggacagggacagagagagattaaggattgagattcaagcatgtagtcaggtaaaggaagaacagaagggggttaaaattgattgatctaaaaaaattaagtcgggccaggcaaggtggcttacgcctgtaatcccagcactttgggaggctgaggtgggtggatcacctgaggtcaggagtttgagaccagcctggccaacatagcgaaaccccatctctactaaaaataacaaaaattagctgggcatggtggtgggcgcctgtaatcccagcgactggggaggctgaggcaggagaatcgcttgaacccaggaggtggaagttgcagtgagccgagatcgcgccattgcactccagcctgggcaacaagagcaaaactccgtctcaaaataataataataataataataataataaagtcatagtagcaaaaaaggagtaatataggccccaaacaagaacttcagagaaatacacgtcaaaagagggaaagagaaagagaaatgaacctagcccaaatgaatgcaacaataagattacctctctcaaaacgacccatcttcagcccattgagtaggtctgtgagaggaggtataaatccttggagttctttacactgtaggaaaataggacaaaggctgtaagaagacaaaaaactgcccacaccagcagtggctcttccttcacctccaaatctgggagtcaatactgtcctcacagggtccttatcaaccagctgggtgctaaggcactccaggagaatctcctttcacctgctttctcttaccttctgggcaaacagcaggtctccctctgtggtacaaccttgggtgtttagactggtctccagttcaccatctcttgatcttttcgccccagatcctgccataggagaagccgaaccccgctgtttcggatgagatggtgtatgctggttaccggaaaccttcgatcgatgcctgcagcggataggacccgggctgggccgtgaacctcccctctgcccaacagtgtctggcctgggcccatgggcccccttgtcctccctctcactatcagaggggaagccaaagtcactgttcactggggaggtgggaaaagacgaagagagagagtaggaggaataggaagaaacgctagatggagaatccataggtccagaagcaggggctatagaacagctcctggagtacccaaagatcggaacctgcaactgaagagcaaagcgagggagtttgaaaccagagtttaaggattaggaaatgaactgggagattggggtgtactgcgtgggataatacttgttctccccctccccaatattaccggtctcaaacacaatagaaaaagacatttctacccccacccccgcccattaagagcttgggattccctctctggccgccgcagagcagctctcggtctgacgcggcctccgttcttttcttccctcagttcagagtaaataccgacttgaaagacaccttcccctccgcccgttgttcgccagggctattcgccagcctgagtccgcagcaagcctctccacctgaggccatgccacccacaagcagtcaatctgggcacgcgaacccacctggtgatcctacgggaaccgcccccatagagactggcctcctgccctctcccaatctttcaagatcaggatccctgcgccggtctctctgggctcgcacctgccacgtgatgcaaaccctcccaataccaagatctgcattcagcccccaaatccactcccaaatactccctaacagctcgctttgtcctccgaatctccttacctgttgtcagccggctcagccctggctcggtttccagctccttcgccgtctctccgggtctatctacccacctccgcctctctcagtgggccccgccccttccccccctcccagacacgtgcggcccggcacgtgcctccccctgcttacacagatctcgcgccctcattggttgtgtcgccggtaacacgtgactctagttactgaagtccatagcccatttgctacagtacaaaggggctcagccagtagagaggcagccaggtgatgattggctgtaagggaagcattccgtgctcctcccctacatgcggctgctggagaggacccggtgatgagaaaaggaggaggatggaaaaagagtggaaaagaagggaggggaggaaaagggcggagcccgtggccttaaataggatggtgatgcgccagagatgcgcggtttgagtgttcagagattggttgtgctactgaaggcggcggacgtgggacccccggttccgtctcgggaagtaactcatctgccccctctttgaacacctccgctcacgagcgcagcacgtggaaaccgtcagtgatttgtgtctgcaacgtgtgtgagagaatggaggtgtgtgacacggtatattctcctgctctcggcggcccagccctcgtgactctccggtctctgtttcacctcccccacccctttctcctccaagttgggtgcctcctgccctgctgggtgaggagggtggggattgcaaccgagaacaccgcgtcctttctggctcccgctggggcggctcctccatcccttttcttacataacctaccacgcacgttaccagctcagatgccagcccgccacgacgctagaggtcaaaacgaaactcagtttttcctgacttttttatccaggcttctcgggcccggcgtcctaaattatctgattccaagcacggggaacagaatggggtaggtccctgatctcctaggttatggttttgtccagcttcagtcccttcatttgtccgctggagaagattcgaaagactttgaaggaggggagggaggcaagtccagagtttagagagtctcagaagtaactgggacgttactattgtcgttgcgccttgcattttgagagtacaatggagaggagagcagggcccaaggactgtgagctggttgaagataggacgtcggagagaccgcaagggggcagcccaattctaattagggtcccgaggatagcgaattaaaaaaaaatttaagtgagtttgtccctgccataattaccaactgcaaaaggcacattgttggacagaggtgtgggtaggggtgggtaggtgtgaatattttaagtctattctaagtagtttttgatattttaccttatgttttaacaatgtgcttattcttataaaaagaaaaaaagattctaaaacctcaa

SEQ ID NO: 4288 - DNA, 6000 bp, Homo sapiens; identical to SEQ ID NO: 490

SEQ ID NO: 4289 - DNA, 6000 bp, Homo sapiens
ttcaggagagtcaggccaatggggccgcagttctttcttttttttttctttattcttatttttggagacagggtctcgctctgttgcccaggctggagtgcggtggtgcgatcacggttccatgcagcccccgacctcccgggctcaggtgattctcccgcctcagcaccgcgagcagctaggaccacaggcgcgagccactgcgtccggccggcgggacttatttgtcaggcggggattgggttccgccagcctaaagggaggggtaagcgccagaatatgaatcgccgggaagctgggagaaagctccgggaaaccctgagcagccaggtttgtcttcgcgcgccacgtgactcggaagctccggtttcacccaggcggggagtcaacagcccgctgaccccagtggagcggtgatcctcgctcggcaggcggcaggagcgcgatggcgggtttccccgtccgcaagccgagcagtgtggcgttaatggagaacagcagctgtgcgcacacgctcgctgcacgctgctcattcacggagggacacggggcaggaaaactgcaacaagttaaaaagccttttgcgtttgttgtcttattgtttgcatacagttaccgggaacattatgtcccacacttgtataatttacaaaacgttttcataaaaattgttctcttccttaatccataacagttctgaggcacacacggcgggtaatattttgcaaattttacctatgaggaggcagatccatgactagaaagtagtaataccaaaactcagggttgattgattatttttatttttttgccttggtctaatgtctgatggtccaggaattcacttcaagtaaaacaatggaggtaaactgatacaggtatggttttcagtagtatttcagaaaagggtagctgggtgagtaaaacagtagtttggagtgtgaatcccagaactcaaactgctactaattatccttatgaagatttgaacgggctaagggtaaaaacgggaacagggtctagtcaggcatttccatgttactcatataattcttacagcagatggagctgacaagtttgtttgtttgtttttcttttgctctgtggcccaggctggagtgcagaggctcgatctcggctcactgcaagctccgcctcccgggttcacgccattctcctgcctcagcctccctagtagctgggactacaggcgcccagctaatttttttgtatttttagtagagacagggtttcaccgtgttagccagggtggtctcgatctgacctcgtgatccgtccacctcggcctcccaatgtgctgggattacaggcgtgagccaccacgcccgtccgagctgacaagtttaagtaactttctcaaggttaccctgtaagtagctgaaccaagatttggatgcttcagcccatgttcttcacactatcaacccaccttgtggggctttctcagatttcttatctgtctttcccgctcatatctctccatcctgctcaagtagtgaagagacaaagcagccttcctagattgatgcagagctccaaggaaagcaaagctgttcttgttgagatcattctgagagcgagaaaggtggttaaatacatttcaaagggcttcctgcgggctgtatgtgcagagatgatttgagtggggaatgtagttagcttccgttgatgttagaactggaaggaccctctgcagtcatctgcttgtttaacttcctccttgcccctgatttatcaaactctggtgaggaaaactgacttgcctaaaatcatacatcaaggtaaggtaaaattgaggagatctattgggccgggtgtggtggctcacacctgcagtcccagcactttgggaggctgaagcgggtggatcacctgaggtcaggagttcaagaccagcctggtcaacatggtgaaatcccgtctctactaaaaatacaaaaattagccgggcgtggtggcgggcgcctgtaatcccagctactcgggaggccgaggcgggagaattgcttgaaacctgggaggcagaagttgtagtgagccaagagcatgccactgcattccagcctgggcaacacagcaagactctgtcaagaaagaaaggaggaaagaagaaaggaaggaaggaaggaaaaagaaaagaaataaagttgccaagagattttaaatgttctcatcacaaataaatatgtgaagtaatgcatatgttaattagcttgatttacccattctgcaatgtacatatatttcttttcttttttctttttttttgagacggagtctcgctgtgtcgtccaggctggagtgcagaggtgtgatcttggctcactgcaacctccgcctccccggttcaagcgattctcctgcctcagcctcctgagtagctgggatcataggcatgcgccaccacgcctggctaatttttgtatttttagtagagacagggtttcaccatgttgagcaggctggtctccaactcctgacctcgtcatctgcccgcctcggcttcccaaagtgctgggattacaggcgtgagccaccgcgcccggcccaatgtacatatatttcaaaacatcatgttgtacaccataaatatatacaattattaatcatatatgacatatgtatgtgtataaataaacaaatatatatatttgacaactataaaggtagaacttggaccagaatccaggtttcctgacccccccagtcataattccttgttaatgttaccaattacgaataatttttttttttgagacgaagtttcgctgttgttgcccaggctggagcgcaatggcgcgatctcggctcactgcaatttccggctcccgggttcaagcgattctcctgcctcggcctcccgagtagctgggattacaggcccccgccaccacgcccggctaatttttgtatatttagtagagacggggtttcaccatgttgaccaggctggtcttgaacttctgtcctcaggtgattcatcctcggccttccaaagtgcttggattacaggcgtgaaccaccgcgcccggccccttaagaagtcttcacattcctcttttacttaaggaattactgggcttcgtttctggagccttgtgagaagcattacactgtccccccttttttttttcttttttaaaattaattttcctgtaggaagcaagatcccatctgtcccttctttaggcaatgaagcttttttcacctttgcataaaagaacagctgagccccctttttaaattttcttttgtcttaccgtcccttgaggctagaagaggattctcaaggcacagagttgtgggccacaagaatccaggttgaggaaacggtgaaagtcctgagctgaaacaactaccttggggcattcaaggaacagcaaacagcaaaccgaccggcgagggtggcgggagctgggctggaaatcaggtgggagaaccggccagacgcccgcaggcgcggtacgcagatatcctggaatgcgctgggggctcttccctgggcgcggcttcagcaccccgcattccggtcccaccacgtccccacccacctggagaaggcggaggctgcactgagtgccataagtagtcgagaagggatgattttcaagacataccctctctttgctttcccccctttccaattctgccttgtctttttccttgttgtgggtgctggtgagggaaagcagtcaaggaagttggtcccaagaggggaatgctttcccttgggcgccaagaggcactgacgaggtgtcagagccttctgagggacagatgagactttggcccaaggccaggaagatgttttcagatgtgggccggaagacttgacaatgcggggtctccctcttttaaaaatatccatataatcaaagcctttgttgactggcccgctccggcccctcagtcctccacagatgcgccccagggccccagccccgaggtccttttcctaatatccgctcttgctctcgctcactctcctcaggtcgcctgctccgcccgctcccgctcccgatctctgattgctcctaactgacgtcactcccggtctgtccccgcccactcggtgctgccattggcagtcggtcgtgggtacgcggctcctgtgggggaggggggagctatgggagggggcgggaattcccgactctaggccggaagcgcgcggagaccatgtagtgagaccctcgcgaggtgagtgcgggctgtctggcagcggggtccatgtcggctgcccaggcctccccgggcccgggaacaggagtcccagctcacgcattcttcatctgcttcccgcgacgcttggcggcctcgcaccccgcctcctggagcccggactttcaggcaccgccctcagtgtcgcctcagtccgtcccgggaccgcagactcttagggcccctctctttggccatctgcctctaggtcccatcctggggcctgaagcgcttgttctctgcgctgggaaaaggggaacgatggagcgatccagcacccaaacttaccctgtccaggtggcccacgaagctacccaagacatctctgcacagccctagcctttttggcttcacccactccgttcgggagttggggacccggcctctacattccttaggggaactccagctccaggtcctatttggaggcggctcctagtttcctagttttctgggggcaccaggtgaaagggtgatgagatatccatacagcctttctcatgcctcggtttcccccgtgcagtctccctgaataagtcacttgggaaagaaagtgtgagaagagaggaatgttcctggtacaggagtagatgagtcaccctgggtaggggaaggtcacaaagtggctggggccagggagctgcactctgctgaccaagcttccccattccttgccccatcttcctttgcatgatttttcccaaccactctggtctgtcttcctaggtctgagagtcactggagctaccagaagcatcatggggccctggggagagccagagctcctggtgtggcgccccgaggcggtagcttcagagcctccagtgcctgtggggctggaggtgaagttgggggccctggtgctgctgctggtgctcaccctcctctgcagcctggtgcccatctgtgtgctgcgccggccaggagctaaccatgaaggctcaggtaagcctctccttttccccacactgctatgaatgcttggcttagggagggctctggggctggcggggagtgaccaaaggaggagggaaaggcaagggtagccattgtttgggttggggtggtcggccctggagggggtttgtttgcttattcccctctgtgcttcacccctacccagcttcccgccagaaagccctgagcctagtaagctgtttcgcggggggcgtctttttggccacttgtctcctggacctgctgcctgactacctggctgccatagatgaggccctggcagccttgcacgtgacggtgagcactggcctgggcatgtgacttgcgggaggggaatcacacacctctgggagtgttggtttgtggagattgattcatgtgccactccatgactgtgtggaagacttttggcatgtggtatgaattgtgatttttggttatggggcataattctttctatgtgttccctcccccttccccattccctgtgtgacccctacattcccgttgagacagtaagacactttttctcaggtgtgtgacttgctctatgggttctcagttctagctaccagcaagtgctccaagaatcatcttcactctctcaccactttcctaaagggctggagatagaggtctctgtaggcctgagaaggataggaagcgattccctgggtcttggtgttgctaacctttttaggctttggcccaaggaagtgggctgtgaggaatgatcaagtccacggcataggacttggtttattataggaaaaactgaggccgttggatagtggggcagga

SEQ ID NO: 4290 - DNA, 6000 bp, Homo sapiens
gacgggttttctccatgttggtcaggctgatcttgaactcctgcatcaggtgatccacccgccttggcctcccaaagtgctgggattacaggcgtgagccaccgctcccagccggcaggacctaacttttacttgtcttttgcccccagaatgcctcggctggggtggagcgcctcttgctggggaacaaatgtgacatggaggccaagaggaaggtgcagaaggagcaggccgataaggtgagggccaggctgagcaatgttctagaactgggctgggagggccaagataggttgcattgcagaggacttggctgctgtccttaattcaattctcttcccacttcaccccttatagttggctcgagagcatggaatccgatttttcgaaactagtgctaaatccagtatgaatgtggatgaggtgagatccacacccccatccccgaccaagagaggaagtattagaaggtagattctcctccctccaaactgactctgttccccactttaggcttttagttccctggcccgggacatcttgctcaagtcaggaggccggagatcagtaagttggttttgctggactaggtacaactctggggtgtgtgtgtgtgtatgtatgtgtgtgtgtgtgtgtgtgtgtgtgtgtgtgttggtgttgataaaaacggggagcaatgctaagatttctcatgagggtggatttactttaaacagtttataccctcctaccctaaccatccattcacaccatgacacctgtgcccttctccctctagggaaacggcaacaagcctcccagtactgacctgaaaacttgtgacaagaagaacaccaacaagtgctccctgggctgaggaccctttcttgcctccccaccccggaagctgaacctgagggagacaacggcagagggagtgagcaggggagaaatagcagaggggcttggagggtcacataggtagatggtaaagagaatgaggagaaaaaggagaaaagggaaaagcagaaaggaaaaaaaggaagagagaggaagggagaagggagaggaatgaattgaggaagtgaaagaaggcaaggaggtaggaagagagggaggaggaaaggaaggagagatgcctcaggcttcagaccttacctgggttttcagggcaaacataaatgtaaatacactgatttattctgttactagatcaggttttagggtcctgcaaaaggctagctcggcactacactagggaatttgctcctgttctgtcacttgtcatggtctttcttggtattaaaggccaccatttgcacaaatgttcctgttttgggtaacttggattattgtcagaattgttctccactcaaatccaattattgtgtcttcaaagtgattgatttacccaaatcaggctcggtttctgtggaaccaggactaatcctactgctgtctcttccctagctgttctgttggtaaggaaaatagcaaagagcaggaggtagagtgatctgaaggtctggatatcctctttccgccatggggtccggatgcccttgtgggcagagccttgtcctgagcacaggaaattcccagcgagaagaactctaacagtcctagcctcagggaaataactgcacctagtgatttatccagtgatttgtgcaagcttctttgattctgccagcaatccatttagttatttgataggcattaatatctgcttttattagtgaggaaaatgagaagttcatttattcatatatgtatattgagcatctactaagtgccaggcacaatggtcagttattttatttatttattcatttatttttagggacagagtcttgctctgtctccgaggctggagtgcaatagtgcgatctcagctcactgcaacctctgcctcctgcctcagcctctcaagtagctgggattacaggcgtgagccaccatgcctggccaatagtcagttaatatagccctttggtggtacttacaagcagagggacaaggactttttttcttttttaagaccgagtgtggctctgtcgcccagactggagtgcagtggcacgatcccagctcactgcaacctctgcctcccgggttcaagcgattctcctgcctcagcctcccgagtagctgggattacaggcacgtgccaccacacctggctaacttttgtgtttttagtggagacagggttttgtcatgttggccaggctggtcttgaacgcctgggctcgagtgatcagtctgcctcagtctcccaaagtgctggggttacaggcgtgagccactgcgcccagcctgggacaagcaaactttaacaaaaacagctctttggctgggcgtggtggatcacaacaggagttcaagaccagcctggccagcatagtgaaaccccgtctctactaaaaatacaaaaaaaaaaaaaaattagacaggagtggtggagggcgcctgtagtcccagctacttgggaggctgaggcaggagactcacttgaacctgggaggcagaggttgcagtgagttgagatcacaccactgcactccagcctgggtgacacagccagactctgtctcaaaaaaacaaaaacgaaaacaaaaacatctctttgctgaataacaaagatggcaaaactactggaaatgcaaaagaaaattcaggcttgggccgagcacgttgtttcatgcctgtagtcccagcactttgggaggccgaggtgggtggatcacttcaggttgggagtttgagaccagcctggccaacatggcgaaaccccatctctactaaaaatacaaaaaaaattagctgggcatggtggtgggtgcctgtaataccagctacttgggaggctgagggaggagaatcgcttgaacctaggaggcagaggttactgtgagcagagttcgcaccattacactccagcctggagacagagcgaaactccatctcaaaaaaaaaaaaaaaattcaggcttgatgcacagcatccttaagtatatatatattatattatattatatattacaatgtataattatatatattatatattaaatatataggaaatatataatatatataacatgtatatgtttataaacatataacatattatatataatatataattatatattatacatatatattaaatatatattataattatatatttaatatataatatattatgtttaatatataattatatataattatattatgtttaatatataatatataatacatattttaatacataatatatatatatccccctttcaccatacataatattttttacacagcaaaatgtaataacttgataaatgtaagtatccaagcattgatgaggtaatgataaaccttatttgtggcttatgcttaagttcttttttttttcttttgagatgaattcttgctcttgttgcccaggctggagtacaatggtgtgatctcggctcaccgcaacctctacctcccgggttcaagtgattctcctgcctcagcctcacgagtacctgggattacaggcatatggcaccatgcccagctaattctgtatttttagtggagacggggtttctccatgttggtcaggctggtcttgaactcccgacctcaggtgatccgcccacctcggcctcccaaattgctgggattacaggcgtgagccactgcgcccagctgtgtttgagttctgtagtaaactgtccggtaggtttaatttgctcaagcgatgaggaaaagacttgcactttgtgcctcctgggaaagagactaacgtcttcaacataccttatggcagatatttaatttcagagtagagaccccactctgatgcctggtaaggttattggaagtgaaatatcacaagatcttacagtttgttgtgagataaggtaggatttggtgaggagtaacaaatactagcagatttcggcccaaacttcaattatagctaaacattactggaaaaaaccccacaacctactttatgtaacatataactactcacacacatacacaaaaataatacacacacaatttcagcaaacacaaataataatttaaagaaacaaattcaaaattagagccaggtatggtggcacatgcctgaaatcccagctacttgggaggatccctgaagacgagaagttccaggctgtaatgcgctatgatggctcctgtgacttgccactgcactccagtctggcaacatagccagagtccatctcgttcaaaaacaaaaacaaacaaacaaaaaacggcgaaatgaaggctcagccctcatcaggtttaggtgacagagctagaccctgtctaagaaaaaaaataaaattaaatgaaaattcgttatcagacagtaaagcatgaacccacagtgctggtcaagtcactgcagatctgagtgtgtatcaaggtttaactccataagatgaaaagcaggcaatgaatctttggcctgggtgttgacagtctaggctcaagcctcagctttcccactcattagcttgctgaccttggacaagtcacttatattctctgaacttactcatgaaacggagatacatttcatctgcctctcgcaagaaaaagtcctggtaaatacacattagcatttccgttttacacagaacactgacagatactttcctaagatcatggagttaataaccaccagaacctagactcaatacttatggaacttcaaatctcatgcttttctcattgcacttatgattactccattatgtaggagcaagggagagttgagagcatttgaagaggttatgcaaaggaccagctctgaggagtaggcttagcaaagtaacatgagggaaggtaacaccgttcatctgtgtagcggagtgggagccaagagacaaggagaaagtttcatgttcgtcatgtgtctcggatattccggtttctgcagggacgagaacgcgcagtttcgcctccatcccttgacctccaacacagcttctccactggatcatcggtggcgatgaaggggcggctggggaaggatgtcagagaaaccagaagcttgacggtgaatcctcgggttttaaggagagagcaaagtcctgagagggcgacgtattgtccctgctcacctagcccagaatgaacaaacacgcgccagccagggagcagcgagccgagaattcggacgagcctctgcaaccgccatttgccgttctcgcaaagactaccaagaccacaatgcaacggggcgccgagctaattcccagtgagcagcaggcgaggcgccaccgacgcggaagactataagccccagcgggcgacgaccgaacgcccccgggaacaccgggccccgagctcggtcccgcgcccgaggatcctccacggggctagatggctgcgtcgggggcgggagcggaggtgagcgggcgctagggccgcgagcccccgccggcccttcctccagcgccctgcggaccccgcagaaggcgctcgcctccctagcccgcaaaaacatatcgatttttctcgctgtggcaacggggacgtcctgatagatcctctgctccaataggcaactccggccttccctgccctgacctggaacctctgggagggctgcagagtaagtgccgcctctgcgctccgacggaggcacgaggcctgtggagtaggtccctctgttccgacaggtgcgacacttggcgctccatgcttgcgggtgccgggaggcctggcctcccccagggccgccacctctgctggttgctctgtgctttcaccttaaagctctggtaaggaggaggtaaggggagggaaaaggaggtcactggaggacaggatcgttcccggcctcggggctgggggagatcttatccatggacagcgcaggagggggtgccctattttctgggttttgacttttgtcccttcccccaactccgctacagccaagcagaggctcccgtgcaggaagagaagctgtcaggtgggtgattgtctggga

SEQ ID NO: 4291 - DNA, 6000 bp, Homo sapiens; identical to SEQ ID NO: 1549

SEQ ID NO: 4292 - DNA, 6000 bp, Homo sapiens
cccgggcaatttttgtattttttagtagagacagggtttcacccttttggccaggctggtcttgaactcctgacctcaagtgatccacccgcctcggcctcccaaaaggatttattttttgaaaccagttccacagctctcagcttggtccacttatctgtcctccccaagcttcagctgtcacttgttaaacatgtataataatagtacttcaggccgggcacggtggcttgcacctgtaatcccagcactgtgggaagctgaggtgggtggatcacctgaggtcgggagttcgagaccagcctggctaacatggtgaaaccctatctctactaaaaatacaaaaattagccaggtgtggtggagcgcgcctgtaattccagctactaacagagaggctaaggcaggagaatcgcttgaacctggaaagcaggggttgccgtgagccaagatcatgccactgcactccagcctgggtgacagagacacactccatctcaaaaacacaaacaaacaaacaaaaaacatgtataataacagtacttcagccataggcattgtactcgaagatgctgagaaaggagacagtggccgggcaaggctgttcacacctataatcccagcactttgggaggccaaggcaggtggatcacctgaggtcaggagttcaagaccagcctagccaacatggtgaaacccccatctctactaaaaattgaaaaattagctgggcctggtggtggacgcctgtaatcccagctactagggaggctgaggcaggagaatcgcttgaacctgggaggcggaggttgcagtgagctgagatcgtaccactgcactccggcctgggcaacacagtgagactccatctcaaaaaaataagaaaggagatagtactggggaacgctcagcactgtgcgccaggtgctgaacaacaccactgcagtccttgttgtggtggattgtaccatctagttgctggctaatatggacagagatgctggccctttgattggggatggagcgtgggagctgtgaaagctcctctgggcttgagttcccacaggagggtgggcgtgtccacagaacacttccactcactccctgtctccctttctctcttctccccagctgacttcagggacctttataccaaagtgcttgaggaagaagctgcttctgtttcctctgcagatacaggtcaggcatgtggtttgcgccccagggatggggattgggcatggctgcccagccccctctccaccctacaataccattctcttatctctgtctctctgcagggctctgctctgaagcctgcctcttccgcctagcccgctgcccttcccccaagttgctacgtgcccggtcagccgagaaacggcgccctgtgcccaccttccaaaaagttcccctgccctcgggccctgcacctgcccactccctgggggacctaaagggcagctggccaggtcggggcctggtcactcgtttcctccagatatccaggaaagccccagaccccagtgggactggagctcatggacataagcaggtaggaattcggggagccaggaaagatgtttgggaaagcgtggagcttcagattgagccttattgatgatgccctttcttgtgtccctgtccaggtgccccggagcctgtggggccggcctggccgagagagcctccaccttcgcagctgcggagatctgagctctagctcttccctgcggcgtctcctgtctggccgcaggctggagcgtggtacccgcccccacagcctcagcctcaacgggggcagccgggagactgggctctgacctaggcttcttgtcacactgaacacatccagccacaggcaccagctggttgggaccagcagcccccagcatcctcttgcactggctggcacaaaaagaaacctgctgtataccccccaaagtgtccctttccctcctacctctggggtctcttgctgcttgcctctgctgctctggactgggagagcttctgtcctgtgctgcatgggtatttagactgtgggggagatgccccttcttatagcactggaggaggaaaacaaattcttgtccccctcagaatgagagtggctctttctgatttgcaagggcactatggtcagggcaaaggcatggcccaggtgtttaagtacagggtgacgtgtgcctatgcaatggggtggtaaggcaggcacgaagagtccaaaaaatctaggtggcctctcagctctgccacctctagctgcatgaccttgggcaagctatgtaaccccaattgcctgctccattaaagactgtgaaggtagaatgtttgtaaagctcttaacagtatgtaagccttcaataaatttcagttttccccttgttttcttgatcattctctgtcaccagtgaaatttgttctagtgtctctcatatttaagaaaactctttcaggactgggtatggtggctcacacctataatcctagcactttgggaggccgaagcaagaggatcgcctgagcctaggaattcaagaccagcctgggcaacatagtgagaccctgtctctacaaaaaacaaaaaattagccaggcatggtgggacacgcctgtagtcccaactactcaggtggctaaggtgagaggatcacttgagcttgggaagtccaggctgcagtaagctgtgattgagccactgcactacagcctgggcaacagagcaagaccatgtctcaaaaaaaaaaaaaaaagaaaaaagaaactttcaagacactctttccaaccactaattgtaactctgctcctccttttcacagcaataggttttctttttcttccctccactgttaaacatccattctctcctcacccacccccatcagactccttcccctatctttccacagccactgctctgaccaaactttccagtgaccacagtggtgtcagacccagtgaccatttctctgcctgcatctcacttgacctcgaggcagcaattaatacccataatcagcatcttcttgaatttgtccctttgaaaagggaaatattggctcttctactttgtcctgctgaactgcttaacattggagggccccagggccctcacctaagccctctttcctacctccactctttctataggtggccctactactaaagtccatggctttaaataccatctttctatgtgttaatccataactccagccttgacctcccatgagcgccatccaactcagcatgtctgcttggatgtctaatgggcatttcagattcaacatggccacaactgaactcttgattcccaccccagcaccggttatttttccactgttcccatctcaatggcacctccattacccatttgcacattccaaaagctcaggaaccatggtgacttcttttcccatatccaacacaaccaatcctatcctgaattcatccacatcccaccacctccccagctacctagctccagccatcctctctccacaacctctgaatcagtctttcacttttcccagcaatccattctccactcagcaaaatgatgataaagcacgtcacatcaaggctctgcctcaatttaatggcttcccattgtatttagaatcatctccaaactcccagagactatggtcagctacaatctggcccaccttctgttccagccaaatttcctcacagcacaaggacgtttgcacctgctgttttccaagcatgaaacccttggcccctatatctggtgctatcacctaatatcaggttttagctccattctcaccatttcagtgagcacccaatccccatcgcagtcattctatcacatagccatgtttttttttgtttgtttgtttcattttgtctttttttgagacagggtcttgctttgttacccaggctggagtgcagtggtgtgatttgggctcactgcaaccttccacctcctgggttcaagcaattctcctgcctcagcctcccgagtagctgggattacaggcgcccgtccccatgcccgcccagctaaattttgtatttttagaagagatagggtttcaccatgttggccaggcgggtctcaaactcctgacctcaagtaatccgcctgcctcggtctcccaaagtgctgggattacaggtgtgactcaccgcgcctggccacatacccatggtttcagcatgtatcactatctaaaattattatttttgtttatatatctgtgtcgtcccatagaatgttaaggtcccaagatcagaaacttgctcattgcagtgggtctaacactcagtaggtcctcaacaaacattcgttaagatactaaagtggcagggtggggccctgtaaacagcttcaggaccctgtgcttgtaggggcaacgtggtgccctccaaggaagacagggaggtgggaggagcactgcccagagatggcgtcaggctgcaagacttcttgaataattcagcatcataacaacccagcctcaggaagggatagggcacggccaggacgaaacattaggaggcgatggacaatgggattcccacggggcagcttctgcgcactggacgttccctaacctgaggctctctaaagaggaaggttaggaatcctctgagcttcggtgggctggactcactgtgggaattcaatcgcccccatccaccaacagtgtgctggcgggaaaacgccgacacgcatgcgtagttctcgcgccggctcctctctctctctctctctctctcgctcgctctctcgctctctcgctctctctcgctcgctctctcgctctcgctctctctctctctccggctcgccagcgacacttgttcgttcaacttgaccaatgagacttgaggaagggctctgagtcccgcctctgcatgagtgaccgtctcttttccaatccaggtcccgccccgactccccagggctgcttttctcgcggctgcgggtggtcgggctgcatcctgccttcagagtcttactgcgcggggccccagtctccagtcccgcccaggcgcctttgcaggctgcggtgggatttcgttttgcctccggttggggctgctgtttctcttcgccgacggtaggcgtaatgaatatttcgacctttggatcttagctgtcccctccctgcgttcgcacttaacctttttcaccattattattattattgttattattattattttttgagggagtctcgccctgtcgcccaggctggagtgtaatggcgccttcttggctcactgcaacctccgcctcccgggttcaggcgattctccgacctcagcctcccaagtacgtgggattacaggcacccgccaccacgcacggctaattttttgtatcttttagtagagacggggtttcaccatgttggtcaggctggtctccaattcctgacctcgtgatccgcccgcctcggcctgccaaacagctgtgattataggcgtgagccaccgcgcccggccaaccatcattattatttttaacggtaaggatggtcagattttactaatgaagaagagattataaaatcttcaagtctttatatccacttgctttttgaggggtggagtgggaagaaggttatgtaattcatacgttcttcagacatgtgacaaacattcacggagcccggcgacgagcgtcggggttgggattcgcactggagctgcagatgggtgccaggatggactggtccctaccctccgcttgaacctaggaggcggaggttgcagtgaaccgagatcgtgccactgcactccagcctgggtgacagagatactccgtctcaaaaaaaaaaacaaaacaaaaaacaagcggactgggcgcagtgcctcaccctgtaatcccagcactttgcaaagccaaggcgggaggatcctttgagtttaggagtttgagaccaacctgcgcaacacagtaagaccccgtctctacaaaaaatacagaaattagccaggtgtggtggtgtgcgccta

SEQ ID NO: 4293 - DNA, 6000 bp, Homo sapiens
aaaaacacaaacctgggctctggagtcagactgctgagtttgaattttagagatactgcttactaaccatgagcttttagggaagttacttaatcttgaatgcctcagtttccctatttataaaatgaaaaccacgtttgcatccgtttgacagggttgttgtgaaggttaaacaaaatatatgtgaagtacttggtacagtgcttagatgttttaaataataataaacagtattaatttttccactctcacttgtctccttggaccccaaattggagataaaagagaggatccagggctgggtatggtgcctcacgcctgtaattccaacactttgggaggccgaggcaggcaggttgcttgagctcaggagttagagaccaacctggacaacatagtgagatcctgcctccaaaacattaatgaaaaaaattagcagggcatgatggtacctgtctgtagtcctagctcctcaagaagctgaggtggacggccaggcgccggggctcatgcctgtaatcccagcactctgggaggccaaggcgggtggatcacctgaggtcaggagttcaggaccagccaacatggtgaaaccctgtctctactaaaaatacaaaaattagctgggcgtggtggcatgtgcccataatcccagctactcaggagactgaggcaggagaattacttgaacccgggaggcggagattgcactgagccaagatcacaccactgcactccaacctgggcaacaagagcgaaactctatctcaggagaaaaaaaaaaaaaaaaaaaagctgaggtgggagggttgcttgagcccaggaggttgaggctacagtgaaccatgatcataccactaccttccagcctgaacaacagagaccctatctcaaaaaaaaaaaaaaaaaaaaaagagaggatccagggatggagagaagggggagtgattcctttgttggtctctgttttacttctggggtccacctgtttttttgtgccttacagctcgacagaacaattggccccctctaccttctttttgtccagttcagccctgctttttccaggacatctccatggagatcccccaagaatttcagaagactgtatccaccatgtactacctctggatgtgtgagtagtgagaagccttttggaggaagttacaggtagatctcttaactgccctggggtccgctcaccaagaaccaaacacttcacctctatttagaactcaccagcctgctagcaaatgttcttgccctctccccactttttattgtccatatgcaggaatatattttgaattctttagatgtctttgggctgggtgcagtggtatacgcctgtaatcccagcactttgggaagctgaggtgggtggataacctgaggtcagaagtttgagactagcctgatcaacatggagaaaccccatctctactaaaaatacaaaattacctgggcgtggtggcacatgcctgtaatcctagctactcaggaggctgaagcaggagaatcacttgaacccgggaagtggaggttgcaatgagccaagatcatgccattgcactccagcctgggcaacaagagcaaaactccatctcaaaaaaaaaaaaaaaaaaaaaaaaaaaaaaaaaaaggccgggcacggtggctcacacctgtaatcccagcactttgggaggcccaggtgggcagaacatgaggttaggagatcaagaccatcctggctaacacggtgaaaccccgtctctactacaaatacaaaaaattagccgggcgtggtggcgggtgcctgtagtcccagctacttaggaggctgaggtaggagaatgggcgtgaacccaggaggcagagcttgcagtgagccgagatcctgccactgcactccagcctgggcgacagagcgagattccatctcaaaaaaaaaaaaagaaaaaaaaaaattagctgggcgtggtggcgggcgcctgtagtcccagctactctggaggctgaggcaggagaatggcgtgaaccggggaggcggagcttgcagtaagctgagattgcgccactgcactccagcctgcgcgacagagccagactccgtctcaaaaaaaaaaatgtctttgcaaggggatcacacattattgacatttgctttctccatctcccctgttgaggattccatgaaggcagcagctgccttcatttccttactctgccatgtttggtgaatattataggatgagcatagatgggaaggagccttcattgcagtccagaagggctcctcatcctgtccctctgccccttaggcagcacgctggctcttctcctgaacttcctcgcctgcctggccagcttctgtgtggaaaccaacaatggcgcaggctttgggctttctatcctctgggtcctccttttcactccctgctcctttgtctgctggtaccgccccatgtataaggctttccggtaagtgtgttagtggtgggagagtgatggagacctgggatgggccccacgtctgcccatccttcagctctaattcttctcccaccctccccatttttttcctctttgtaggagtgacagttcattcaatttcttcgttttcttcttcattttcttcgtccaggatgtgctctttgtcctccaggccattggtatcccaggttggggattcaggtttgtgaggctgttatccaccctcacctttccctctagatccagccagcactgggtgctgggataggagttgttcagaaaaaggaaatgtggttttaatccttgggaggtactagtttaatgagatacaagacatacttccaggatagagcgcagacagcactcttgacacatatagattgaagggaagaatgctgcatttggccaatctaaggtggcttcctggaggaggcatagaaccatggttgaaaggaggaagaagaatccccagatgagtgcctggaagagcttggagagctcagggctaatggttcagaaactggaattaaactatgaagagattagatacagtttgggattgtggtgcttggaatgctgctcgattgacagggagccactgctgatgggaagggtaggaacaggggatgctggtgacataaccagtggagaagctgaggagcccctcttcactggtacatccttccctttacagtggctggatctctgctctggtggtgccgaagggcaacacagcagtatccgtgctcatgctgctggtcgccctgctcttcactggcattgctgtgctaggaattgtcatgctgaaacgggtgagggctgtgtcgaaggtggggccgggatggtgagatcatgggtccccaggggcgtgggtggaacattcaggagcaactggcacaggtcaggctgctgggttgttctcagctaatggacctctggggtgtgtgtttctgtgtgtgagtgtgtgtgctgggcagcaggctgctgagtggtagtgatgctgttaggctggggtggggaaccagtggctggaatgggcggtaatgtctttgtcctctacttgcagatccactccttataccgccgcacaggtgccagctttcagaaggcccagcaagaatttgctgctggtgtcttctccaaccctgcggtgcgaaccgcagctgccaatgcagccgctggggctgctgaaaatgccttccgggccccgtgacccctgactgggatgccctggccctgctacttgagggagctgacttagctcccgtccctaaggtctctgggacttggagagacatcactaactgatggctcctccgtagtgctcccaatcctatggccatgactgctgaacctgacaggcgtgtggggagttcactgtgacctagtccccccatcaggccacactgctgccacctctcacacgccccaacccagcttccctctgctgtgccacggctgttgcttcggttatttaaataaaaagaaagtggaactggaactgacatccccgtttcctgaatcttcattgggaattaggccttatgaaagagaaaggagagtgtggagtgaggtgggaaggtcggacccggctttagtgtaaactgggagatatgaggggcggggcggtggagcccgagtggctggcgcaggaaggaggtgggaagtccacggaaacgcgaaacccggagacgccagggagccctgctccccacccctctccattaatgacggggaagagccaccgcctctgccgggaacgccaaggaatacgcgggcctggagcctgaaaagctggatggggctcaagtggaggcccaaaggatcactagcagcctagccagggtccagagcgaggcagggactggaggagcgcttatccgactgcctcgccctgccgcgggatcccccaaccccgacagggtctcagtcccgaactacaactcccggggtgcaccgcgccggccctcgccgccatgcccctccttcccgcaccatccccattcccatcccccttctctagtccccgacctgcggcagccggagctcggggagcggagcgtggtggggaggggagcgggacaggcgacacaggagacagcggcgccgcggcctctccccaccaggcggccccggatcctactggacgccctgagggcacaccgaccgcgcctctagagtcaccccacgccgacccctcccctcttctctagacttatttccatccttcccgcttttaccctccccacccctccctgggctccaggccgccgccccctcctcactcctggaccggcccttctcggtgcccctcttccctagggagatgcgatgagccggtgcccccgcgtcctcatcgtcgccccgggcacggtgcccgtccagtgcccgtggtggggagggagcactccgcggtccctccgtgacgcccctcgcttggccccccccacagctggcgtccctcggccatgccccaggggacccagccagggggtgggctctagagcgagtggggtggagaggagaaaggacggggccttgggcgcctctgagatgctcccaagtgccagggagggccgagcgaggcgcaggcaaccgggcagcaggcatgatgccctcgcctagtgactccagccgctcgctgaccagccggcccagcaccaggggccttacccacctccgcctccaccgaccctggctgcaggccctgcttacgctggggctggtccaagtgctcctgggcatcctggtggtcaccttcagcatggtggcctcttccgtcaccaccaccgagagcatcaagaggtcctgcccgtcttgggctgggttctcggtgagttgggtgcacagttgttgggtgggggaggctcctcgggccccaccctccacaccagctgcaagtccacatgcttgcctctcctccctctcctggtcctctgcctccttacagggctgggtgcatcctgtggtgaggggctcactcaggagcctcccctgccaggctgagcctgtgcccactctgtccccagctggcgttctccggggtggttggcattgtgtcctggaagcggccattcactctagtggtaggtgccagggtccagtgcccactgggaggcaggtgcccagcacgcaaggggaagcccatttatgtcctcaagaagggaactggctccccagttggtgccagccgggtgggcacgaagtgtctgtgaaggagggggactctgtccgtggcagaggagtactcatgagggtcccagccctgagtctgcaccctgttttccccagatctccttcttctccttgctttcggtgctctgtgtcatgcttagcatggctggctctgttctctcctgtaagaatgctcaactggcccgagacttccaacagtgctctctggtgagatttgaggagggagagctggaaagaactggctgggggaggtgtgcaggacacctcagtttgtcctgactcaggctgcctcaccctccctgctccactcaggaaggaaaggtctgtgtg

SEQ ID NO: 4294 - DNA, 6000 bp, Homo sapiens
cccagaccctccacatagctacctttttttctcttccatcactccttccccagcgcctcaacaatttgctcttcagttcaggaggtcagaccctctccatctttccttctcccattccacaggcagccctgcaggccgctgcccacgccagtgtggacatcaagaatgttctggacttctacaagcagtggaaggaaattggttgatactgacccccaggccctgcagtggggctgactccagatctctcctgccctccctggcagccaggaccagcacctgtagtcaccccaccacacgcagactcatgcacgcacacaggagggaggcctagctgctcagaggctgcagggagggcccaggagccggctgggagggtggggtccctttgttgccaagacgttaggaaagcgaggaaagtgcttggattaggagagtcttgtgggcccctggccagccttcctgcctcagctcccctgctgtctccaggggcaggtggtaggcatgggtacctgcatttcactggaatgggttcttggatctctgaggggaaggaacagcaaaagaggcccttcttcctcacccaagatgcagggtggttggggccaggagtttggaccctctaggtcttgggggaagagctgggtaatacctggtgtctgagtgattctctgcagacccttcccctcctcaaggatcacccatcctcctttcagccccctttatggggaccaggcagctctggagccagccacaggggctgttagagaagcaaggcctggagtggcctgcaccgagtagcagggtcagggttcgtgtgctcctcctcctgctgcaggggctgcacatcccattgccccacttctgctttgtgtctccctctgtctagcttccagggcagggagcaggccccacctagggctgcaggcagtctggcctgtgccagcacggtctcctgtgcccaccagccccacaggtgctgtgctttgtgctcttggctgctgtgctgggacagaatgggatgccaggaagagaagaaagggggtgcagtctgaggccaccaccccccttcctatctaagggagggctgaagacaaggggccggcattcagtgggcagcagaaaggagaggctccttgaagctgctcagtcagaggcccccgtccctccttttgccttccgcaggactgaagacctgaaggggctggcttttggagtgttgaggtgaatatctgggagcagagatcatgaatagctcagggcagtgaatggcgcaccaagagcagggctgtgtgtgggaggctgcagccaggattgcctcagctcctccccctcaggctgggaggatagcacaggctaggggctcggggtggagggtctcagctctgctgcccccaccccagtactagcctagcttcccaagctgtggcttagaggatagttggcttcctgcctctctcctctaaaatagcaagtctgggaaatcctggggtgagtggagtcaccccactcccagttgctggcagagactgagactaaagcatcacttaataaaccccccaagcccaatccctgtctcctggtgcctgtctgtacagaagtttcattggggggtggggcactgaagatggcatcctgaaatgcattttggaaaggcttctttgaagtggatggaacagaacaagaagcaggcaatttgagtgaaggccctggagatggtttgataggcactgtcaagttccttgactgtaaactgaggcggtgcctttgcaggggtgatagtgaaaatctcttgccagcaacatcgctgcctggggttggttcgctgtcactagctgggtcctcttccccaagggggtggggaggtgagccttgaaaccagcctctggccaggcgtagtggctcacgcctgtaatcccagcactgggaggctgaggcgggtggatcacaaggtcagatcgagaccatcctggctaacacggtgaaaccccatctctactaaaaatacaaaaaaaaattagctgggcatggtggcgggtgcctgtagtcccagctactcgggaggctgaggcaggagaatggcgtgaacccgggaggcgaagcttgcagtgagccaatatcgcgccactgcactccagcttgggtgacagagcgagactccaccttaaaaaaaaaaaaaaaaaaaccagcctctgagtcctcaagtgcctgtcctgcaaggattggcatctcaaattgtattcggggggggggggggggggagggggaggtggtgagcctggtgaatcccccatgatagaaccaacatttaccaaaggcagtttgctctgagccctaggcagcaccaggtgctaagaggcagcaaagcatggtgagagatggcttctgaaatctgttctgcatttggggatttgggttcctctgccagcctaaggcagagctgtccccaactgctgggagaacctggaacgggaacactgctctgagtcgccggggggactctacagcaccatggccacatcctgccttgggcccctaccctgttctagccagtcagcacagggagtttgggtcgtgctggaggagctggctgtgtgcaggcggccgagtgagctgcctgctaatggggctgggccaccccgtgctgctccctggaggctggacaaggctgggattgttccctggctcccctttgtctccccactccccgcccaggcctggcccgcctgcctggccactcttcctccatcagcctggctggcagcagccttggactccgcccgtggagccctgggcctgttgacccaccagcttaggagcacccaccaagctctgggtaaggaagctcaccttctggggctcttctgggaaaatagaggtaaagcatcttgctccagccacccctcccccatttccatagcaactgcacacactccactccagagatctccaaaccctactactaagggaaggcaccgtgagggcagctagaccccagcgtattcctcactcctcccccagatagatgggcagcactcagggtaggggagacccccgaccatcccacttgtgggagcgagcaagggataccctgggaggccctcatccatctttgttctgctggggtgcagggactagggccaggtttgcctttgcccagcagggtctccagcacccatctcgggcagaggctgggggagtgactgctggtgcaagccccaaagtgcatgcggcaaaaacatggatgcagagctggtggcaagaagaggggctaagttatagagttgctgcaaagttttggcctggggaggtggggggagtgtcctagtcctcctcctggggcggctccgcctgcccagctggcccagcccctccacttgtgccaaggaatgtgccgggagaggcgggcggggcagcagagctgcggccacccggaggcagtgcacaggtctggggctgagggatacctgggctcaggaggggcagggaccccaaaattctcctgggggcacaagtgtagtcctcagagaaaagccaggcatccccctacctccttgtcccacctgatggcatctggcttctccagagattcggagtgccaagagtgttctgtgctcagttcaggcgctgtgggcgaagcacattctggtgggaaagggagtggtactcaggctgtctctgtgctggcctccaggagtcaggattcttcctgagacaaaaactggggcctgcggggctggatcactatttgaggcagcctcccggctgggaggaccccgccactctttgctgggctgaggccgccaagcccctcagtgtggggactgaatgccccaaggagaacaggggttggagttaagtggtgcaagggctggggaaggtggaccagcttccccaggcctgaaggaagcagctccaggagggagggtgccatctgcctcccacacgcacagcccatcctgcggctgaacccaggtgaaaggggcctgtggatgggggcagttatctgatcccctacctcccactctgtctctaggtcaacgtggaggtaccaggccaccatgctcagtctcaagctgccccaacttcttcaagtccaccaggtcccccgggtgaggggctccacccactgacccaccaacccccattccctagaggactgactaggggctgacgttcttctcttttagctattggggcagcccctcctgcaggcgaactcttaccctcccattccagtgtgagactcttcctctgttctctgaggaacaagcttgtggccctccatctggagtccccttccccagagcgccctgtgtgctgcgctccacccccatcccaccccaatctggctcttcggtttcctatttgttttgtgggttgtgggtactgggacctgtggtaacatcagatcagatttagtttggcttgggggccacgttgatctccagcccagcctctttgaccctgcttccagagatctcagatggagggaaagggtccgggcacagtgacgcccttcctctcccaccactaccctaggtgttctgggaagatggcatcatgtctggctaccgccgccccaccagctcggctttggactgtgtcctcagctccttccagatgaccaacgagacggtcaacatctggactcacttcctgcccacctggtgaggggaggctccgccccaggccgcggccttgagctcagagggggtacccaggcgggcagggaccgtccaggcccacgggctgcagcggcagtcgcgggggtccgcggcggcctgagcacgcgcccgccgcaggtacttcctgtggcggctcctggcgctggcgggcggccccggcttccgtgcggagccgtaccactggccgctgctggtcttcctgctgcccgcctgcctctaccccttcgcgtcgtgctgcgcgcacaccttcagctccatgtcgccccgcatgcgccacatctgctacttcctcgactacggcgcgctcagcctctacagtctgggtgagccggacaggcgcgggagcgcggggtctgggcgtcccggagcggggcgaggggtgggacgcgggacataggggcgcgcccctcaggcctcagctgcacgcccccacctcaccgcaggctgcgccttcccctatgccgcctactccatgccggcctcctggctgcacggccacctgcaccagttctttgtgcctgccgccgcactcaactccttcctgtgcaccggcctctcctgctactcccggtgggttcccaggcccctccagtggggacggggaaggcggaggcacaggagaggacacacctcactgctctcgaacagcactggaggcatcgggaccatgtactgaggacttcctctgtcagaccctttatccccacatacagatgtggtcctttacacaggaggtcatatgccctaacggttttcttagctgcaggctgtgctgatattccatctttgcccaagtcctcttgcctttctctgacccctaccccaagcacagcgatggtgaccggccttttcctcccgcctcccagtttcctggagctggaaagccctgggctcagtaaggtcctccgcacaggagccttcgcctatccattcctgttcgacaacctcccactcttttatcgggtaaggaggcctagggcccctgcccagactcctgctttcctgtcctgaccctcaaggtgcccacttccagccctgccccctcagtccctgcctcagcccagccgcctctcttggggtccagcaccccgcctagctgtgcccgcccgctctgcgtcctcaccagatcccagacacaccccatgtttcggctcccgagtccctccccagcagccttggttttcctttgacagctcgggctgtgctggggcaggggccacggctgtgggcaggaggccctgagcaccagccatggctaccatctcttctgcgcgctgctcactggcttcctcttcgcctcccacctgcctga

SEQ ID NO: 4295 - DNA, 6000 bp, Homo sapiens
aaaaattataagtgcatgaaaaaggtaaaaatacttcctctttttttcttagaaaaatgggatacttggttacaaaaccaaagtccaaagagtaaagtgctttgtccagtatcacacagctaataatagtagacttggattcaaaacagtgtgatctggctcttcacaactaggttaaacgttgtgagaactgaaatcaatcagtatctcctggtggtgacgatgactctctctggccgcaagttcacttccaggcctccgagctttagcatctctccccagtggattcctctcagagctgcaagccggctcaccctgctgctcccacttgctggtctgctgttatggactcaagatcatccactcctcactgctctccatcctttggcttgctcttggggcagtctgcctcttaccatgcagtgtgaggatatgaataattcctaacgaccaactcaaagtctcactttgtcagtggcagccagagccagtgaggctgcctgtcatgccctttgcaacagtgtctctaatcatgactcgtcttcctatccccagtggtgttctctacaggaatctttcctgtttgtggaggaagactgtatcagtggtttaaaagttggcttgattccgagtcccacggtggcgtttccatgagatctagtatccatttgcaaaggaggccacaaatcttgaattaagttaattgtttctccaaccaaccttttctgccctgctaaatatatatatatatatataatcagattgttccccaatgtctaacaagtaattctggttctgctgaaatagccagtagcgaaccatacattttgccaaaaattatacctccaaatgccacagatttcctgtggctttttggctgtagctctgcagtagtattttatgagtcaccacatctcttattttattgacttctgcttccttctactacacatctgacagtcatgatacaattgaatagtgacaggaaagatttttatttgagatataacttaattccttactttgtggtcagaatcctctactataatcataaaatatgaagatgtcatagacacaaaacatagtctggtaccgtaaataaatgaagtgacggggtcaaaattagagaacctgtgaccaatctaaggaaaacaacctctggggaggacatttgtctttggcaatagcttttttctttatatgatcagtctctaggaactaagccttggattaaaaataatctctacttcactgaatggatgagaaaaattttctgaaggcattcaagtggagaattcaagtagataattaaagatactggatcttattccagtaacaggcatattcccaataatctacgccacttgatggttttatctggtgaggtaagaagaggggatgggacctgaatttataacacagtatagagctctgagggctggatgacagcatggaggatgaaaaaataaagtgcccgctaaggacaatggtttccctgtgtggtgtcaccgatggagaaggctgaagatgaggtgtttatcagaacactccttcatgaacattaaaaaaccatgtttaccttgacacccctgcaatagactgaatgtttgtatctccctcaaattcatatgttgaaaccctaatcccagtgtgatggtatttgtaggtggggcctttgggaggtaataaggtcatgacggtggaaccctcatgaataggactaatgcttttataagaagaggccagagagttagctgattagttttccatcatgtgacggtagagcgaaaagttggcagtctgcagcccagaagatggccgtcatcacaacctgacaatgctggcaccctgacctcagactttcaacgtccagaattgtgagaaataaatctctgttattgataagccactcagtttatggaattttgtgatagcagcacaagctaagatatcccctcaggaaacatgggatgaaactctcagtaattaaggcatggattggaacttccatcttgtttaaagaagtagaggctatgcctgagaccacctcactgccaatggagtctgtctgggttctctgcagaaatggcaaatccggtttccctccttctcttccagattcgctgacccttgtggcgccctcttctgtcttcgaaggagacagcatcgttctgaaatgccagggagaacagaactggaaaattcagaagatggcttaccataaggataacaaagagttatctgttttcaaaaaattctcagatttccttatccaaagtgcagttttaagtgacagtggtaactatttctgtagtaccaaaggacaactctttctctgggataaaacttcaaatatagtaaagataaaagtccaaggtaaaaccctgacttctgtgggatgggctgggtgagagaccacggcagcaaggcagggtgggtactgggtaggggaaagctgctcatgggctaaatatagacgggagtgcttgtggtttgatcatcaaaggagccatgatgggtgagaggtgtctagctctgaatgtcctgtttgctggggttgcttcttgccagaggcttttcagcaggaatcttagctgtcactgctttggggactattgtgatccttctctctagagctctttcaacgtcctgtgctgactgccagctccttccagcccatcgaagggggtccagtgagcctgaaatgtgagacccggctctctccacagaggttggatgttcaactccagttctgcttcttcagagaaaaccaggtcctggggtcaggctggagcagctctccggagctccagatttctgccgtgtggagtgaagacacagggtcttactggtgcaaggcagaaacggtgactcacaggatcagaaaacagagcctccaatcccagattcacgtgcagagcaagtatcagtgaggctgagcctggagaaaaaaagataggagtgttatagcttcagcttggactactagtctgtttctttgttcaactcctgtccttgaggaaagtgaaaattaagctagaaaaaccctccaggttgcggccgggcgcggtggctcacgcctgtaatcccagcactttgggaggctgagacgggcagatcatgaggtcaggagatagagaccatcctggctaacacggtgaaaccccgtctctactaaaaatacaaaaaattagctgggcttggtggggggcgcctgtagtcccagctactagggaggctgaggcaggagaaaggcgtgaacctgggaggtggagcttgcagtgagccgagatcacgccactgcactccagcctgggcgacagggcgagactccgtctcaaaaaaacaacaaaacataacaaaaacccctccagattgctcctggcttcctacttcataagaatcagaaatgcactaagccccttataatctttctttttttgttgttagttaagtaatattcattgatcaagactccattgatcactgactgtatgccttggcatttagtagtgggtgggacacttcaaaaggcaaaccacctgctgtctaatggctctccaaatgtctccacatgatgagattgcaacacaaattgacttattagaaggcaatgtagcatcaggaaaagtagatgtgaatgaacagagtggtcagaggagaagttgtatttggttgaaccttgaaattaaaaatgatagaggaattattattgggaccgttgttaggaataatgacttttccactgcaagactgaagatatcagtgcccctctatattctgtgcaaaaggtgtctttgactcatccaaaaaattgaacagtttcctgtctcatggagatctatcacaaagtctttaaatattactacccatgaaattggccagggttaggacattcaaatgtctttatccacattcctgaaggataattgttatagattccctacctccataggaatgcttataatggattatctatacaatctccacattcccacattttgcattagagaatggaatcagtcaaaccctgttcccagagtttcccttagagttctcacctgttgtcttatatccatctaggaatccccatctctaatgtaagcttggagatccgggcccccgggggacaggtgactgaaggacaaaaactgatcctgctctgctcagtggctgggggtacaggaaatgtcacattctcctggtacagagaggccacaggaaccagtatgggaaagaaaacccagcgttccctgtcagcagagctggagatcccagctgtgaaagagagtgatgccggcaaatattactgtagagctgacaacggccatgtgcctatccagagcaaggtggtgaatatccctgtgagaagtgagtgacactctcattcatatcttccagaaattcccagaccaaggtcatgatacacatgtgtcctgaggaaatttcaggaggccccagggattagtgctgtggagaaccaaaagcaatttgaaaatgggttacgcttgcaggttagactgctgacctgtttctttttgtggaaggaaatataaagagggctgtaatcgattatgaagcataagcattcttgcaatcctacgataggatgataaaacatctattacatgaaacctttgggctctgggccagggagtgtcatggatctaaaaggttcatagtggtaacagcctgcttcattttatgtcatctccttcaaagtgattagagtgtttctagcttgccgaaactgcacccaaagggagacatttggagccatgttattggtgatttactggtgtggaaaattacctggtgttgtagccaagtagccatttccattctaacccagtcctatagtcctgaactgggctgaataaacatacctaaatatatgtttagaaatgctcctatgtatcagttttcccaggaacaactataatattatagaaatcttaaaattatttcctaataaaaaattataggatacaaaagaaaaaaaagaaatatgaagagggctggatgggcacaggaaaacaatcagatgagaacaacagatgaccgtgtctgcaggcagcacccagaactgatattcccctcaaacgtctaaatatattgttgagaaaattatctctaactgttctagtgggaatgtgggaatggaaaatatgcaacagccatggggccaggccctttgctgagcctgcaggttgggagtttgtgaatctattgaggcatcacaaatcttttctgatagcccctctgtgtctgtcagttccagtgtctcgccctgtcctcaccctcaggtctcctggggcccaggctgcagtgggggacctgctggagcttcactgtgaggccctgagaggctctcccccaatcttgtaccaattttatcatgaggatgtcacccttgggaacagctcggccccctctggaggaggggcctccttcaacctctctttgactgcagaacattctggaaactactcctgtgaggccaacaacggcctgggggcccagtgcagtgaggcagtgccagtctccatctcaggtgggtgggtgttacctggatacagagtttgatgtcaatggctgtgtctcaccagcctggagatgtctgctgtgtgtgaagagggggaaggtgatctcagtgtccagtggcttctcttctccccacactaacctgaagagtacagactacacttcaatgatctcttacttgaatttgtatttaacatccctatatagcatttataagaagggcccaagtcttaaacctctggggctgaagcactgctttctttcctcaggacctgatggctatagaagagacctcatgacagctggagttctctggggactgtttggtgtccttggtttcactggtgttgctttgctgttgtatgccttgttccacaagatatcaggttgtatctaccatttggattctccatattttgctatgacctttccactactgatatagattgaaattac

SEQ ID NO: 4296 - DNA, 6000 bp, Homo sapiens
tgagcaggtcgggggtacgggggtcggggacatgtgcgtgctgtgtagaaagcaagaagccagcgctttgaacttgctccagcgagctcggggatcaagggctggtaccaggcaagggtccggtgactactttaccccgccccgtgctgtcaggtcctgtccccaagccctgacccgacattgttggacgatgaggtcaggcgaggttagcccatgcatagacagggcgtccgtctggagcagggactcagggactgagccccacccgcgggctccatcgctgagtcctcactggggcgaggggaaaaaagggcgtcggactttagctggctggccccgagtgaccccgggtcgtggcgccggccctgggccagctcgtgctcctgggctttcccgcgcgacccttcacttcctggttccaggagcacgtgtgagcactgcgtgccctctgagtccccgaggccgcccttttcattcctgttcctgctagcttgctattctggggacttgaggtcacgggctggggctagggggctctgcatgggtcgcacggtgaccttctgtgaagctccagtcatctctatgacggtcccctgacctcgggggtctgggtgctgcagccctgactgcgccccggggtgccctgtgtgaggttgtgggggtggtggtggctgcttttaccctgcccgagcgccgctgcccccaccgggtgccccctgctgctgggaaagccggtggtggccgcgggcggacgggcgggctgcccagaccactgcgtcaccccagcggcgggagggcggtgggtgactcatctgttgtaacggcccagggtgtggtcgtgggggtggggggcggcggctgggaggccggacctgcaggaccggaggtggactgccgcctccccccgcgccctgtgcctcctggggctacctgaagccggtgtcctgggagatctgtgagcagttggtatctgtggggcagagagaaacggggtgagagtggggatggagtgtgggattcgatgtagaagacctgcggctgggacggggctcccccagtgttctcattgacttcaaagcaccagacagcaatggctctctatctctagccccctcccagtttctcctccccactacaaggggcagacctacaactgcagaggaggccaaggcagggcgggcccagtagggccctaccattccagaaccaacaaataggttttgtccaaccgcaactccctccctcaccccaaggcctctgcccctgtcccccaccccgggattggcccctaatcctttcttcattccatcccttctccctccagaattttcagctgtgggttctctagctcagaacactttcccttcccaggggatttcttctcctgaacaactacttcctgagtcctcttcttcaccccaacacgggtcatttcctatcttcccccacacgctgtccatccccactatagctgtctcctggaataatctcttgcacctggctacacccgagcactgctgagacgatcccacttctgctcccgtgctcacagcctgctcaccacaacgtctgtgttgacagggtgtttctgcccggagcccccacccagcctccaacactgtttggtacacagaagccatggcaacggcccccacctcatcccctcctcccacgcaagctttggagcttcctgtttgtgtagcctcagctttctcttctgctcctgactctcggtggtgaggggctgccctacggtggttcccttaattgtgggccgccccccatccttgctgctggctgtggcacctcgctctgtgggctggtgccctcactgtgctgctctttgagaacactccctgtcccaaatctgagttgggaagttctcctgtgttccatctgcacggtggatggagagtccctttgtcttcccaattaaacaccctagccaagaaccctgaagtcctccctgcccccacccatgtccgccttttctttggctttggctttggtgaggtaagcttccagcccagggtctgggtggggccgagtgccttgcgtggcccctccccgtttcccgcctattgtaactccagggtgagggtgagggttgttctcacagctgcagtagcgctagggtttaggttgctccctgccagtccatcccccaggttgttcagctgtcaccttcctttggggtccccagctctgggggtcccccacacctgtcttccagctgggcatatctcttctcaccctggtaggcaacttgcttactgttttctttatgtttgagggaaggcaggggcaggtcccctgggtgtccctagggtgggccttcccagctccagcagccgcagcccatcagcttctgcctgcccgtgggggtggggaagagaaacagctgctgaccaggcctggcctggttggaactgccccttctcaggaccccgccctatggctctggcacctcagagcttgagggcaatggccccagagtggagcagatacactgcagctggaggccgtgaccctgccagctgtgtccaggccccagcgttgggcggtggagggggttcctcagcatccactttccacccagtggtgggtctgggaggccaagtttgtcctgccttggggggttggggggcactggaagtgtctggcttcaggcctttctctctgctcttaaccccagtgtctaggttaatcattctcctgccctttctttacctgtgccatggtgatccccgagcctcaggccacttggtccctggaaacagccctgagcacagccactcccaggagagaggtctggaactgggctgcggaaagggggcttactggtggtagtagctcttagccccttcctcttcctacctgtcttccagccattcccctgtgcatcagaggttagaggtttctatggtggagtggcctctgggaagggcagggatgcttctcttggtttctcctcagaactcagccaccccaccccgcctgccttccccaagctgatggtgtgtgtgcctggcgctgtgggtcggggcccagactgacatttatctggcccagctttcgggctgggggaagtggagggggcgggttgctcttaatgaggtttaaaaataactgatttaggggaggatctgccggaaatgtgcagcttgataagctggggtaaaaaggagcagccatgttggagtcgggacgggagggactggcccaagacacagcctctgcggccgagaggtgttgagggtttgaggcaggctggtccccttgtatttcgcagagccccaaggtccattgagagggggtgacgggattgtttaacctgggtgtgtgggagagggggagctggagtgacttcatccctgaaggccaacctggcctggagccagatgtggttagaaggggtggctctctttcttccccttgaacgcagatgcctgtcctgggggtcccctttcgtgagcagcctgacagctagctctgttttggagaagagagaaaagccaaaccagggtggggatgggacagaaaatggggactgtggcccattcttggttcttggctccccttggcatccataccatgcccgggtcttgctcagcccctgagtgtcagacccaggtggtgagtgtggtgggaacacactgccacagtgaggtccgccaactcaggccattggtcgggaaaccacccagttcttgctaatcaagctcctccaacgaagttaaagaaaccctcctgtgtatttccccgtcttgccttctcttctccaggtttccccaaaaatatcacccagggctcctgtattagtttcctatttctgctgtaacaaattgctacaagcttagtgatttaaagcaacacaaatacagcatcttacagttctacagactcaacaggggtctcactggctaaaatacaggtgttggcagagctgtgttccttctggggtttttgggtgaatctatttccttcccttttctggcttctggaggccacctgcattgcttggttcatggccctgtgtgactctgacttctacttccattttgttgttgttgttgttacttctcccactctgactcacctatctcccactttcagttagtaaggcccttgtgattacactgggctcatttagatgatgcaggataatctccccatttcgagatcttaatcacatctacgaagtccctttttgtcatataagataacaatatccacaggttctgggaattaggacatggacaccttttgcgggggcatgattctgcctgtcatagctcctagaggggaaagtagaatttgtttttattgcctggtttttcataggaaattcgatttgtttgctgaaatccctcaaggacctattcaagcctacctcttccagaaagccttcccaggctgcttctgcccgtctgcttcttttaactcctacaacatgtgatctgaactgtgcactttagtattctttgtgtgcaatccttacctgttcatatgtactcactttgtctccctgatggcactgtgggcacttgaggaccaaggacttctactatctctttcacaatccctagcacagatagtaggtgctcaattaaaatccagtggtttgcaccaacctagatggttaaaaaaaaagcaaagaaaacccagaggttgagggagggtagatccaaccagtttcctaagctgttccacattcctcctcctctccccaaatcattctctttcccagggctataaagagcagggttgcatttggtaacagttctggtcctcatccttggggctcaccgtgggggaaatggtgtatatccctgcaggcagaattcctgaattccccactccccaggctgcaaggtgttgaccaaaagcccgggtgtgtcctctccctagctccccgcagccaccgccacccattggaatggccaacaggggacctgcatatggcctgagccgggaggtgcagcagaagattgagaaacaatatgatgcagatctggagcagatcctgatccagtggatcaccacccagtgccgaaaggatgtgggccggccccagcctggacgcgagaacttccagaactggctcaaggatggcacggtgagagccgggccccactggcttggaagtgcagggagagcaggactgggtccagtggactggggattgtttaacctgaagaggagaagactgaaggcacacatgtcccagcctcttcctcagcttgaaggcctttgtcaaggatgtgagagggcccatgctttcctcccttcccgtggagtggagggtaagggtgaatgtgcctcccaggcagtggaagactgaggtgacactgaggaagaatgtctctaaggaaagaactgtgggagggtatattagcaaggaaagactaaacactggcttttcactctgggctcggaggaaggaggctggcaagaaggactgtgaggcttactctagtgaaagagtccaagctgtcttcaggcaagacaggagcctctctggttcattgtctctggttctgagggtggtgcacgctgagctgcgataggtaggcatattctcacctttccacccctgctgtcctcatccaggtgctatgtgagctcattaatgcactgtaccccgaggggcaggccccagtaaagaagatccaggcctccaccatggccttcaagcagatggagcagatctctcagttcctgcaagcagctgagcgctatggcattaacaccactgacatcttccaaactgtggacctctgggaaggtgggacagggcgaggggctgggtcctgtcatccaggaggccagagattgggctgggccctcttgaccaggcagaaggggctgttttctggctccctgcagagaaagaggggtgtgtttgtgttccatggagcacttggtcatattggaggctggaatggagaagggtatggaaatgaacagtagaaataattaggaagccaggcctgctga

SEQ ID NO: 4297 - DNA, 6000 bp, Homo sapiens
tagagtgcagaggtgcgatctcagctcactgcaacttttgccttccaggctcaagtggttcttgtgcttcagcctttcaagtagctgggattacaggcctgcgccaccacgcccagctaatttttgtatttttagtagagacagggtttcaccatgttggccaggctggtcttgaactcctaacctcaagtgatctgcctgccatggcttctcaaagtgctgagattacaggtgtgagccaccttgcccagccccatctcttttttgatgaggtgtctgttcaggtcttttgcccatttttaaaatcaagctgttagttttcatactggtgagttttaaaaattctttgtataatacattctggacaacagtcctttatcagatgaatcttttgcaaatattctaccccaatctgtggcttgtcttctcattcttttgacagtgacttcacagagcataagtttttaattttaatgacatcccaatttcaattatttatttcatggatatatagtgtctttggtgttgcatctaaaaagtcattgccatacccaaggtcatctaggttttctcctgtgttttcttccaggagtttgataattttgcattttacatttaggtctgtggatacattttgagttaatttttgttaaggtgtaaagtctgcctccaacttcatttttttggcatggatgtccagttgtttcagcaccatttgttgaaaagactctctttgctctgttgtattgcacttgctcctttgtgaaagatcagttgactgtatttatgtcagcctatttctggactgtctgttccattgatctgcttgtctattttcctaatactacattatcttgattgatgttatggtaagtcttatagttgttccacatttctggaatattctgtgccaggttttttttcagtctttttttcttttttcaggtttctgttgacaaattgtgaagctcagagatcctttccttagctgtgtttagcctactaatgagcccattaggggcattcttcatttgtgtagtctttttgatctctatttttttcattctagaatttccatgtctctgcctacattatccatgtgttcttgcatgttgtttactttttccattaaagcctgtagcatattaatcatagttttaaaaattcctcttctgataattccaacattcctgctgtatctgactctggttctgatgcatatgcagtttcttcctactgttgctttttcctttagtgtgccttttacctttttgttgaaaagtggacatgatatactgggtaaaaggaactgtggtaaatagacctttaccatagatggggtggtgaggccggggggtggcattttctagtcctgtgattaggtcttagcctctggtgagcctgtgcccctggcccgtgaacttcactagtgcttcccagtttttctactgttaggtggaactggatggctagagaagactggagttgggtattttccttcccccaggttagtcagactctggttagtttcttttgagggcagactttgtttagaacagagtgctctggagtatttcgtagtgattctttttcccctccgcctgctggaagcatgaggggatttttcccaatattcgctgagaacctggtcaagctcctggaggtaaaacccacagaagtgtgggggtccccttcgcctgggtccacctggagtgtttttgtttgtttgtttttcatctcagacttgtccacactgagccttcagcgactcatcaattaaagctaaggttttcctaccagaacactggttcctatggagtttgttgcttcgtgggtttctgctctgataagctgtgattctctgtatgcatctgtaggtttctgcagttttaggggcagcagtttaccatgtgacctcacttctctgatggatctaagaagagttttgctttttcagtttgttcagctttttacttgttacgacagagtgatgacttctaagcttcttacatacttggctggaaattaaaaatttaacatttttaatcagatgagagaatgccagttataaaagttttcttgaccattgaagtaatagttaaacaggtcaaagtgtgacctgcagtaggccatctctgccttccctagacctttggaacagtcctacctgagaacaacgagtgatggacctggggtctttgtcctgctcagagttaactaaatgagtttctagtatgtctgaggtagaccaaggtgatcaccacttagaaggtacttgctttacttataatttggtggcagttctcttgtccagttctaagactttgatatccataatatttaaaataattttaagtacatgttttgccttgtggagagtttagcagtttattttcatagattgagatctttttgcaacgtgattctcaataactatagtgtgctaaaatcagtgggctttcaaagaaactttagtgaatcaatatgtctttatatttctatttaaatggaactcttattcctagtggttgtactgcattttcatacgctagtgaattctgttatcagtcgggccctttgtggaagatgccaaaactcatcagtggaaggactgctcattttttctacatgtctccaaattaaggaagcatcctgatgttgacagcatcctctgtgccctaggtttgggtattgcacagtgtgtgtatgacagggttgtgttgtttaattctcacaacagccctgcggggcagctgttgtagagttgggaccacaggattgtgagctgcagcagggctcccccagggcctgtctgggcccttctgtctcacagggcctccctgctctcagccatttggatggactctagtcaagttgtttcctgtgcctgctgttccaaattgttggtagggcagaaagtttcagaaaaaaaattccactttcatttacagaggagctgtacaaggtactttaacacagttactagttaagtaatcttacttgactaggtgtggtgtgaaattaatcatgctgtctcactggagcttgctttttcagctgtatatttcctgaagtgaccagcagtagctttcatctcctttccctcctcccgttgtgctcattgagaaaagaatgtgattattgtttaattaaatgacttgacttttatgggagattaaagcaggcaggctttgatctgtaacaccattgccaacaccttttttgaggatatgctaactaccagcagaaagctaagatccgcagattttaattaaagacttgagacacaaagcatgtaattattacgagacattttcaggggactggcaaagttgtgactgcatgcgaagtgcaggccaagaacagagcagcattagagcatcaggcacctaggcaggtgtaagatcatggccccgtcatttgcacgttctgccccttttctgcttcaaagggtgccataaattccatataactgtatcttggggaatgtggagtccctgtgagagctaatccccatgtcctgccttccagatcggcgccaatggtgtgccatagccatcctctttgcagtcctgttggttgtgctcatcctcttcttagtgctgtgacggcggggcctctgggtgcgagttcctcctgcatatgaaccgaggggaggaggagaagctgagcacgtgtgacattgccgtctactcacattcctatcctggaaacatactgctgcactgacttttctccgtgtgaccccacaattgacatggctcctccatcccagcgctggaagggccagtgggaagaggaaatagatgtctgcactcctggctgcagctggacaacagaagccccatgccgcctgtccagttcggaggagaactagctgctgccttgccttccgggacctcgtttgctgaggagggacttacagactccactggtgttttgctgttgctcattccatgcatctttggcagctcttttcttctgctcagacccttccccgtgctcagacagtgcaccgctgtcccatctaaagaaacctgtcaggaatacgagcttctgggtatgtttcgtttcccattgctgtagcatttcttatcccctgagagctgatgattattgaggacagaaggctcagaaacagtttgtgacagaaaatgcagtgtttcatttttcagggataaatgctaagataaaattgcttttccaggtcatttttttttgtggtaagaataactaatggaaaataatgaaacaccctggggtttgggggtgctaacaacttgtggctttaactgacaggagcaattaaaaagagcaagagggttctgcattggcatagcttagggaagggttaatgatgtcgccacaggtcagctcctgatccttgccgacttgatgttgctgtaccagggcttcctccccagaggtgcagcttgcgttttgagggtgattgctacatatgttgttgctaaacagctcagtaacacacttgaatgaatttggataccagattgtcctcattacagttcttttactcttagggcactctacactgggggttggggttgggagtggttagtacatttattacatttattaagaaacgtaatgacataaaaggttagctctgggccagacttctcttactctgtgggtaatggcaaggatgtgtaggtaaacttggttcttttttttccctaagatgacagcttgattttatcatctgcagtcaaataactgagccaatccaaatttaaatgatagatgctttaattgagtttaagtagctgaaactgctgagacactaaactttaaccttctgatgactttttaaaatgcctcaaatgtgcacatgtatataggatatttttataacttccctgatgaataatctgatattaaagtagtatttggacccagagccagaactcggtggtggaggctgctggtctctcctcaccaccttcttttgcacttggaaagaacagcaacatctggatagagttctagctttgacttctcatttccttgtctttttgggtgcattcctcagcacactttttttttaaacctttttgttttgttttgtttgtatttcatgtggttttatttgggggttttggttttttcacccttttttgtgatttgcaatgatgtgcttgcccagctaacttttgaattgcactttttaataaatattcttaacaatttttgaagaaggatattttatctcatttgagatcatggtaggttaagaaaatatgcctgttgatgaaagctaaaagcaaatttatgaaactaaaagggtgattgacatccatgtttacactccgctctaatgtttgatatataaataagttattttcaaattaggaaaaaacagtgagtattacaaagggcttcagatgtttagagtactaggttatttatgttttacaaagtttgaatcttctataaactaagaaaggggatgatccttagatttgcattaaaatatagaagtcttttaaagtaaatgtgaaccttgtctaagtactgtaatccacacaacacattataagaagcaaaccagcatcttaaggaattataaaattaccctatttaaaagccatgctattgttctgctattaccagatttattgtgccacacaaaaggatcatgtgtgtcagcaggggccgtttggaacaaacctagtcattaatgagtaagatactcctgttagttcagggaccaagttttatgacccagaggcttaatgatgtttggatatatttcaaatcggcgtgcttacctcactgatttaaattattttctaaatagtggccattgtagacctgactcaggctgaagctaaatagagaacaatttagaaagttaactaacaatacagtgcattctacccgtagggccaccatgcccttctgcccctggctgatttgatcctgtgtctgatcccattgcaccctgactgggcagtccctacagaaccagtgttaatt

SEQ ID NO: 4298 - DNA, 6000 bp, Homo sapiens
tatgaaaaggtttaatgattatattttaactatttattgttactacaaaggagttattggtatttgcatagtcttcttaccaaattttttttatcaattctaatagtatttttttattaaagttgctttgacagtgtacgatcacaatctgaaaatacaaataatttgatctttttctatatttacattgattattctactttcttgtccgattacatcagctagatttccaaaataatatcgtatatgtaaccctaggagagttttttatcacaagcacaatcttcattaccaggtaaaacaaccctacaccttttcctctccttctaatctggaataatacaatctagaaagaaacttggagatttttctttttgttctctcttgaatttagggaacctaggataaataagctgtaagtagccagctaccttctttctttggtctgcaccattggtttccctaattgcctaattaaattgtacctttttcacagcttagaagacagagattgtgtggaattcctcaatccaccccctgctgatcctcccctccggaaaaaaaaccctaagaatgtaaactttcagagtcaagtaatcccatctaatcagggtgaacatatatgcattgtaggggcagaaaggggtgatcctttcctccccatcataaagggttacagcggacaccccgggttaaaaaaaaacaaaaacaggttaacaacagaaaagcataataattttattatgtgtacgtgtgtgcacaggagccatacaaaatatgaaaggggacaggtggttgaagcttaaataccctcttcttagggtagaggaatactagggaatgaagaggtccagtgcttagacaatgattggtaaaggattctctttgcatagtatctagataaagtcccccagttaatctctcagctgtcctcagaagaacagaagaaaagtctgtttgggtgtggtgaggacccctgtctctactcttctctgatggctcattttttttctcgttatttgatgagagtcctagggagggattcttgagacaattgcatttcatttggaaagaagcttccttagataagaaaattccagagagaatccccccagttgcttcaggaaagaggatcagagagacagggaggcaggggaaggtcagagacagactggttctgaggcttatttctgagacctttcagttttccaagcattcatcatgctgaagcaccatattttggggaattgttttctgtgccccagcaatacccaccacaccttcctgcatgtctacatttcctttgttttttctggtttttaaataaatcctcttccctcccttctttgacattatcttatactttaaaccccagctcaagtgtcactttctgaaggaactttttgaagaaacttctcaaatctccttacagttctccctctgtatctgtgggttctgcacccatggattcaaccaactgtggataggaaatattcaagaagaaaaaagcatctgtattgaacatacagagattttttttcttgtcattattctccaaacaatacagtataccaatgatttgcataacatttacgttgtattaggtattataaagtaatcaagagatgatttaaagtacatgggaggatgtgtgtcagttatatgcaaatactgtgtcattttacataagggacttgagcatccaaaatccttatctctctttcataacgtgtcacagttgagttttctatttattttccgtgattatttgtataatatctttttctcccgttggactataagacccataagggcaggtatagcatttggtattgctcctcattttatccctagcactatgcaaatgatgacttggaggatatttgctggccaactgcatcacagaggcagagactgaacaggatgtagcatgtaggcgtcgatgctatttaagcactttcttgtaggaaccctaaataaaatgcctctactggtttcactgtatattcattataagaggtttaactcactcttcagccttccagtggattttaaaatgactatatcttataattcataggcctaaaataatagaattttatgaataatctcagttcttgtcttgtgaaagtatttctgatcagtcacattaatacccttagtcattcaaaaaaatctatgttatctgcttctttatgacttactgagtaggaatttcacttttcaaaggaatattatttgaaaatatagcaatgatatatgctgtttaaaattgattctgtttaatatgttcttatgcataagctttaggtatctaatacattttagccatacattgcaaatctctatatattttaatattattattggttagcgtacttcttggcttactaatgtccactgatgtcagtcttagttattgtcattccttccaatttggaagaacgtttattttctaacactgacacattttgcacagtgaatctataggaaaatgtgactgcataaagacagtcttcatttcagtgctgatgctcacctttctgcattaacatgagtctctttcacgttttatttcatcttgttgcaaaaaccaatatgctttggaaagtgtaatagtacatttttttagagaagtagcatgaggtttgtttctttctcatacagatcctgaaatggaaaatgaagaacaaccatcctctgaaaatgattctcagaatcagagtggtgaacagatttcatcaagttctcaggaggttgatttggttgatcaagagtcttctgaggaaaattctctaaattctcacccagaatcattatctctagcagatatggacaatgctgcaagcatttccccttctgaacagacttctaatcccacagaaaaccatgagactacaaatcttaatggtgaatgtacagatttagataaccagcttcaagaacaatcagaaactgaggaagattccaatcctaatgttagctggggtaaaaaggtccagcctatagactccatattagcagactggaatgaagatatagaagcatttgaaatgatggagaaggatgagctatgacttgctaaacaatctgttggtaggtatttaaaaagaaaaggtaaactgtgtgtggttaatagacatcctaatactaagcaggctttctaatgggaggctttaagtatggtgatgaacaaccacgttctgactggcgtagttatcgtaggaatctggagcatgctgtgttagaattgaccttgtttaaaactgtcccatcaaaaatggaaatccacagttcccccttcaaatgcagcactgcaccaccctgcaacacctcaggccagggaaagattactgagcattcctgcgaaccagatttctgttgtctctggatagacaagaaacaaaattcatttagtagtggagtggggaataggagtttggatagccttctaattaaaggaagctcgcctttcttggttttgggggttagaggctcttttgggaagatgcatccgagtattgtggcattctgattatgctgccttcacaaaacactctaagtgacctaagtggttatgaagcaaatgcatttatggtgaaaacagtctttgctcattgctttctcttgtttcatttagtgacaaatgatcaagatgacttgattttttttccttcttaacaatgtcttttttatttaaaccaaaggtgaagccagtgtactttctcagtgagttctctgcataaagactaatcagtgggaccaggtaaaaaggtcatataatacattgtggagattgcttacttaatacttctgaaaaatggagtaagggagaaactgtaatgttgcaatatgaacctcccattgggccttccatagggaaagctgtgactactctgaaatggaacctagcattatatccttgtagggtagattataaatcatttccagttcatttctcttagaggtgattacctctagccatcagccttactccatcccatgtttggtatgcaatttgagccacaaggctcgtatcgccaacagctatatacattttgttccatttttctgtcttacagagccatgatagaactgtggttagtgagttaaaattcctggagtaactactgtttttctcctttgaaacttaggtttctaaagttgcacctaaggaatctgtcacattttctgttgaatcatggtttttgtttttgtttttaacagatattccttctgatacggacttgaaaattagtgtatggtgacctgtgtttaaaaaaaaaagtacaatacaactacatatagctatatagcttaatgagacttccaccccccccctttttttttttggtttgttgttgttgtagtagtctggtgctggccacatttaagtcttaaaaatttttaaattttgttgttgatgtttgtagacagccctgttgttgaaatcatggctttattcattttatttattttttaaacttgcctgaatttgttctaaaggaatatttaagagacataattttcttctctttaccataacattacacaaaactttttcctaaaacacggttgtgaggtactgatgaggtgtaagtggagctgttaaaaacagcagtgctgtattgcagttatgtatattcgtgtacagtatgtttagatcccaggtaaacatattcttttctgagaggataaatacctgcattcagatattccaggtaaatataattgagtcagggagtagtaaatctgatggagaattcactttggggaggggaaaaagaatagtatgcaagacccttattggcttttaattatacctgaaaccaaaatggatatttttagtctctctgcatgtgagatttggtgtaacaagatagaactataatatatacagtatatggaaggatagatatagtgctttgttcattttaattgcaaagctgccaaaatagttgaagcttaattacttgacttgccttgatttataggactggggcttggagaaaatgagcagatgttcctctaagacatcgattacagaagccttatatacatggatttgattttgtatttgtagctgaaagtcactgttgtctaaaactaacttttctaagttatcaaaacaacctaatttcttttccaacaaggagaacttaatggcatgaaggattgtgtgacacattggaaaagccagcttactgccactctcttcctttggccattagagggaggtgttgcctttcattgacgcttagaagcaaattgttcacttgttaagaaaagtaaatccttaaaaaaagaaaaggaaaaaatttaaccaatttttcttaatacccagaaggaattatactcaatatttccctagttaagaaaagaggagataatgttcgtctaaaaaactccaacgttgtaattacaactctacattcatttacttacttgacatactgccacaaagtagtttttgagttcattaaaaattccaaaggcattagttgttttttttttttttagtgttttgttttttagttaacttttatagacattttagtaacttgctaaagattcaggggattctatgaaaccccgaatttagaaacatctggtctacctcagttaaatgttgactgcttagaaatatagctgaagtgatcaccacagccataaaattgtttaagaaagatttatataatgtttacaaatctggaatcaaggattttagctgaaatcctttaagagatattagagcaagtatttaattcaggtattttcaagttttaaaacttaacctgtttacctactaaaaataaaatagctagtttttttctgcatataaaagttcattgaaatgatatgcccttatttgcaatacttttcccataaagttttaagtgtgaaagaattgtaatttactagatatgtttggtatgggatattttgttaggcaagttttcttttttcttcttaaattgcaataggcttccaaaaagagta

SEQ ID NO: 4299 - DNA, 6000 bp, Homo sapiens
agtcagcaactcctgagtcacaggtctggcactacccaagggctgtgattggggccatttatggctggcccccaaaaaaagggtgaaaataggtcaagacaggttttccaaagagataaggagagatgggcatggaggatgcctgaacaggctggaaacgcatctctccttcctcctctccccaactcctttccacccacaagttggtcactgaccagcctgcggcggcagagctaccacctccaatggccccagtgagggcactgaggaacacagcagtgcggctagagcaaggcagtgtgcagaagggagggtgggctgctatttgaattcaaattctcactggctcctttcacctgattttcttcaacttgtgtttcagtttccctgactctgcaacatacatctgggtgcctctcctcctttctggggaaattgggaaggttggtatgatgacatctggaaggttcttgctgctccttgggagacggttgctgagtccaaggggtattatcagaacccttaggctgcaagcccagcccttgttccccagctgggggaccgtgtcgacccccaggagaggagggttgggggtggtctgcaattaatctgtggtgatgtaaaaatcctaatcccagctacagttggaattttctgagaacacaatgagctcaggaacacccctttcaaaagaaaacccctcaaactactcccaatgtaaacattcactctaccaagggttccttcacacacacacacacacacacacacacacacacacacacacagtacctttgcacttattttgtatgtatgtatgtatgtatttttagagacaaggtctcactttgtcacccagtctggagtgctgtggcagagtcatcatcgctcactgcaacctcgcactcctgggctcaagcgatcctcctcccttggcctcccagagctctgggtataccttcatacttatgaaggggaactaagtcacggagaaataatatggtgcttaagaataaagggagacacgaagttccccttccaggaggagtccaggaaaatattccttccatcactttcctctccaaatgaaatcccactgaaacaagatgcctgcctctgttcaaacaattattgcaacatgcggcacacatactaataggaacagaagctgaaagggaaaggttggttctataaccacaggaaaggacctttgctctctcaaacttcttgggaagtttacagagaatgtgatggacacattcattttcacaatagttaaaggaaagttctgcccactgatgtgagtgaaattcattaatttgtttaataaatatttattgagctacttctgcagatcagatattgtgcaaggtgctggggtccttgtcctcacagagttttcagtctaacttacattctagtggaagatacaggtgaaacaagtgatcacagagaagcataacaaaggctttagtgggggactatcaatcagagctcagcgggagcacatacaggaacaccagccaaaaactgggggagaagagcaatctgaggagccttcctggaggagctgacaggatgagaaggacttagctatgtggagaagatggaagaaacagcagagaatgcagcatatgcagaggcttagaggtggaagaaagagggggtgccccagaggaaatgaaataagtccatcacatctgagataattccttgaggcccctcctcaccaaagacctcccagagctgttgggcaccctgtcctgagcaaaaaccacctcaccagccacacacaagctaatgagattctgctttaggatttcttcctaagtgtatctgaaaggcctagtaagctgctgctccagctgcagaagataagggcattcgccagtgagatttgtgtgggactccttccttagggagaaggctgtctgggcaggtcaggactgaatacagtggtcagaagacctgtgggggccaggcgcggtggctcatgcctgtaatcccagcactttgggaggccgaggcagtcggatcacctgaagtcacaggtttgagaccagcctggccaacgtagcaaaaccccatttctactaaaaatacaaaaattagccaggcgtggtggcacatgcccgtaatccagctacttggaaggctgaggcaggcgaatcgcttgaacacaggaggtgggggttgcagtgagccaagatcacaccactgcactccaccctgggtagcagagtgagagtccacctcaaaaaaaaaaaaaaaaaaaaaaaaaaaaaaaaaaaaaaaaaagacctatgggtctccaccctcttgacacagcatcccacagctccattacagaagagcaatcttgacccttgggtagtgctccccaacgccctctgtccactgatgacctctggtaggatgggtgagggaggtaccccatccttgtgcaggtccagggtgcaccttaggcagccaatggcattacacagaaattacccactgctctcccctggggtgcccacccaggccccaaccttaaaccacttctatcagaggccagcaaaactatggcccacaagcctaacctggtctacagcctagttttgtaaataacaatttattggaaaaagccacactcatttatttacatagcacctgtggctgcttttgtgttccaacagcagaactgagtcgttgccacagaacttgtataacctgcctaaaatattcactgtctaggcctttacaggaaaagtttgcagacccctgagctagattatctgaatactttaaatccttatatatgccccaacaaatccctgaaagcctgcccccagaaattccatttcaccaaataccccggccttataagttgtcaacactgagaaacattgacaagaaacatgaagaacccccttctatggagatttgtaagaagagttctcagttgggcatggagaaggggtcatccagcagagaagcaggaagtggactttttcacctcctagccctctgtgtgagctgagaccggatgatggagggatgatgtggaaggttatgacaaaagattatgaaatcatggcagctgtgagagaagcatcaggtggaaacaagaagggctgggtcacggggaggccagggcttctggaggagcaggaagagggctccatgctcagcccttgtgactcatgaaatagagaggccctgtcaagtgatgtcttctgatggctgcctcatcagcacccctaatcctgcagggtttgcacactcctcttctgtcccacaatgacagctgaactcagtcaggaggcccaggccggcctgttggacagtacagaaagagaagcaagtgaagtctgagaggggggaattctccagggggggattggaggattgtaaatcttcaagggcctccagaggtcatcttgatcaccccttctccagcaagagctgcacacacccagctggagggaggaaggatattttgggtggacggagtctgaggctgacaactagactgttagtaagttcttcccaggcccatccctgctgggtggctcagaggatggactctggagccagagggtctgggtttgaatcccagctctgccccttccttgctctataacttgggtgaaataatttaacctttctattcctctgtttccatgcttgtaaagtgggaataaaatgatatcttgatgtttggggcaaggactttcaaactccagagtattcattaagcacctaatgtgtgtcagacactgtgttaggcatttaacacaggttgggtcatttggaaggactcagccggagaccgtgagaccatttatatgtgccagtgtcttcatgttgggagcacttattccactgtcttcttcctaggactgattttcgggcctcaagggtaactgtaggaggtccttccctggttactcctgctgcgcctgcccctcctaaccatggctggactgtccctgtcccaggctaagccagctgcagttggctgtgattaatggcctctattaacagcaagttgtaaactgataaagtacacagtgcccatgaaaatctcacctctgctaaattccacaccagtgagtacttactccttaacccccgaaacctcctgccttgcctcgtttgagagacatagtgacagagagtacacctttaaccagaggaattcaaaatgccttggaagcaggaaacaactccatgaattctttgggggaaaagcccaaatcctaaaacctggtttcacatggagtggagcctaggcgagatgaaattaaagtccaggtcaaggaaggtagtttcaatcagcctcaaagaaatcccagagccaactggccaacagctgcgtgcccttgggtaagtcactttctcctatctgggcctcggtttcattatttgttaaatgagaggtttggttcaaaatgattcctagtctcctactctactcggcagacttaagagcggttctgaatacaggaatctttaccaaaaaaaaaaaaaaaaaaaaaaaaaaaatcacactccaggccttagttccattccttctttccctgagagaatctttgcaaagcagcagccctcttccacctggtcatcccctgcctctctacactcatccagccaagtaattagcttggtttccttcaagtcaattatcaccattaaaaaaacaaacaaacaaacaaaaaacaatgaaattggcattccttggtgagtaaacgtgcaggccagacagggatgtgagatccacaattcaaagaaacccttgcacactcctgacgtgttctttccgaacactcttcggagtctcagttttatcctcaaaaggcagagaggcgcaggttttagcttaacccactgcgcaggtgagaaaactgaggtccagggtgacgtcatgatctagggcgagcggcaggtgggagattagaacccgagaggctgccgcggcctctgctccctccctgctaggctctgtcccacaatgcacccgagagcaggagctgaaagcctctaacacccacagatccctctatgactgcaatgtgaggtacgtaatctctctcgtgtgaagtgtttatgtgtaaaaacagcggattagtgtctccgtgctgctatgtcttctgggatcagaaggacccagcctcctgcccctccctgggacgcggagcggtgacctccaggcgcggtaaatcgccgcggcgcctgggacccagcggccagtgcacccccgcggtgggtcccagcgggctttccacgaccttcgcctcacgcttttagcccgccgtccggcagggggcctgggaagtcctcccagccaggatccatttcaaactctcccacctccacctgccgcaccgccccccgcaatccttccaggctcggctcccgggtggggaaggacggagcgagcgggcggctggctggaggcccgagtctcggggattggttacatttctccccgggttaattaccacggggagggaatctgagctgtgcctgtctcgggcacaacaagccttgtcgcctggtgagagaatctcaatcttactcaggtaacacctgctggcccggcacagaaatgttctcattctgcgggacgccacctcccacagaggactgcaaacgccccaggcggcctggacccggagtggagcctcccggggtggagactggacggggtggtgacgggattggacggctggagtgtgcggtcactagggggtggggctagggcgggccacgtttggactgcgaggcccgggcctgaaaggaatccctctttggccggcgccaccctgttcaaccctgatgcaatacacttgccctttgcgtttacccggggcaaatatttaacctttccattttttgcactgacttaatgagtctcggtgtctaccacagggcttgacacatagcagacatccgatatctgtttgtgaatgctcaagcccgtcagcgtgtctgtctcctaggggagtcgtgttc

SEQ ID NO: 4300 - DNA, 6000 bp, Homo sapiens
tcccagcactttgaaaggccaaggtgggcagatcgcttgaggtcaggagttcgagaccagcctggccaacatggtgaaatcccatctctagtaaaaaatacaaaaattagccaggcatggtggtgcatgcctgtagtcccaactacttgggaggctgaggcatgagaatctcttgaacctgggaggcggaggttgcggtgagccgagatcacacctctgcactctagcaacagagcgagactctgcctcaaaacaaataagcagacaaacaaaacagctaacatttactgtgcccttattatgtccagatgacgttctaagttttttacatgtattaactcatgcaatattcacaatgattgcatgaggtaaatactgtttctgttccattttatggatgagacatagggtgtgaagtgccttgaccaaggtcacacagctgctaagtggcagaaccaggattctactcccaccactggcttcggagcctgtatttgaaccatcgtggtatccatgctaatgctcagaattactgtgagatccaatgattctatgtcttatggctctatacaagcactaagagctgctgctcccatggctcagtgatttggagggggagggaggagggggaaggaggagcagggagagggtctctcttagcactagtgatggtcgtggtagtgactgcaggatttagaggctctttgcagaaatctagttgcttcgtttctggaagggaataactgagagccattattttgtttggacaggtctgaagtggggagggaactcggtcaaggtgaagaactacatcagcttctcaagcatcctcttctctcccttcccctctttctccctcactcctcattcagctagggcctgggggcaggggtgaggtttccagcaaggctgcctccacactgcccaggcaggtagcctcagctactgttgcagggttcagctgttgggggtgctcatggagtacggttggggggggaagcctcccaagcagcagccttcactaaggcctagatcgctcagagagaaaggaggacacctgaacagccacagaaagctggcccaggagactgcaaaagtactctttgaggcacctcttcctaacatgacccttccctctacgggccctggaaacatatgggcaacaggagcctgatcctgcagggctagcttagagcccagagttccaggacagctccagcgtttctgtagaggagggacttaggagttgccatctcattggaagggaggtaaggggcctttattttagtctgtggacttatttggaggtgactttggggaggatgctgatagagatcatgaaggagggtaaggtctccccaaccctaccctggccaccatggctctgccaatgcctgtaccacagctccaggcctggggtttgtgctgacgctcgaggccaacgcagggacagtgcagagaatcctgtgcttggacggcagacctggagaggcaaagcctcagtggggatgagctggcttcagctgctgtccaccttgtccaggaagcctagagggagaagttaggatttcaggagccactaagtgaggtggggctgcggaggagagagagttgggggtcaggaaggggagggatagttagaaccctgggggagaaggctgagggtggagtaagatgctccttcccttattccttcagccctctgtcttccccagcaaggccaacactgctatgccaagaatggcactgcgctagtctctctatatacattatcccgttaatctttacaaaaagtctgttttataatcaaaatccccatgtcgcaggtgagaaagttgaggcgtagagaagttatgcaatttgcctgtagtcatacagcatacagaggcagcatgaggatttgaggatgcaggatttgaggtgtttactgagtgcctactccgggccagtaggctcggtgagcaggggtccttgccctcctggagcttacagtctagtgttgtggggagactagaacaaggaaggataagcgtgatgagggctgcagaggagaagcacagggcacacagggagaggggtcagggaactgggactggcaggatggagggggttggcctggtgcagtggggtgtggaggacaacatgtacaaatgctctgcagcaggaaggagcatggccctttgggccctgcaaggagacagtgagggagtgggcagtgccaggtgaagctggaaggtgggtaagggctgcatctagagatgctggtgcatgaagcctgaaaggagaggacagggtaggatggacagtcaggacctaaggagcacctggggaggagggcggagctccagatatgcacccagcccatgtagactcacaagacccagctccatgccctaacctacctcaggaccttgggtgagtcatccaccctttgggggctccctgtgcctcagtggagtgaagaattatcccttcctcgccctgctgcctcctgggaaagttgataagaatcaagtgaaattaagattatcaggctgtcattgtcatccctatcaggggaagggttctctggggcctgagggggctctgagtgaagcacagctgtgttttctccagggacccactgtgttcccatcctcccccattttggcccagccgctgcctgtgcaaatgtcacctgctccttccacatgccatcagaattccacttccgcccaagaggggaaagggcacattggaggcagtatagacattaaacacagtattttcagaaggagcagacataaccttacagaagtgctttattttctgtaattagactttattttactggaggcagctttgcataaggctcaggcgtctcttggtccattttatcagaaggaaccatgggggtcatttcatccatcccttttcatctaagcagcactacattccaatcgtgaaggcataagctttccctgtcaagcaggatgctgccccagacccttagcatcaggaaaccccaaagtcgaacctgaatccagcctgctgaatgaaatttgagtcccatcctccctcgtcctagcaaaagaaggtttgggggagatttcaaaacagaagcacttttctccccagggagaaaccgaagaggagcagcaggtactgctcttcagcccgcacacccatctcaggtgacaggtcccctcctcagtgtgggatgacgaggtgggggtaggttacgggagtgtagcagagtggggggaaacccctggtgccctcctgctgagcatctgaccttgagccctttaccccaggtccccctttccatctgaagaacagtgaggggtcagcagacctgactagaggggctcaggcatgtgtcctctcccccagcccacacatgaacacacgcacacacccttcccaacacccaggtatgcagatgcacactcccccacaggaggagccgcccggaaatccctgaatcagcttttctgcagtccagggtctgtgacaagcgagctgctgcccttctgaagagaggctccagcccggccaggagcagcgggtgctgcagcacttcagtccccggcttcttcgggagtgaggtctatgtcctggggcaggggatgcctggaggaggggaagaagggggattcactgcgggtattgggaatttcccggttccccagactctgtggggatgagaagccctggaaagccctgagtgactgccccccccaacacacatgcacactggatttttgtgtgtgtgggttgggggatgaggaatgtcacttcctgggtcaaaccccaaactcgagtcctggtcctgagtgtgcagagtggaaggcaaacagaaagcagctgcatggagggtgaaggagaggctgaggggagagggcgaggatggggtggagctgggaaggtcaggggtggttaatggccggacagcagcagaaattccacctggcgagctgtggccccgaggtcttatcgggtgaggttgggggttgagggtgaggcccaagggtgacactgaggcacaggagtgctgcccaggctctcggtcctccctgcccctcctggtgctcaccgtgggtgtcagcctcgcttttcccaagtgggagaaagcagagttgtggaggtgggaggtgtcgggtccgtggcagagcccttctgctgggttcctgtctgggagcaggcaaggggtcctgtgccagcagacgctcttcctcctctcccccacacccgtacccctccatcgccctttctcccctccccaagtggcccgtgaagagccctggcaccagcctttacctcaccctccaggacagactgagggtggggaccgcgggctgccggagccctcggggcgaactccccagctccccttcccctccagcatctgccttttgttccatctctcttctccctcccttctctcccttgactcaggaaaaccttcatccttatctcccgaagcaaatcgtttccctcccacccctgcccgcaggccattccctacagccagggggtcccctcccccagctaatcccccgaaccgagaggctgtaaactcggagctggcgggtggggtggggagtgttgcaggagtgcacggagctggcggggactcctcggcagaatcgggggagtcccgtagggctccgggggctcggagccggccccgccctcctcaaacttctgtaggaccgcgccagtttaaacccctctcccccagcctagtccctcccgcacacacctccccttctcctgtcgcccattttcccctccgctggcagtccggactggagaagggaggcgtgggcgcgcggaggcagcctccccagcagcggggattgcctggggcgggggccctgcgtcgtggtttgcggggatcgccctcggaggggccgcacgcgctgtgtgcaggcgaatgtgaggagcatatcaataggcgggcgggggaagcgggatcaggttgttactactgcagagagagagagaggaagagaatagagagagggagagactcgagagcgagcgagcgcgggagcgagggccgcagcggcagggccggcggggaagtgggaagagggacctggacttcgggaccccagctgtccccgcccccgcccccgcccccgccctctccaccagctcaggctgaacgcgcccggaacgtcccagggtaagagggaaccccaggcggggcaccccacgagggcagccagtagtcccgagcgaagccgtgcctcgaccgacagtggccacctctagggcctgaggcgtgggcggacgcggggtcgccaaacggtgacactccgacttttgggacttggtgctcactgcggggtaaactaagagtaggtaggactgagcccgcggtgggaactgtaatccggaaatccatgggcgtcggaattacctggctagacccgggggaggtgtcctgaattatttcgggaacccctagcccccaacctatctctccccgcggagagcccgggtccaaagcggagagaaggcgagagaagccgcggtgccttagcgctgggaccagggacctgcggtgaagcgaaggcgactcgccgcagagaagccgtgggaagggcgcggggaggtgcatgaagtgggcgtgcggagagaagtgggtgcggggcgcatgggaccctgcagcgcctgcctcgctgaggaggagctggaagaccatgctcgcgcgacactggggagcccctggcgcagaggggggtgtgccggaggcacgggcggtttgcaggactggctgcctttctgagcgcccccgccttgccgcagccgtccagggttgagatgagcggctgcattttccaccccttcctctcccgggaactttcccacactttgacacgcgccacggctctgtgcattggaggaagcaggctcgcggggatcctggcaagcttgcagagacccgggtgggcgatgggagggggcagctgggcagtggaaacgagggccctactcagtttgctg

SEQ ID NO: 4301 - DNA, 6000 bp, Homo sapiens
aaaattatccggatgtggtggcaggtgcctgtaatcccagctacttgggaggctgaggcaagagaattgcttgaacctggaaggcggaggttgcagtgagcagatcatgccactgcactccaccctgggggatagagcaaggcccttgtctccaaaaataaaagtgggggctggcattggctgggcacggtggctcacacctgtaatcccagcactttgggaggctgatgcaggagaattgcttgagtccaggagtataggctgcagtaagctatgatcgtgccacacactctagcctgggcctggaactggctgaacttgggagcaagaccctgactccaaaaagaaaaaatgggctggcattaaaatccttcatatgcctgtatactgttcacttttttttttgtcatgacattagcaaagtttgcctgtctgtcagggctcaaaaacacctcttcagccaggcacagtggctcatacctgtaatcccagcactttgggatgccaaggctgggcaacatagtgagaccttgtctctacaaaaaaataaaattagctgggcatggtggcacatgcctgtagtcccggttactaagacttgggaagctaaggtgggaggatcgcttgagtctggcacattgaggctacagtgagctgagatcacaccactgcactccagcctgaatgacagagcaagacccttttaaaaaaaaaaaaagacttctgttggggaagagctacaaaggaagtcagactgtttttccacttcagagtctgggacgcttggcatcgagtaggagagctgaggccctatatactgtagttcggtgatttcaaacatgtgcctttgctttgattcatatttctccaacaaagctgtgaaattatcctgcctaagagacagtagataggggaaaaatggctgtattctttatctatactgctagactggtcttgctttaggacaagaatcaagctaggtatggatagaggctacccatagactctctaaaggcccaggaactaaactcttagaaactttgtgtctttgcctccaggaaaggtgtgccgtagcctggaaaacttgggaattggttcacaatataaatgtctccaaaaactataagtgaaataactctccagctaactggctggtgattaaaaatcaatcttttccccatgtttggcacaggattatcttatttataggagtacaaacaacctccctgctccacagctttactctctaatatcctaggtttacccagttggaaagcttagtggtaaaggtttattagcttgagttgaagaaatctcatcaaaaatgcactcagtcgagtttggctcaaatataatttgcagtattgggtgtggcaagcttgaggggaaaggcatttcctctaaaatacgtaaggacatagaaagctggcagaaggttggctcacctaggatcgttctaacaccttaggggtttgttctgattttacaccatagactaaaacacacttgtaattctccattgtttgtgagtgatccaccccatagaagtggtattttcagatcctagtattatttgctcttctttcttgccagacgtccgatccctatctctccctttcctgtctctgtgttactacagtttagaagaccaaactggacaatggactttgctcactatgatgacatgatctccattgacctccattgtatgtactttaatgcatgatgatatattttgtatgatgagttgtagctgatggctggtttgtgagttaactggggtctcaggttttggtgactctgggtctagaagatgtagagaggtggtataggagctagtgatagaggagctagagggaatcggaagaactaatagtaaatgatttggactgaaaaaggaaaagactttgatgatagccagaagacttgagggcataaaaacttttcagatcaaatgatgaaattagtaagaatgccaatctggattctgcacatgatctttggaccctaattgcccaacttaaattttctctatattattctcattgcctctagtaaaatagttacatagcactcaaagttactaaatttagtgtgtgaccattctagttgaggggttctctccctccactgccctcctggagcaatcaaattgtatcacttatttttgtgcatatcacaaactacctatgttatctggctctttgaaaacaatactataacttgttcaacttgtattttgcacagtgtcttgtattttgcacagtgtcttagaatgccttagggtgctagtcctaaatacacttgctaaatattcaatgaatgtgttgacttactctggggaaagggataagagaagccaccacaagcacaagaaaatgcacataagcccttatctaagtggctagaagctaagtcatatgctggcaagctggaatctgccccattcattcattcattttgaaatgggttctaactaaaataaagtatatttattattttatgatccatgtattgcatctcagaaccagaattttgttttgttttgttttgtttctgccctggtagcctgatctaagttacttccaacagtaacttagtaagtaacaagctaagtgtgcccctcttttcagatttatctaagatgcccaaaaatatttatgttttttgcttgtgatataaagttgttttttggtttttttttttttgcttgcgatataaagtattttttagtaaagctgctgattcagtagtacttcactttgaggaaatatgttttgaggtcagcctattgagaaagatttccttgtgtccctctcacacgggttgcccatcctcgaggttttcataggcttccagcttcctgttctccttagctcaattgttcactatgactgtgtgctggcatctcgtcagagtcttgcacatttaaaggaagaggaactgtctatgtgttgacaccatataaaggtctgctgtatagcaagttattgtttttgtctctcttggactagattgccggttgctttcaactgtgcttgtgggttgagcatagcatgactcatgactgtttagaagcttgaggattgcccttacctgatgtgttagtaagtgttctccagaaagcaccaataggatacatacatatggatagagatgggatttattcggggaattggctcatgagattatggaggctaagtcccacactatgccatctcaagctagacaatgaggaaagtccataactggttcagtttaaggctgaaggcctgagaacccaaggggctattggtgcacgtcccggaatcccaaggcaggagaacctggagtttctgatgtccaagggcaggaaaagaagggtgtcccagctccaggagggaaggagggggagagacagagagagttagggagtcagagaaagagatttataatccctgagaaggaattgtgattactcttagataaaaaagaactgacacaagatatcaaagatatttgtatatagtgaatagccatggatgatatagtgtctccctcaggagcaaagttatgtttactgcccaatataaaagattggggctccctaagcttaagtttcctctcccggaatgcaacccactccatgtgcagttgttacctggccctccctgcattgcaatgtggttatttgggtttgggtggggcttgggtaaccaatgcaagaaaatgctaatattctggctactgctattgctataactaataaagtcctttgtatgggggtagaggtggggagagaactaataatttacagcatagtggaaatctttggaaactttctccctctttccctctttttttatttgcatttccctgaggcctgtttaaagactactgtgaaaatccaacccaggaaaacctaaagtgtctgagatttttcctagaaaatggaattctgggtttttctgattttgtgtgtgcctgtctctagtttctgaaatactcatttgagtagggcttagattatgggttgtggtggttgaaacaagttattgtggagctggttattaggtatgtgtgtggcaaagggtaaattggggctgcctccttgtcttcaccttcctgcttccaggtaagttcttgcttgcttgcaggacagattgtgatgaaagcttgttatcccagggttgaactcaggctataatcctgtaatagaattagtagacttcgcagagaaattaaccactaggcatctgtcccacaaccaagttccttttgtatgtatgacacatttatcagagcatttgtagataaggtctaactgagttcagttggcatttaattcatttctaagcctggatgatcttgtagtaattgcagccagatgttggctttatatttttattcctcggtctcagagctaggcctttcttgggcagagtgagctttgggagtgatagatgagattcttctcactaaatggttccatacctgtgggagggagttgagggtgggtagctgtttttctatggtgacagtttggtgcagtaaccatagatcatatgaaagcaagcaactaggtgttacattttcagccttacctataagattagtgaggttctgggtaaaggttgacattaaagagggaggacaggaatagatttcatttaagcaattaactggcctttagaattggggacaggatatgagttgattagcttcttattcagtattagagtatagaaatgaaactgtaagaggaataaattgtcaatccttcatgtttgtattttcttttagtgtctaccatcagagggagatctctgccccctggggctgagagaccccaacctttccccaagctgaagctgcagggtattgaggtaccagccagatgtcttcccacaaaggatctgtggtggcacaggggaatggggctcctgccagtaacagggaagctgacacggtggaactggctgaactgggacccctgctagaagagaagggcaaacgggtaatcgccaacccacccaaagtaagtcatcttcccaggagtcatccccttgttcagtttctctccttagaactctgtcattttctcttttttaagagctcaccgtccaaaaggaggaacattgcatcctggaaatgtctctatccaagtccctatgatactgttataaacatcttgttgtctgctttccccattgtaagcttttgggaatgcactcatctttgtaacaccagtgcttagcacaaggcctgcagtccaataaataatcagtaaatatctgaatgaatgaaggaagcagtcaattaggattaggtttgacttcatataacacacaaaaatccttacagttttgacaggacagaagtctctcaagcaaaagaatttcagaagtaaccaatccagggctgatatggaggatccaccactgtcaggcacctgtgttgctctcccatcactcttaatatgtgcccatcatacccacattctaccccccatgaaagggaaacgagaagaaaggccctctctttcccttttatttttattgagataagatctcgccatgttgcctaggctgatcttaaactcctaggctcaagtgatcctcctgcctcagcctcccaaagtgttggaattacaggtatgagccactgtgcccggccaactctttgccttttaaagggactatcagggccgggcacggtggctcacacctgtaatcccaacactttgagaggccgaggcaggtggatcacctgagatcaggagttcgagaccagcctggccaacatagtgaagccccctctctactaaaaacacaaaaattagctgggtgtggtggcagtcgcctgtaatcccagctactcgggaggctgaggcaggagaatcgcttgaatctgggaggcagaggttgcagtgagccgagatcgtgccattgcactccagcctgggcaacgagtgaaaccccctctcagaaaaaacaaaaataaataaagggactatcagga

SEQ ID NO: 4302 - DNA, 6000 bp, Homo sapiens
taggttgactgctgtttcctggatcgcagctcggaagatccacctgggcgaatacaaaaacaaacgagactccccttccagaaagggaggaaggaaggagacagaaagacgaatgacactgagcgtgtaaagcccggagacagcctctctctaccccaacctaaccctcaaggtaggggatcccccgaacatcgctaccgtaattatggtagaaattcctgaaacggataactggacctcagcaccgtcatttctagcagaatgattgagctttcctctgacccaaagccaaggggttccagcaggggaaactaacgaccatccgcaaaaaccctcacccaagtggggagtggaaatcctggctcttgggttgcagagcacaacttgacgccagcgcgtttctcttcccccacgcaatggcaagtggggcgggagtcggaggggagaggaggagaggagaagagaagaggagggggaaggggaggggagaggcgaagggcggcccgggttccagcagccgccccgccctccggctcgcggcggattcggcgctgcggctggagccggcggccgggtgcctgcctgtccaggcagggtctggccgagcgtcgcgtcgccgtgcagtgcgccgggtgtccgggagatggcttcccctctctcgcccgctgctgccgctattgtctcacccggggtggcctgactctgcgagctcgcgcacgctctcggcggagagcacccctccccacccccacaagctggtccttgcgccctttgctgcctctccctctgccccttggagcctagggtctgtgcggagcctggagaggggagcggcccgggagcaggcggcgtgcggccggccagctcctctcgcgctggtgcaagaggcgcctggagccgcagagcgagcccgggaggcgcggagcgagcagcccacgtcgccaggcacaagacacgtcggatgttgcagcagagccagcagctagcgcaggtaggacacgcatcctgcgggttgcatcggccccagcgtctgtaaagtgcccccagagtggaggcagccgaggtcagggggctctccctccaacatggcaacagcggaggtgcaacaatggaagcagccgagggttcctggcggcgggctgagcggcggacgccgtgggagcctgagctcctgcccgccgggcagagcaggttgcccctcaccccactccactccactccagcagcttcagggcctctggggctccaggcacccgcgtccccacccccttctcgctaaacacacttcctggctcccagctgcagggcgatctgaaccagtcaatggctttggggtttgtttatttaagataagaaataaaaaaagcaaaacctgtcctgtgatggggttagtgccttctgtggactgggtgagaagtcggcatctagcctggggaatgtgtacgtttcttagtcgggcggagggtagaattggattctcccttataaggatactgcagcaaaaggagactgaaagcttgaaagagggagagggaccctcaggcctgagttcgccggtgctgggagaaggcgctgctctcctggcctatacttgtccctcattttcagctcccgacagcggtgactttgatgttggaggagcaatcgcagcaggaagcacaagcaaggctgccaagctggtgtggggtggagtagggtggggagcccaggggcttggcaggcttctggattgtgggaagaggttaccaaatgtatgaggttagtgcacacaccctagttggctgatgttgaagtgtgtgtgtgtgtgtgtgtgtgtgtgtgttttctgccattgctcttgctccttcaggcctgccttttctcctctccacccgcttctggggtcttcgtagcttccctgccccagcccttccaatcatgcctgggatggaatcgctgtattgtctctggcagctctcttgggctgttttttctcaactctgttggagagttttgtaccctgggctggctggtcccagcatggcaccagattctttagcaggcggctacccgggctccaagaagtgggccaatgctgcccctcctccttgctctaaactacctatttgggatatggccaggcagatgtaagcaatttgtactaaattccaaccctgaatcagtgctgaatgaaaacttactctgttgctgcatcaggctttgggaagatattaggaagagaaatggcccaggaggtggcaatgccgacccccaaatacttccctctccccaactccagctgccgatcccagagcagacaggcagtgagactttggaatcccagctcctccagagtctggctggcccatcttgaggttgtgtccatggaaaaattaagtcgaggcacattttatagctctgcttggcagccagcatctgaagagatggtggctctgagctggagccctagacccaggctgtggctgcttctcctttggcctttgggtgagcctgaggtttgattgccatggctctgagcttactgctgagtgtgtatggctgaatctgatcaagctctcagacccggctgcttgtctatttccttctccactggaagcatgagtgagaaagggccaagggggtgtgctgggtgaggaagggtcagtttatctggggacttgggctgtttctgggggagctcctttggacttccttggtggtctggaatgcctttggtctttgtcatgacctagtatgctctggcagatactctataccctcgtgggcctttggtccccgcttggtggtgtccccactcctcctgtgcctggtgctttgcatctatatcatgtctgtggtgcttcagctgggatggccctggcctggaccagtgggtagaaaaatgaggtctctgttccttttaggggcttgtaactagctataaggttcaggctcctcatgttcccaggatgtgaacttggacatcataatgtgaagtagtagagaaaacagtgtcttggtgtgactttctttttagctatgtgagcacagacaatttgtggacctaagatttagtttgtatatttgtaaaatggaggtgggggagtagccatggctcacaggattaataatgaaatgctgcttaccaagaactaaacagaatcatgtgtgcaaaagtaccctgaaaactacagagtactttacaaatgattattcttactgggtttagcctcccacataagggagggagatctgtgagggatggggatagggtgggatctgagggccacatggagtagggaatgttttgggaccttttctttcttgctaaggaaagagtagtgtgacaataccaaggtaactgctgtattccttgggtatttttctttaaatagtgttggcaggatgggaactgggagagaaggaaaggatgcctcatgatatttgtaggaattgaggagggataaacaccttccaaaggctggctactgcctatagagaggataatgctgagctggcaagtaatgtaatcactaacactcactgatgtcagccagctagtaaatgatagaggtgggatttgaagcaagcagtctcactccttaccctgtgttcatagcctcagtgctactcagagagatattgggtcttgggagaacagaaagggacagcaaaattgtggagttcattctttttgtttgttcttgagacagggtctctccctgttgcctaggctggagtgcagtgggctcaagtgatccttcgacctcagtccccaccctgagtagcttggactataggcatgcaccactacatgtggctaattttttaagtttttgtagagatggggtctcagtatgttgcccaggctggtctcaaactcctggcctcaaaggaacctcctgccttggcctcccaaagggttaggattataggcatgagccactatgtccagcctcagaattcattttttttttttgagacagagtctcaccctgtcacccagactggagtgcagtggtgtcatctcagctccctgcaacctccgtctcccaggttcaagggattcttgtgcttcagcctcccgagtagctgggattataggcgtgtgccaccatgcctggctaattttttgtatttttagtagagacagggtttcaccatgttggccaggctggtctcgaactcctgacctcaggtgatccacctgcctcagcctcccaaagggccaggattacaggtgtgagtcaccatgtccagcctcagaattcattcttaatggattccttgaatgcccatgagacgtcaccagcctgggacatctcatgggcatgtaggcataataaatttttctgggcctcatctgcttttctatgcatttttatttctatgtctaccttccaaggaaggaagagatgtgggataatctgatcaagtcatattgctgccttctgagcaacactaatagaaggtttgggacttggaggatcctggggaaattaaggcagatttcttgttttggtattttcatatctgctttattttgcatctgttttataaaatgaaacttgagggactattcttgccttttttttttttctttttctgttgagacaggatttcactatgttgcctagactgatctcgaacttctggtctcaagtgatcctcccacctcggcctcccaaagtgttgggattacgggcatgagccacctctcccagcttgttcttgcattttgtaagatcacatagagtatcaaaactggaaaggacctgggccatcacttccctgagaaaaagtgactttctcaaggtcatgcagttagtagcaatgctggaactgaacgcctaccccgcagatcacaacatgacccgtgaaaggacctatcctgcaacactttggagtttcgtgccgacccaattagtggctttgtctttgggaaatttacttccccaaaacactgggacattgggatggaattcactcaccccaaatcatcaccctggttaaggagactaaagaatcagaagacatttgtgctttggggagcagaggccctcagggtatagagaaggaagaagagagaggttcactgtagtcctgaagcagaaataagacctgtggctgaaggaagccttagcaattcactccttcctcttcctgagaactctctgtaggaagtctcacctagcagaggcttcacagtatttcagagaagccaaagattgtttgcctctttggaaactgttatccttccatcatgactgtgtcactcctgccactgttccaccatagaggtgggtgcctaatattagagagttgtttcacacacgtggctcattcctcaagcctcgctaagccaagcccaccaggaagaagcttgagtggaagcattctctccagccacatctttctctctttctctcatactagatggcgtcctttgcagcaaaccgtaagttataaggatgagggaagaagagtagagggccaaaaggattccattttgaggaaaaactacagtttgccttgccaggtagaagaatcaggtatgagttctttttgtctcaggtaataaactaagcaaagcccagatagtagtaatgatggagcccttcaactattgacgtctccctaagagccctcattttctgaaagcagagtgtttgtcccattcctgactcgccatgctgtgtgtctcccagagagtgaaagaaattgctgtgactgcgagcaccagtagagtggatttaattctcaccaagaaaagggaggtggtttgcaaatgggttgttttgggatcctgggagaggaacattgtagccagagatattagattttcactctagactttaaggaggcagatttttttttttttttaaattaaaagataggggccaggaatagtggcttatgctgtaatctcagcacttgggagactgacatgggatgatcacttgagccaaggagtttgagaccagcctgggcaacatagcaagaccttgtctctactaaaaa

SEQ ID NO: 4303 - DNA, 6000 bp, Homo sapiens
ggagaacactggcacgatcatagctcacttgcagcctcgaactcctggactcaggagatcctcccacctcagcctcctgagtagctgggattataggtgcatgccaccatgcccagctaatttttatttatttattttttatcttatgtatttatttttatttgagatggagtttcgcactgtcatggggctggagtgcagtggcacaatctcggctcactgcaacctccgcctcccaggttcaagcaattctcctccttcagcctcccgagtagctgggattgtaggcgcacgccaccatgcccagctaatttttgtatttttagtagagatggggtttcaccacgttggccgggctggtctcgaacctcctgacctcaggtaatttgcctgctttggcctcccaaagtgctgggattacaggcatgagccactgtacctggcctattttatttttatttttgtagaaacagggtctttctatgttgcccaggctgttcttaagctcctgccctcaagccatcatcccactccagcctcccaaagtgctgagattacagatgtgagccactgtgcctggcctgcaatttattttaaacaatagggagcagccaggacttagagaatgggtgcaggttataggcgaggctgggtctaacaaagtctctgtttgctcagggaggacctggtctcctgaaaacccagagcaggttagcattcagggccctcccagaacaagggtggggagtggaatgggctggaagcctttggccgcagaacccctccctttaggctggatagcactgcctcttggtctctgtgctgtctcctgctttccttcttgggggtactgtggaaatgcagcaatgagatgctcaagttgaacctatgacagctcagctaagactgaggtctggccttccaccttccttttggagacagtatgggtcagtattttacaccccttctcatgccacctccgtaggaggccgtgtgccccatcccaaagggtgagtctgagcaggatttaggggaggaggctgctggttgcccagccttatctcaattcccttccttcatgatctgccagctgcaaagcccctgaaggtggtggtggagtgaacagaccttacccaggactgatagccatctgatgtttttttaggcagtgtctccctctgtcacccagactggaggcagtggtccaatcactgcgcgctgcacccttgacctcccaggctcaagcaatcctcccatctcagcctcttaagtagctgggaccacaggtgcatactaccacgcctggataatttttaaattttttgtagagagggggtctcgctgtgttgcccaggctggtctcaaactcccaggctgaagtgatcctcctgccttggcctcttgaagttctgggattataggcatgagccaccacactcagtcctggctgatttctctgtggcacagctcagagcacccacaacacgctttgtaatatgcaaggccccatggggtttagtattgtgtgaaaagataagataagttgaaatgccttttataatgaggtgctgagattggcagagggcatgagtaggggctgggggtggtggaggcacctgccaccatgcctggctaatttttgtatttttagcagagatggggtttcaccatgttggccaggctggtcttgaactcctgacctcaagtgatccgcctgccttggcctcccaaagtcctgggattacaagcatgagccaccgcacccagcttttcatagtcacttctaagcagaggcttagatactgcaatggctgtattgtcgggaagcaagacttggagaccgcttgcttggcgggggaggtacaggatggttctttctgcacaggaggcagggctagcaggaaggggtgtgggacttctctgctgaaaattgaaaagagcaccgaaaaattcctttctctgccatttaagagcacagaaaggctgccctggaagtggctgggcatcctgtcagcttgggggagtcactggtatcattacaggtattgccaggtggtgtggtttcatgcccctgtgagctagaacctggggacggctccactctcccatgacagttggacggccatgtgagggattgtttcttccccttgaacgttgaactcagggagaaactcaagggagagattttcaggcctaggctcaccccagggagccttctgtaagttaaaacccaacccaacaaaacagcctctcctccctttccccttcatcctggtctttggggttaggggttgtggtgcagtgtggctcatggccaagcaatgcagaataggaagtgttactcttaacaaaggggaattgaacaccccaggtttggggagtagaaagacaaaagcaaacaaaccaggcctggcagagggtctccaggggcaccttgatagctgggcaactaaaaattcagttggtttgattgctccctcccgctccccaatactaacagggaagggaaattgtagatttttcaaaacagagaataaccaacatctgtttggctctggagtgtgctgaggtttaaaaaatcatatttaccttattaattatgtcagccgtaggctaatattaacatgcatttcctgactgggcagaagggggtggcacctcggtgacagggccagtcgccagcctgtgaatgatcaggatccagacaatttagagcaaatcgtggagacctggctcccaggacttaacaccccgtgtgcttgtgattgccccgcccttctaggatctgagtgatgagacgtgtccccactgaggtgccccacagcagcaggtgttgagcatgggctgagaagctggaccggcaccaaagggctggcagaaatgggcgcctggctgattcctaggcagttggcggcagcaaggaggagaggccgcagcttctggagcagagccgagacgaagcagttctggagtgcctgaacggccccctgagccctacccgcctggcccactatggtccagaggctgtgggtgagccgcctgctgcggcaccggaaagcccagctcttgctggtcaacctgctaacctttggcctggaggtgtgtttggccgcaggcatcacctatgtgccgcctctgctgctggaagtgggggtagaggagaagttcatgaccatggtgctgggtgagtcactacatcctccttccttcctgttccagatacatgccacctggcatgtgggacaggagtacctctgccctgggagctgcttggagggagaggtggtctgctgggaaggcattgctgggcaggagggtgaccctgggctgagggggcacaccaagagaaagaagagaataccaaggacataccccagtcacctctggatccctggtcctgcacagagcctggctcataggagacactggagaaatgctcctaacctttggctagcccttttataatttatagcgattatctcatttaatgcttacaaccaccatttgaggtgatccattttacagagaaggaagcagaggcttttaagaggttaggtaagtcttagccaaagccaaatagcagctgaacagtagagctgggactccatcaaggtctcccagccggagcttgctcctacccctaggacaaggggtggactcctgactctgcagataaattctacaaaagccacagaaggcaagtagtaaccattgtgtgacaacccctcacccccaggaagaggggcccctgtgaggattgcaggctctggagtcacactgcttgttgaaacgctgcctcttaccctccctaggtctgcgcctttgaataagtatcacttcttagttgctccatgcctcagtttgtccatctgaaaatgggggcatctgtaatgcctgtgttatgaggagtaaattacagcatccctgtgaagacgtagcacagtgtcgagtacggaatgttatttccatccttctcacggagcttggttccccttccccttgccctttacttgtcccagccattgactcatactacttcccttcttgcaggcattggtccagtgctgggcctggtctgtgtcccgctcctaggctcagccagtgaccactggcgtggacgctatggccgccgccggcccttcatctgggcactgtccttgggcatcctgctgagcctctttctcatcccaagggccggctggctagcagggctgctgtgcccggatcccaggcccctggagctggcactgctcatcctgggcgtggggctgctggacttctgtggccaggtgtgcttcactccactggaggccctgctctctgacctcttccgggacccggaccactgtcgccaggcctactctgtctatgccttcatgatcagtcttgggggctgcctgggctacctcctgcctgccattgactgggacaccagtgccctggccccctacctgggcacccaggaggagtgcctctttggcctgctcaccctcatcttcctcacctgcgtagcagccacactgctggtggctgaggaggcagcgctgggccccaccgagccagcagaagggctgtcggccccctccttgtcgccccactgctgtccatgccgggcccgcttggctttccggaacctgggcgccctgcttccccggctgcaccagctgtgctgccgcatgccccgcaccctgcgccggctcttcgtggctgagctgtgcagctggatggcactcatgaccttcacgctgttttacacggatttcgtgggcgaggggctgtaccagggcgtgcccagagctgagccgggcaccgaggcccggagacactatgatgaaggtaaggccttggcagccagcagaggctggtgtgggagccgcccaccagagacgacactcggggctgtgtctgggctggtgcctctccatcctggccccgacttctctgtcaggaaagtggggatggaccccatctgcatacacggcttctcatgggtgtggaacatctctgcttgcggtttcaggaaggcctctggctgctctaggagtctgatcagagtcgttgccccagtttgacagaaggaaaggcggagcttattcaaagtctagagggagtggaggagttaaggctggatttcagatctgcctggttccagccgcagtgtgccctctgctcccccaacgactttccaaataatctcaccagcgccttccagctcaggcgtcctagaagcgtcttgaagcctatggccagctgtctttgtgttccctctcacccgcctgtcctcacagctgagactcccaggaaaccttcagactaccttcctctgccttcagcaaggggcgttgcccacattctctgagggtcagtggaagaacctagactcccattgctagaggtagaaaggggaagggtgctggggagcagggctggtccacagcaggtctcgtgcagcaggtacctgtggttccgccttctcatctccctgagactgctccgacccttccctcccaggctctgtctgatggcccctctccctctgcaggcgttcggatgggcagcctggggctgttcctgcagtgcgccatctccctggtcttctctctggtcatggaccggctggtgcagcgattcggcactcgagcagtctatttggccagtgtggcagctttccctgtggctgccggtgccacatgcctgtcccacagtgtggccgtggtgacagcttcagccgccctcaccgggttcaccttctcagccctgcagatcctgccctacacactggcctccctctaccaccgggagaagcaggtactcattggccagtgggtggagtcagggtgggaggggtggtctgggtttttgggaggccaactagctcagaacctggtatctggcaagcaactttggagaatgcttctttgaatcagagaagaagcttatcctagccccagggccagaggcttgggctgcagaacagtgtagattagattctgggaatga

SEQ ID NO: 4304 - DNA, 6000 bp, Homo sapiens
agctcccgattatgtccaagatgacctttccttggtccctactccctgcttgtctgataaacaatctgttccaaaagctgcgaatgctgcagagcctcctaattttccttaggttggatttgtactttcggtgtcagagggccttaaggtattggttctaatgttgggagcctcaggccctacctaataccctggtgaagagcaggaaggatttggtttccccgagcatcacatccttgatgtatgttggtatgctcctcatctaatatatgcccataacaggaatatatgtgcatgagtctagctatccagacactcattctgcactgacacatagtgagtaccaatatgttagctcaccctatgtggattctgtaggcgtgtcttctgtatgtgcattctgtagacatgtctatcccaatcactcttttttttttgctccccagccatcatctctaggcagccaggggaagggaaggtgataccactctcatctcaaacaccttttaccatatctcagcaccctcattagtaggatgtgtcttcctgagtctaactgtcattcttttggcagcagtgtcagcttaatttagtttttgtggttgtggttccccaaatagtttccaaaatgtaagattactttatactattatgctacacccatttgtccagagaaacccaccaaaatatttttaattgtggtaaaatatacataacataagtcatcaccttaaccacttttaagggtaccattgagtagtagtaagtacgttcacattattgtacaaccaatctctagaactgtctgcatcttccatcactgaaactgtgtacccatgaaacaactccctgctctccccagaccctggcaactttctgttcctatgttcctatgactttgcctactctaggtacctcatatgagtagagtcatagtgtttgtcttgttatgtgactggttgatttcactcagtataatgtctttaaagtccaaccatgttgtagcacgtgtcagaatttccttcctttttaaggatgaatgatattccattgtaagtgtaaaccttgttttgcttctccattcatctgttgatggacacttgggctttttcccctttaggctaatgtgaataatactgcttttaacataagtgtacaaatatctccttggcaacctgatttgagtccttttggggatatatccaaaagtgaaatggctggaccacatgggaattctatttttgaatttttgaggaaccaccagaccgttttacattcccaccagtagggtacaagggttccaatttcttctcatcctcatcaacacgtgttattttctgggtttttaaaatagcagccatcctaatgggtatgcggtggtatttcatggtggttttgatttgcatttccctgatgattagtgatgttgagcctctttcatgtgtttgttggccatttgtatatcttctttggggaaaagtctagtcaagtcctttgtccgccaatttgtatacctatctttagtaccacatctgtttatatgcagagtttgtaattactcagctagctcactttactcttattcacattgacttcatctgaggcaggctgcctccagcttgcactaaaggtcagtttccatgcggaaaacataagttacagatgaaggatttatgaagatggtgtgtctactggaaaaagcctgcaatctggaaacgatctcacttctcatccttcgttagctgcccccacttgttaggtgacttgaaacaggtcccttcattattccattttctatgtgaaaatagcgttttcacctgcattgtcaaactcacaccaaaatagataaaattatattaaaaggggttgggggagatgattgatcctagaatctcagcgttctaggatcttaatatcttaaatatcttaaaggtcattagaaaaatacctgtccctccctcacccccatctccgtccccattgcaatgcttgatgttaagagtctttgcaaagtttgagaatgctactctagagaggttagatgggtttattgtgtttgcagagaaacatgtgtgagctgatgtagttaggagcttgtaaatctgattctcatgaacaaaatggtgaggctgtgtcttcctcctgcccactctcccgtgatgtttgcccacagcctctcttgggggaggatgtttattccaagtgtccggagaagcattgtgctttgttcaggatccacctgctcctcttggggcccaaacacaattcactgatgcggttggattccagagtgggaggctggccgctattattcccttgaatctagtccaagaaactgtgcaaggggtggagggaccctgtgtggaggccaactggttgggatgttaagttgaacaacaattccctgagttcttttgtttggtgccacggttcatgcagtctgggttgtaaatgctataatgtgcactccccccaacacacacttaggagtcttacaatctagtcacagaaaaatgacaataacaatgcatagaatatgatcaatatgtagactctagatgatatggtatataaggtattactattattaataatgatagtagcagctgctatttatctagtgcccactagattctcaacaccacattggacacttttttttttttgagacagagtcttgctctgttgcccaggccggagtgcagagtgtagtgttgtgatctcagttcactgcaacctctgtctcctgggttcaagcgattctcgtgcctcagcctgccgagtagctgggattacagatgcccaccaccatgcccagctaatttttgcattttttagaagagacaaagtttcaccattttggccaggctggtctcgaacccttggcctcatctgatttgtccatctcggcctcccaaagtgctgggattacaggcatgagccactgcacccaactggacactttcatacaatatctatttagtcaccacaacaacctagtgtacagctgaggaacatgacactcagactagttgcatgacttgcaaagaatccagtaaagagcagagtaaggattgatgcccagtctggttgaaggtaggaccagcttcattgaggaggtagaaactgagttgagtcttgaaggatagtgaataccagggagaaggtagtgttcttcattctctttgaaatgagggttgtggaataatgcatgctgtccccatcttgggcttcctggaggtggggcctcagttccaaatgctcttccccactggcttcctctgctcaccctccagccattcttcaaggcctatagtgacatgtgtctgctaaccttaaccagacgtgtcctcacgctccttagtatgtccatagcactttggttgtacctttcttatggtgcttaccatggcagtagctctggcctctggagtctcttcacgcctccatttcttcatctacaaaattagtagaataactctaccaatctcgtaggtcgtgtgaggcctaaatgagttaatatatggaaagcactcagaactgtgcctggatatcataggcatctgttactttattttttatttctttatttttgagccagggtctctgtcacccagggtggagtacagtggactcaacctctcagggtggagagaccctcccacctcagccccccaagtagctggtactataagtgcatgccaccacacccggttgaatttctaaattttttatagagatagggtttccctgtgttgcccaggctggtctcgaattcctgggctgaagtaatcctcccacctcagcctcccaaagtgctaggatgacaggcatgagtcaccgcgcctggttggcatccatcattttaattgccgtacatgcaaactgaaagctttgacaaggtggaattcatagatacctcccaatccccacccccctacacatgacacatgaatacaacacacatacacatgacacttgcacagaggctttcacgcagtgtcctatattcagggcttgatacattgtcaaggtgtggcttcttgcactcagcaggtggaggaaggtgccatttggtttggctagtttacaacctgcaggagccctgtccctctgcctctcttgggaagcagacctatttcaactggagatacttcagaagcccagagtcatccaggcaagaaaccccctcctcctcatccagactctcggtgctggggagcgggggtgctcaaggggaagccatgtaaggctcccctgagacaactgggtttagagaggtggagactgttgattggttcagtgtggcattcagactacttagttcaaatgctgttcagaaaaacggatttttccagagttagaacgtctatccaaggacttactgggagacctgcagaattgctccttttcctgaggaatgaagcagcagtggcctgagaactcatttctctgtagccttgtttcctgggggttttttgaggctccagtttgggctcgtgtctctgtgacctggagtttggctaaccacactctcctggccttatccaagcccagttgttttccctcagctgcttcaaattccagctgggtcctgaggccaatcttgaccttgctttgtgtaggagcaaaggagcctgggttttcctgccttgggtcacagcagtgggaaaatacccaggctccattccaactgggaggaccctgtggccttgttgcaagcagcggccctgcccgcaaacaggaagctttctcctccacagagacccagttctgatgatggtcacacaccccagcagttttcccctaacaggaaagttgtcagggctgttcaggcatttccttctctgccatctgccatccggactgaagagaaagtcttagtttcaattcctttcctgttcaggggaggaggacactctgattggaggctgctggaataaattctgactcactattgaagaattatcagagtttttcttctgagtccaaattcctgggtctgatggcccagtcagcaacctgaagaaaaatctatgaacttcattaaaactgggttccatgcttttaatggaaaacagagatggaagacgagacaaaaatgccatttcagtttgagcaatgcactttttgagactcctttgggtagaaagagggaggaggccactgaggtttccactgagtgtatattatagatttgttctctcctcctcacctcccttggcttttcttccatcattggggactgctgtaatcttgaaacagaatattttctcttagttattattgcattattaatattttctgtttttggccatttcttttgagtttaatttgcatatgtgtacatgggcaatgcttcaacgagacaatttttttaagtttgttctctaacatcttagatactagaagatatggattttggtcctgggagattatttaggtttttttcttattgtgttgttgcacatatacagttagcagttttttttttttctgttggaattttagaaacaaggatccttcttgcggacggggtaagagtatgactgtaatcagagactctgggtgcagtttagggcagagcagtaatttcatctcttgctctccatgtttctctgtcttcccaggcggagtttaagaaggacaggggagagggcctggcccgagtgctgtgtggggaggagcaggctgatgctgatgctggggcccaggtatgctccctgctccttgcccagtctgaggtgaggcctcagtgtctactgctggtcttggccaacagaacaggtaaggtgcacctctgcctgggggaacagggaaggagtagggctgaggttagagaatcctgggtggagatggggcatcttagatccagagagaccacaggtgctggggagaaggacttggctggctttgggagcggtccccccgagatggaccaccctggccatcagagcatcttctagaacagcatgggagggtggagcaggataagctggt

SEQ ID NO: 4305 - DNA, 6000 bp, Homo sapiens
cccccacgtggactgggctcggaggatcaaagtctgtttgcagactttgcagcccggcccccgcaggtgtgctgggagttgcgatggtccgcaggccaggactccgccacacccgaggggacccggccagcccctccccctcccgctgcacgcggcccgcgcccccaattcgcccgccgctgcacccggccacggccccccggcccacgcccggctccgggaggaaaaggccccgcccctatctgttggagccgcgaccccgcccccttcccgcccctccgaggctccatccaatagtgagcgtggctgggcgggacgccgaggctgtcgtgagggggtcctgaccaatggggaagcgtgccgggcctggtgggcggggcggcaaggccttgtcacgctcgggtccgtgtgaaaacgggggttccgagtgcaaagcaaagtttttttgtaaaccgtctgcaaaggcgggggggcgaagaaggcgcccgagaccgggccgagtgcagctgccgtggccgccgcctctctagctcctcagccatccgctcctcagtccagccgccgcagaggagaccagcaagcagagccctcagatgctcggagctttctcggcgcgaagctgcccgtcgccctctcctgccgccctcgcccgccgccctcctgctcctgctccggctgcggctcttggtaccccggctccgggagcccagctccccgccaccgccgccgcctgggtgtgggggctgctgaggctgagccgggcctcggcgccggctctgaggacggacgcctgaggagctgcgcggcgcggcgccgccggctggcggagaacgcccacaggcgcggggctcggcggcttgacccgggcttgtccccgtgcggccgcgggggcccctcagcggtttcccgaacggcccgactcgggcgctcctccgtgtcgcggtcgccgaccctccgcgtcccgccaacgccgccgctgcaccagtctccgggccgggctcggcgggccccgcagccgcagccatggggtgttggggtcggaaccggggccggctgctgtgcatgctggcgctgaccttcatgttcatggtgctggaggtggtggtgagccgggtgacctcgtcgctggcgatgctctccgactccttccacatgctgtcggacgtgctggcgctggtggtggcgctggtggccgagcgcttcgcccggcggacccacgccacccagaagaacacgttcggctggatccgagccgaggtaatgggggctctggtgaacgccatcttcctgactggcctctgtttcgccatcctgctggaggccatcgagcgcttcatcgagccgcacgagatgcagcagccgctggtggtccttggggtcggcgtggccgggctgctggtcaacgtgctggggctctgcctcttccaccatcacagcggcttcagccaggactccggccacggccactcgcacgggggtcacggccacggccacggcctccccaaggggcctcgcgttaagagcacccgccccgggagcagcgacatcaacgtggccccgggcgagcagggtcccgaccaggaggagaccaacaccctggtggccaataccagcaactccaacgggctgaaattggaccccgcaggtgagccgggaaagtcgctgccgcaggtggttgggtttggggtgcccagagcctcgcctggccttcggcggggtggcccgcacgccccctgctgcccgagcgggcctgcgccgcgccgcccctgcctgctccctccccgtcctgcacacgccccgctgctgctccaggaaatcagaaccccctcagtcgggtgcaaggagccggcgacgcgtctggcatatttgtaggtgggggctgtgggtcagaccctaagaaaaagggtcaggaggtgatcatcatcccgctgcagtccacacccgcacttggctgtctttacaggctgcagcaactttgctggagacttgtctggttatggttataacagcgtcagaaatgcttcccaattcaattccttggccctcttgggaaacggagagaatccccaattcgtccccagtagttgggtgctggaaaccttgctctgccaaagtagttcttatgcccattgaactccgtttcataatatgcattcagagcgtgtaaaccctggttaaaggtttcttttatgaacagcagtgtatgcttcagctaattgatccctaatcctggaaatcatagatttaggacctgtctgggcatgtttaacattttcccaggacttttcataatcgtactgaactaaaagtgatggtaatttattcatcttatatttttagtggatgctttttatatttaacattaagtgctcttgaaggaaatttgaaaataaatgttgaaagaaaggagatggaaatgactcaaccagtgtcctactacccaagctcaatggtgcttaacaatttggtcttatttccttcacttacgtttatttaccttgtatcattataaattatgctacataattttccttttcgagtgcagaatatgaagttagtgaaattcaagttgtacattggaaaggtttaataagtaattggttttcctctcactccactcggcaaggtgttattccaaagaaaattaagtttctctggtgtgtaatttcaaaagatcaatactttttatctttttgaatacttttgatcaatactttttgaaaagatcaatacttttgatttaaaagttagtagggcaggtagtcatttagtttcaatttttctaataatctctgtgattattgatttttattgttgatttgtcagtttttaaacccccctaccaagaaacttttatattcataataaaagtttaaaagttaaaattggttttattctcaagcaattggcctcagtgacaaagagtgactagagagtgcccgagtgtcaaatcaggtattttgtattagtagacttattcctagctgcatttaattttggtgttagcattcaattttatgttttcctttgtatataccataaagtatagcagaatggttgcaggactccacccccatagaaaatatacactattttggagaggaggaggcaggagagtggttaggagggtgaagaagcagtatcacaatgacttaatttagccctggctattatgtcctggctcattcccagaatgtcaatttatattaaattgctctgagcacatttttttaattgtactttctgaaaaaattttcaccttcatcaccacttaaaaagaattagacaaggatgtttatataaacactttaaatgtatttgatataaaatttttatttctttgtagacccagaaaaccccagaagtggtgatacagtggaagtacaagtgaatggaaatcttgtcagagaacctgaccatatggaactggaagaagatagggctggacaacttaacatgcgtggagtttttctgcatgtccttggagatgccttgggttcagtgattgtagtagtaaatgccttagtcttttacttttcttggaaaggttgttctgaaggggatttttgtgtgaatccatgtttccctgacccctgcaaagcatttgtagaaataattaatagtactcatgcatcagtttatgaggctggtccttgctgggtgctatatttagatccaactctttgtgttgtaatggtttgtatacttctttacacaacctatccattacttaaggaatctgctcttattcttctacaaactgttcctaaacaaattgatatcagaaatttgataaaagaacttcgaaatgttgaaggagttgaggaagttcatgaattacatgtttggcaacttgctggaagcagaatcattgccactgctcacataaaatgtgaagatccaacatcatacatggaggtggctaaaaccattaaagacgtttttcataatcacggaattcacgctactaccattcagcctgaatttgctagtgtaggctctaaatcaagtgtagttccgtgtgaacttgcctgcagaacccagtgtgctttgaagcaatgttgtgggacactaccacaagccccttctggaaaggatgcagaaaagaccccagcagttagcatttcttgtttagaacttagtaacaatctagagaagaagcccaggaggactaaagctgaaaacatccctgctgttgtgatagagattaaaaacatgccaaacaaacaacctgaatcatctttgtgagtcttgaaaaagatgtgatatttgacttttgctttaaactgcaagaggaaaaagactccactgaaattctaagtttgccaagtagtgtaattgaagtccttgtctggtcacacagtttaattctatttttgtaagaacataatgggactgcataacagagttctatattacaattttgtgattattagtacagagtacagctatgctgtgactgttttggaaagccagttttaacactatgttacatttttgtttaaagtaagttaaaccttatataacataatgacatttgatttctggatttttcccatgataaaaattagggggataaataaaattgttactggaatttctctgcttttcttttcccccagtgttatactttattagaattataattgatagaactttaaaatcatcaacagtttgtttcctttgacattttaggtgatattgccctttgagatcattacatagcataatggcagcatattttaagagtgactcatggctattagtaggaaataagatcagttactatcctgtattctgtattgctggctattaaacagtaagataattaacaaattgaactacagtttacacacaatggggcaaatggggtagtaagagcaaggaagaaagtttaccaaactaaatatttaggttattgtatgataatattgagactacatttctaaattattttgagaatttcaactttttattctaccaaagttaatctgaaacttggacatgttcaccagcattactttctttgaaagattggtataaaaacattgagctgcaagtttatttacaaaatatataagtatttttaaggatgttgacacctaataattacatgctaaacgcaaacgattaatgtaatcttttaaaccgggcgtttgaaaaaaaattttcaaggtcatttcatgataaccaatcatgaatggatttaaatggagctttttgagcacaaccagcaatgtttgtgctttctaagagtcactgacttgagaggaaagaaaaccagaaggttaatgcagtttggatattaaattcttagcaaaattaataattaaagcaaaattaattaagattttgtaagtcatcctgtcttcacatactcagatcttccaatagtggcttattttgcaagatgccacaatatctacacagaaaattgtggctatttcattattgctatagatttcaaatccaacacaaatatttaagggtgtttaagttatatttttcttgatagagggtatgctttgtgacaaaattagatttttgtccttgaaaggattaatattagcatcagttatgtatagctctatttttctagaaacaaggtattctgactacttttatagctgactacttttgggatggctacgttttgggatttaaaatagttcattgtttaatgggttgtaagaggaaaaagtgttaggatttgacagttactttttaaagggatgatcttttgtggtgtgtgtttttcctagtataagcctattgctggcgatgggcctatttaagaacagctgattttttccagtgaaaatatggtaattttaggaacacagtttgtaagttcacatttactataatgggccaaaaccataacctgccagtttgcaatacatcttgatcttttaatattcttatctgatattgtgtaattcaattcctaaactgatagttaccttgaattttgcgaaaaggtttgggtggtttttttta

SEQ ID NO: 4306 - DNA, 6000 bp, Homo sapiens
gattccaatagcttttaaattttatttatttttatacctgcaaagcgtagaatattttctgtctggccctttaaaaaaaagcttacagacctgatttagagcattgattatagacaattgcctgagagtttgtggttgaatttgttacatgtacatggaaaattaagcaaatgaaaaatgatacataatttctcaatccagggaaaataaaaattggtaaagaaaggaaaagtagccacgatttactccgtggcttagcaatgaatatatttacatgattgtattaatataaatgcctaatattgagctaactgaaattactctacaattgtattgggaagatgggaagaatgtgcatatgttatgggaataggaagaggaaagaacttcatcctcatcttccatactgggaagtcagtagagaaggcctaaaacagaagaaacatggtgataaataccaagataatcagctaaaagaggtgataatcaattctggggagggcagaaatgaagggaagagggacaggactcccatttttcatacaaatatattttttgctgactttttaaaccatgtgcctttatacctttgataaaggggacaaaaaatcccccactaaattagaaaacaaaaaataaaactatttttcaaggtcagcaaatatgtagtcctcatgctgcctgtcccctctcagtccatgggtatcactaatcacaatcgtgtttcctggtgagtcaggacatggtctcagatcttgagaatagtgttctggtagccactcccaaccggtaaaagttacccctattcatgaaagcagtatctctgatactactgatattaccgatttgggcagagtctctgtgcttctcagactttcccaccaaaagaatattgcctgacatttaactaaatgactgaacatcctgatttaactgcattttaaaacttcatctgttctaaataccatttctacttaaacccacaaacatgggaagacataattattctctgtagttattcatagatataaggtaatttaatagtatgttttcagcatctaacactggacctaaacatagtagactagtaaatgtttgaattaatgcataaattaactctcttgtgtaatcaacaatttttaataaccaagatacctgaaaagctgaagaaaccaacccttgttaaagcaaaagatgacaacacaattttattcagcttttcatcataagttgtggttctgaatgattttgacttctgaactaaatagtttttgttcttttcttctaacccttaataggatctttccaattaaagatgtacccctggagactgatgaccttaccacttggctctatcagcggtttgttgaaaaagaagacctcttatcacatttttatgaaacaggtacacagtaacctttaaatagttgctaaattatagcaacagtaatgaaagcctcttttaaagaaagctgtttgcatattagatcttgaaacttgaaaatgcactctgtaaattgcctgtgagaagcaaatcccctcatgaatcagcttaccctggggattatcagcaaggacaaagactgcttgaaatgctgatgagtgttatcaagatgaccttaggtaatattgctgtatgaagttatctagcattcctttccagaaacgaatttaaagacatctgtttactttgtatttcttttattattaagatacatttcataaagcatattgccttttaaaaataatgtcagtgttatacaactacttttttgacaaaaaatttgtaaatagaggaatcagcataaagtgtgctatttcagaaattatttcatgtcaatctcacataatcctgggtcctgatcactgtgggaatctctagggatccagcagagacaaggcagctagagtgcctgctctcatgcagattatattccagtgggagacatggcaaacaagtctgcagaaagaaagataattgggatcatgaccaattggaaaaagttccaggaaggagataaacagagatgggagggggaatatcttttctgatatggaaaggatgcacatgagccagctattcattaagtggaggaggacagcattgcaggcagagaaaaggcaaaggctcagaggcaagaaggggctaggtagtacagaaattgtatttcaaataaaatctctcctctggggcactggaaagtcactgaaggtgctttaacatgtacaaatgtagttaagctaatattcaacttttattccaggagacctaccattacagtaaaacaaactaatatttctatcttgtcttttaggagcttttccaccttccaagggccataaggaagctgtttccagggagatgaccctcagcaacttgtggatatttctcatacagtcttttgcatttttgtcaggctatatgtggtacaacatcattcagtatttttaccattgcctgttttaggaattgacgtggacttgtcaaggtcaccgtaggagttcagactttctttcataagtgtgcattattttacatgtgcaaatcagaatatatttaaaaaaaagcaaaagaaattcaatggatggattaatatttatccccctttgggatattttaaaatctactaaaatgaggattagtaatataatgacctgctaatatattttaagaacatgttttaaaaagatacactctatcacatatttaagcaaacatcacatttggagaagaggaaatcataaaatcatcctagaagactatctgagagaaattctgttgccaccagttatacttgacaatttagttgaagctcagaaagttatattcatccctcttagctgtagtctatattagggcagttctctagaacgcccacatttccaccaactcagtaaacttgaggggagctggttggcacctcgtgaagaactctttccctgtcgtttgcagtaacaaactccagtctgttgcagtaacaaactccagtctgttgcagtaacaaactctagaatattgacattctctgtgggggaaaagcagtgtccactggaccccttctggtactggatgtgttctttacaaaggctagctcagtccaacactgtgtttacatacactcgtgcttttccttatctgacttctcattttgtatcagaggcatatcataaattgataattttgcaaaatgcacttttttgagatgcagatatagcaaaggattagtaatatagcctgaaaacaaatgggagcatagcagtgtgtgaggttctcgagaactgtcttgtctctgtgtgtttatttgcctgccagtgctctccagcgccatcctgccctggacaccaccctgacgtgatgcctctattgcagctcagaggctttattttttccattttgacattggcactaaatgcatttggggatggttaaaacaaattactatagaacatttaaatgatcagtttaaggggaaataggctagtttatagaaaaataagagctagtggcttataatggtgacaggttctcatgtggcacccctaggacctgtgcagacagtagtctgttgaatcattacatcaaggagctgcccctgtcagggtgagtgtaattaggaacgataccagcacataaggctccccccaatctcttccagttgctttttcttttttcttttttttttagacaggtcttactctgtcacccaggctgtagtgcagtggcataatctcagctcactgcagtctctgcctcccgggttcgagcgattctcctgcctcagcctcccgagtagctgggactacaggcacccaccatcatgcttggctaatttttgtatttttagtagagatggggtttcaccatgttggccaggctggcctcgaactcctgacctcaggtgatctgcccacctcggcttcctaaagtgctgggattgcaggcgtgagccaccacgcccggcctccagttgcttttgaagagggtaaagtcaagtttctatttctagaaaacattttttagaaatttgttgcgatgtttgtacaatttacctcataagagaaccacacccttctccaaaagtgctggtactgcatcagtgagatgagtagggtttttgtttgggattgtaagactattaagatcctagtaagtcagtggtagtttactgtgatgtgagcattgtagattcccccgttgtcactaatcacacaacaattttgagaagtaggctataaaacaaaaaaaggttgctgttttctatttttaaataaaccaaaaaaaaacagaaaagatgtgaattttccccagttatgtgggaaaggtaaagcaacaccaaataaaagcccacagcagcttcatctttacgataactcagtgcatatgtgaaagagaatgatgcattaactgaaatacctcattgaatattatactactactggtaaaatgcagaagacagtgttaatgtgtttggtttggggactggttgttataaaatgcaatttttttttaaatctaagcatttcattatgtgttctacagtgtcggtgaataaatgaaaccaatctcaatttagaggtatggatgatgacagaaagcccaatagaagcttaatgatgcttctgtttgaggcccagcaagcaccactaaattactggatgaaatgaaattgttcacttgagggattagtcaaccatctgggggagaagttgctcactgtcaaatacagcatgcacggtcctagctgatagaccttttcctcattgctacagcaagccacagggtagagtgaccagttctcctatccaaaaataaatgcgaacatgcatacataaatgtggctgagggccacttttgccatcactgtgctccaaaggaacatgatattgttaaatatactgtacacattaaactattctataagatgctttacttttcaagtacggtgtcattttcacagtctccagggtgacaaatgccaatagatatgtgagttaatttttttaaatatctccgtgagttgtaaatagatgtgtatttgatctgccctatccttctttgattctttaacatgttctctctcttctgtttgcaaaatatgtttgaaagcattggtagtgctttccttatcagtaactggagttctcctgcttgcactagagaaggtaaagagagaatcagtattcttatatggcaatctggggaagcagcaatatgccactgtacaaaactgaagaaaagttcctaatttgtactttgtgaagggagatgaaaggacgtttaaagtatatatattttgtcaagaggaaagaagataaaactatgccagttttatatcaatagcttgtagaagctcagctcttcttggtcttggctagactgcctagattcccacagcagacaaggttgagaatccattgctggaatcttggtattgatgagttacagtgatggaacatgtgcttggccacaggcaggtccagtcactgcaaaagtgaccaagccagcaggtcacccttaacttcagaaacaattattggtggtgaactgtacttaaattgcagagaaacctgtaagtaatggaaggtaaagaaaaattacagaatggaaaataatattttgggcaagcaaacaaattcactgagaattccaaaagtatattaaaaaagaagatagctatgagttcagatctatcttattggtctttaatattacaaccaatccttaactttccactataaaggaaggattactagattgattactttctggatagataatctggtaataaatgataggtaaatcaaaaattacttttatttaggagtttgaattcttactctcatcagacattttttttctagggacgcttactaattaaatgatttaagttgtttcttaggggttttttgcctatatatttatgactgtgttaatgagtagtgaaatgatgcggaaagacagctatcaggaagaggaaatacagaagcctgaataatcta

SEQ ID NO: 4307 - DNA, 6000 bp, Homo sapiens
catgctgttgactttaatttcaaaatctcctggataccagccagcttcaggtgtgtgcgacctgagcagttgcaccgggctctgtgcttggtttagtgctctgctgttgctgtcttgaaattattaataatttaaaaaaactggagtgtggtaaaatacatataacataacatttactatcgtaaccatttttaagtgtacagttcagtagtgttaagtatatccacatagttgtgcacccagtctcatctttttttatccttgcaaaaccaaaactctgtagccactaaacaactgccccatgtcaccttcccttcagcccctggcaaccatcattctcccttccatttttgtgaatttgaacttgactgtagatacctcatataagtgggctcatacaacattcatctttttgtggctggtttattccacctagcaaacgtcctcaaggtttatctatgttttagcatgtattggaattttcttccttttaaggtggaataatatgtgcttgtatgtatgtagaccccattaaaaaaattcatctgttgatggacacttggattgcttctgctttttggctattgtgaatgatgctatgaacatggggtgtacatacctcttcagggccctgctgtcaaatcttttcaagtttctatacccagaagtggaattgctggatcatatggcaattctatttttaagttttaaagaattgctatattgttttccatagtggttgcaccattttatttattatttatttatttattttaagagaaaccactcagactgcatgcatcctctccctcttactctctcagaggaagagaagaacaatcatcaatggcaaatagcagttgcagtgaagcaatgccaagaaccaacttcacgctcaggagagaatactgaacctcctccttgtggattccagggctgcgccatttaaaaactcttcttcttccttttctttgcggggtggggggataaagtctttctctgtcacccaggctggagtttactggcacaatcatagctcactgcagcctcaaacttttgggctcaagcaatcctcccatctacttgtctcccaagtaactgggacaacagggagtgtgccaccatgcctggctaatttaaaaaatttttttgtagatgcagactcttgctatgttgcccaggctgatcttgaattctgggcctcaagcaatcttcccactttggcctcccaaaatgttggggttacagatgcacaccatcacgcctggcttaaaaattcttgataattggctgggcatggtggcttacacctgtagtcgcagcactttgagaggccaaggcaggcagatcacttgaggccaggagttccagaccagcctgggcaacatggtggaaccctgtgtctgctaaaaatacaaaaattagctgggcatggtggctcatgcctggagtcccagctacttggcaggctgaggcacaagaatcacttgaaaccaggaggtagaggttgcagtgagcagagatcattccactgcactccagacggggcgatagagcatgactatctcaaaaaaataaaacattcttgataatttttgaacaatggaacctgcttttccattttgcagtagaacccatgaattatgtagccagtcctgcctgggtgtttccactttacacctagtctaaaccacaatctcatctagattattgcagtagcctcctaactggtctctctgctttcatgtgatctcaaacacatacagcgattcctttaaaacatatacaggacctcctcattcttctgctcagtattctcccatctccaggccccacatgatctgcccctgctccacacttctctggctttgtctcctctttctcatcctcgccattactcctctccagccctgctgacctctttggtgtcccttgaattcccatgcgcattgttccttctgcccagaaagatcttccttcagatgtctgtgtggtttagtttcttacctccttcagatctttattcgaagaacattttagtaaattcttccctgatcattttatttaaaatttaaaatttaaatttatttaaaatttatttaaaattcttccctgaccattttctttaaaattacaatccatccctatctctttcccctgctttatgtgtcatcatacttatcaccatttaatattcaatacatttcataatttattttgttaatcatttatctcctcccatcaatcactagaatacaagcttcataagggcagagatttttgcctgttttgttggctgctgtctctctggagcctagaactctgtccagcatgtcggcactcagtaagtatttgtggcatgaatggatgaaagagctagtcttagagcaataattttcacaatatggttgtattggaagtctgtcagaatattaactgaattggagataatttatgagatactatggaagctgttagggctactgtctaaattatcaggttttagtcaaagtcagactattagccagtgttctccagagaaacagaaccaatgagaatgtgtatgcatggtacacagatagttttttatatatatatatatttatatattatatatatttatatatatttatatatatatttatatatatttatatatatatttatatatatttatatatatatttatatgtatttatatatatatttatatatatttatatatatatttacatatatatttatatatatttatatattaatatatatatttatatattaatatatattaatatatatattaatatatattaatatagatttatatattaatatatattaatatagatttatatattaatatatatatttatatatatttatatatatttatatatatttatatatatttatatatatatttatatatatatttatatatttatatatatttatatatattatatatttctatatatatttatatatatttatatatatttctatatttatatatatttatatatatttctatatatatttctatatatttctatatatatttatatatatttctatatatatttctatatatatttatatatatttatatatatttatatatttatatatatttatttacatatttatatatatatttatatatttatatatatttatatatttatttatatatatttatatatatttatatatatttatatatatttatatatatatttatatatatttatatatatatttatatattcatatatatttatatatatttatatattcatatatatttatatatttatatatttatatatatttatatatatatttatatatatttatatatatgtttatatatatttatatatatgtttatatatatatataaagaaatgtattataaagaattatttcacatgattaaaagactaagaagtcccaagattgatggtgaatcagtaggcaagagacccaggagagccgatggtgtagcccaaatcaaagacccacacgctcaagacccaggaagagtccatgtttcagtttgagtctgaaggcaggaaaaaacaaacgtcccaggctgaaggcagtcaggcaggaagagctacctcttattcagcatttttgttctcctcaggcttcaactgattggaggaggcccacccacattagtgagggcaatctccttcattcactctgctgatccaactgttaatttcatccagaaacacactcacagacaaagccagaaagtcttgcatgtcattgaccaaatgaccagtcaagttgacatacaaaattaacatcacatctgggagaaatagagattgtaatatcactctgtgtttctttaaaatattgacagtagtcaggctgctcacaatagaggccactgctgtttcagtcattttggaactgataggcctttaagggctatgagtgtttgacagataacattttttaaaaataaaaacaaaaacttccttgcatcagtgaaatcattattacctgtctgtcttcctggaaactaactggaattatgtcttcagctcttccagtttaaagatttcctgaatatgaggaatatttcttttgtcttatagagaatgtttggaagtagggtgacccctcgaatattccctacttcacacagtaaatgacattcagaactgcacaccaggtggacaagatgtaattgcttatgtcaaatgacttgcttcacctgagctgtttctgcacacacggagcatggaagctggaaaggccaccgccactgatgagcttctacatgactcaaggacacagaagctcttgacgtctgtaattaaacacacacatgcacaaacaaaacagtctctcaagtccatatctgaagccagtgtcttgtatttccataaatcctggctcatgtgacatctcttgcttaattgccctttaaactgttttatggctttatagcaacctataaaaggtgatttccaaatatgacaagcgccggagggctgaagggaagagttacccaggagttgtaatcactgaatctatagctgcttccctagcagctcagccttcccaagaaagggagaggaactgccagggcaccgagacgccatggggcgatactccggaagaagcttccgtttaatcctcatgtgcgtcgttagcatcctcctctttgtgatggaactagtgatcgcttacgttggcaactccctctccttggcctccgatgcttttgccgtcctttcccactttgtgtccatgatcataggtttttttggtgtaagggccagtaacataaaacagcacaagaagagcacttacggctttcttcgggcagatgttgtgggagcatttgggaacaccatttttgcggtggcgctgatgttcagcatcctggttgaagccatcaaaaggtacatcaatccccagaagacagaggagccgatactggttctcagtgctggaattatcggtctgttcttcaatgttcttaactatgtcatcttcttggactgctgttactgcgcagcacccaagccccagggagacatggaagcaggtaaatagctactcagagggtggcagtaaatttggtgagagtcctggcaggtgctgtctgagggggcctttgtggtgctatccaaaggggcccgagtctttgggtcagccttttgtccctgtgattttacaatcgacctttctcagaagagttgcctttagtttgaggttccttgtgagtagggtagcagcagtttgcttcaatgttgggaggacttctcgaatttttactcacagggaatgaaaaagtgtcttcaggcacgcagagaggaagtaaaggcactaatcgtagccacagagagagcgattggaaagacggtggatgtggcagtcttctttaagtgattcactgttgtttacccatatgtgacatggctatgtttgaatttaaaaaaaagttaatgtctccataaaatatgtttaaaagtactgggctacataaccaacttacaaagagcacagtatcagacaatcaggtacgctgattaactgttaggaatatatttgaggaatggtatgtaaaatggcgagagaaaaaataaagaagatagtccagtaaatgggctagtttttgaaaggaaaatttgcacttatttattgcatacgtctgttctgtttgagaaacaggacaatttacatgtgaatctttaggagagacttaagtgtgagtaccaaacttattagattatctgtcaaaagaatggaattaaatcttggaagagaacaatatatctataagatgctttttttttaagatggaatcatgtttctttaatttattgccacaagaggtgtttgtaagtatatatgtatcagaaagttcttacagaagagaaatttttagtgcttttataaaagaagtcatatagcatgaatagattcaaattatggttccagcacagggcaatagtcaacttactt

SEQ ID NO: 4308 - DNA, 6000 bp, Homo sapiens
atatcatcagtcctttgggaagacactcgggtgctgcacaagcttcagaacagctttctagtattcctttctataaatcaagtaagtggtttaaagcctcagataggaaaccgtgaaggaaaataaatcattacggtcaccatgacctatcttttcgccagaggttctccaactggagcctgcttctatcagaatcctctggagagctggatggctgagcccaccccaagcttcaagcttcaggagcggacctgagaagctgcatttctttctttctttttcttcctttctttcagatggagttttgctctatcgcctaggctggagtgcagcagcacaatctcggctcactgcaacctccgcctcctgggtttaggtgattcttctgcctcagcctcctgagtagctgggattacaggcatgcaccaccatgcccagctaatttttgtatttttattagagatggggttttgtcatgttggccaggctggtcttgaacttctgaccttaagtgatccgcccacttcggcctcccaaagtgctgggattacaggcatgacgcaccgcacccagccagaagctgcatttctaacaagcccccaggagaagctctgctgctgagcagggaccataccttgagaactcctgcactttgctagttggtttgggagacaatggaatcacactgccttggataagtctggggaagtattaacctccccatacctcctcagtttcttcagctataagatcacctacctgggacagcttttatgagggtaaatcagttagaacacagggagcactttgagcaacagctgggggcgaagtaaaaactgaacaaagattatttatcattattattacctcatatcctgctgctgttttccctctatcaacaagtcattaaagcacacatatcccacatcttctaagttcctccactgaagcagtatacttgctccatctattcaaatagtttccccttctaatttatgtattaacaaataaatgtttaatattgagaatgtttaaataggcttgggcatcgtggctcatgcctgtaagcccagtgtgtccagaattggtgggttcttggtctcactgacttcaagaatgaagccgcggaccctcacggtgagtgttacagttcttaaaggtggcgtgtccagaatttgttccttcggatgttcagatgtgttcagacttttcttccttctggtgggtttgtggtctcactggctcaggagtgaagctgcagaccttcacagtgagtgtcacaactcataaacgcaatgcagatgcagagtgagcagcagcaagacttactgcaaacagcaaaagaacaaagtttccacaaagtggaaagacacctgagcatcttgccactgctggcttgggcagcctgcttttattcccttatctggccccacccacatcctgctgattggtccattttacagagagctgattggtctgttttgacagggtgctgattggtatgtttacaatccctgagctagacacaaaagttctcaaagtccccactagattaactagacacagagcactgattggtgcattcacaaaccctgagctagacacagggtgctgattggtgcatttacaaaccttgagctggacacagagtgctgattggtgtatttacaatcccttagctagacataaaggttctccaagtccctgctagattagctagacacagagcactgattggtgcacttacaaaccttgagctagacacagggggctgattggtgtgttcacaaaccctgagcaagacacagagtgctgactggtgtatttacaatcccttagctagacataaagtttctccaagtccccaccagattagctagatacacagtgctgattggtgcatttacaaaccttgagctagacacagagtgctgattggtgtatttacaatcccttagctagacataaaggttctccaagtccccgctagacccaggagcccagctggcttcacctagtggatcctgcatcagggagcccgccagtcccacgacctgtgcccacactactcctcagcccttgggcggtcggaatgggaccgggcgcgtggagcagggggcagcgctcatctgggaggctcaggccgctcaggagcccatggtgtgggggaggctcaggcatggcaggctgcaggtccccagcctttccctgcggggaggcagctgaggtccagcgagaattccagcacagcgctggtgggccaggccggcactgctgggagacccagcgcatcctccgcagctgctggcctgggtactaagcccctcactgcctggggcctgcggaaccggccagccgctccgagtgcggggcctgccgagcccacgcccacctggaacttgcactggcctgcaagcccagtgctcagccctggttcccacccacgcctgtccctccacacctccccgcaaggtgagggagcccgctccggcctcggccagcccagagaggggctcccacagtgcagtggcaggctgaagggctcctcaagagcggccagagtgggcgccgaggccgaggaggtgcagagagtgagcgagggctgctagggctgccagcacgctgtcacctctcaccagcactttgggaggccgaggtgggtagatcacttgcagtcaggagttggagactagcctggccaacacggccaaaccccatctcttctaaaaatacaaaaattagctgggcatggtggcgtgcacctgtaatcccagctactcggggctgaggtgagaagattgcttgaacccaggaggcacaggcagtagtgacccaagatcgtgtcattgcgctccagcctgggtgacagagggagacaccatctcaaaaaaaaaaaaaaaaaaaaaaaagaggataagtgctgcaaacatacatatagtatgtagaagaagtttcaaataatttttaaattgctattgagatggacataatgcatcatgttaattgtgagctccatttctgtgtgaatagaaaccatatcaaacatcatcagtagaaatgtgtttttatcggacagcttttgaggtacctctaccttatgaataaaggctttctgcagtttgcagcatacagaagtttgttccttatgtaacagtaccaaaagaatccaactggatctcacgccacgtgaaactttacctacacgtctttcctgaaagagatgtttcaatcctgggaaccgagatcctctggagaccagagccaaataactgccacattggaatgcattccgctgggggttcctgtattttatatatgaaagcttcctggccgcatgtgtgttttggttggctttagtggcaggactgaagggttttgctttgcttttgttatgtgaatggggaaaggggctttgccactcatggcctcattaacaacaatggtgccaagatgcggacttttaagtgacttttactttatagattctgaaaacccacaacttgctagttgtgagtgacaagcatctttctgagaactttctgaaaattccccacttccaagtttacacagcctttagtagacttaaaaaagaagagaaaaataccaaacagttcctttgttgagaaagcagcctacatatagatctgattgttcatggtatgtttgagtccacgaagtagaaatgaacaaaaattattgcttagttttcctgatgtcaaatcagttttgttttaaaaatgtcattagtaatttattaggtaaaatgttagctaagctaactctagttaatttacaaagttttggcttcattttgttatgatgagactttataaacctgatctttaaaataaggttcttaaaatttttaaaaatttattttatttattttttgagacagagtttcgctcttcttgcccaggctgagtggcagtggcatgatctcagctcattgcaaccttcacctcccaggttcaagcgattcttctgcttcagcctcccgagtagctgggactacaggtgctcgccaccgtgcccagctaatttttgtatttttttagtagagatggggtttcaccatgttggccaagttggtctcgaactcctgctcaggtgatccaaccgcctcggcttcccaaagtgctgggattataggcgtgagccacggcgcctggccaggtgtttttttttttttttttgaaacgaatcttcttctatttcacaagtggaaatcatccaggaaatgtgcacctcaagggaaatccagtgaaatcttgattctgggtagaacatatgagaaaagaatagtgtagcactcactgcttggctatttgggataggatctgtcttaggtccccataagcgcttttatttctgtgtaatttactgcaaaactctatgaggtaggactaatattatcttatgtcaagggttaagacaattgagacttgggggtttgtcaaaaataaaagattttctgactttggagtgcgatgtgcatttctgttgcacagatctccaccaagggcaaattcgatggcaatgacaatttgatgtcagaacttctcaggaaaggctctgatgaactcattcacactgcatgtgaatgactgagaaaactcgatgtattttcacttttttttttttaagaagtaaacctgggtgttttgtagttctatgagaaaatgaaagctgaagctaggctatagatgaaaagttctattcattattacaatttaataatgcttccaaaatagcaattcacttaaatatacctagttagggtgttaagaaatactttgattaaaaccacactgcaaaatagggaacttcaatggactgctttaaactctcgacctcaaaggaaggaaatcaactaaccgataatgaaaactagcagaaaaaaaaaagcttaggatccgtaacagattcggagtcaacaatgacatgactcagcattttggggttcaattaaaaccaggcttgtaggttgcaggtcaagttgtgtttcggtgtgtaacgcataaaacttcttgttccacgctccgcggtgttggggattttctactgcatctcgacagcatctcgggtaacaaccgagcccctcctcgcagcgtaagtcgtaggagccctcggccattcttccccctccctcccgccgccggtcccagcatcggtccgggttcgcttctacgcaggttcagcggccgcggacacaaaagcgcccctgctcgccttcgatgccgctgcttggtccaggggcttctgtgggattttaacacgctaaggagggcactcatagtgttttaccgagaaacgctttcgagctcggatctttggtgatcacttcaagaatgtattagttttctttgtagcttaaaaaaaaatctcgttcgccaagccacctggcaccccaaacactgctgcgagcgctgggagggaaagggcgggagcgcgcgggctccgtgtgctgcgagggcgcctgggcggctgagataaggcggtggcaaacgtcgcgctccgggccgccccgccagactcggtttcccccgctcaccggcctccccgcccccaggcagggtggggcggggcggacgcgccacggcgcgcgaccaatcgacagcgccggggatgattcaaaaggtcgaggagccaatgggagccccgggcggcctcgccggtggggaggggaggcgaggggaggggagaagcgccgcgaggcggggccggggaggcgcgcgcccggcttgcgggactgcggggcgcgagagcgcggccgggtagcgtcgcgcgcgtggatctgccgccgggttgctgtgcgactattctccgggagccgtccgtgtcaccgccggaacctggcgcaggtgagtgcttccacccccgccctgctcccagctccccgcggcgcgttcttcgaggggccgctgggggaggaagcccgaggccggcgcagcggccgggccggggaccctgggcgcggggcctggcgcggcggccttc

SEQ ID NO: 4309 - DNA, 6000 bp, Homo sapiens
ctgatattctttagggaagtccattgataaaatggtcttgcgaatcattgaggctgtcctggatatcaccttgggacacttggggatctctttccatcccaaagaataggaatgtagtttaggaaggaccagagaacgtgtgatagtccatggtcctggagagaattaggaaggtatatgggagatgctacagagtgggacaactccacgggtcccagtgattcttttcgttttgtttcttgaagggattgcatagaattgagctgaacctcactatggtcgccatgctcagatcatttgtctctgctggaaatatccctcttccttttggaagtagtacccttttgtggttccctgtgtgcaatacaaccctagggaaatccatggcctgcaggcgttatcgcagtgggaggttagggaggggaatgggggagtggttaccctaacctttctcccttctttttccttctgttctccacaaggctttttgtgttttgttgttgaaaacaaaatacatctctggcctttaagatgagctgcataggaagatgcattggattaggccatagataagagcttatcaaacatggaggccgggtacagtggctcacacctttaatctcagcactttgagaggtcgaagtgggcggatcacctgaggtcaggagttcgagaccagcctggccaacataatgaaatcctgtctctattaaaaatacaaaaattagccgggcatggtggtgaatgcctgtaatcccagctcctcgggaggctgaggcaggataattgtctgagcccgggaggcggaggttgcagtgagccgagatcttgccactgcactcaagcctgggtgatacagtgagacactgtctcaaaaaaaaaaaaaaaaaaaaatggagaggtttcctcgaatatatcttttgttctgtggggttcctgcctgcaaatcaaatgttggttatcagtgcaactactacagaacctgagaaacaaaaaagacttcaaaaaataaaaagcagctctttctcctcaagtattttaaccaggaaaacttaaaaaattagtctaatttgaaatcttgcctaatttatattcaatagatagtctaaaaatgcttccagatttaaaacagaaagaaaatcttaaaagcaaatgatttttctctgtcttttcctttcttcaggcttttcctccaaatgcgatcattgtatttttctactgcagtgcagtgactatattcttcacaataatcaaactggtcagttatcgcctacacctcatgtttgacaaaggagaagtaattcagcaaaagccctccagaaaggaagaaaagccaaataaagacaaggaggccaaaggtgaacacataactaatcacagaaatccaaggtaatattttcaattaatgtgacacttcaaaatgtaaatgttttgctcttgattaaaataagttttttatcagtgtttatgaaattactagtataggcagacagaaatatatgcatttttcttatatttcagcatatacttaagcataaaattgatattcataatcaagatggtttaactggcttcccaataaatgtctttttgggaagtcaatatgaccttctcataagatctagaattcatttgccttaggcttagcactgcaaaaaatttcccttcactgcttttaatgttgttatttaaatgcttagagcatgccagagtattttaaagaacagcatttgtgtttgttgatataaaagtaatacattacatagaactgaaatattaagagtaattcttgagttagcattcttttcaccattcttgtattatttcttatagctccttaagatagcatgtcctctaatttaaaaataatgtttattataagatttatctgctgcagatggtggcttatgcctgtaaaccttgcattttgggaggttgaggtgggaggatcacttgagtccaggagcttgaggctgcagtgagccatgatcgtgccactgcattccagtctacccagacagagcgaagccctgtctcttaacaacaacaaaaaaagatttatatgtaaggaatataacaaaatggactctaggaaaaaaagtttttagactagtactaaaagagtcatgcttctgtttgataatatcgctcactgctcttgtgtttctcatgttgggttagcaataataggcagattcacaatggcaaaaaggaagaggccagtcgaaacctctccacgcctcccctccgctgcagctccagagggcaaagcataacctctcatcactcttctgggccattggttagtggtcttctttcctgtttcaccctcttcatgtgatttcgatgttgatctcacctagaatgggagtgttcagcagcagtgattgtagcttgcatgctgtaatcactggcccgtgtacagtggaatatcacatcccagggtctggaaatggcctgaagggtgcccttgggaccataaaataaatgcccagtcgtgtgttcaaagcacactctctggccttccctgccgtccacctgcgctgctgggtcaaccacactgggcagagaaccaatatgtaggcctttgcttctttctgttgtcattcatttaagtcatcatatctgcagtgccttccacctgaaatggatatcacctctgctttccattttaaatcacacttgtctttttgggaagtcaataaatcaccttttttctagattaactttgttgagctccattcactatagtgtaagtagtggcttcttccttctttgcttactttcttagtagcaaatctccctttgtcacagtacagttgtctcggttgaatgtccacatttacatatgtttgtatccattctgggccccattttatagaagcttaaggagagtgaacactgtattgtctctcccctacatgccatttagaaaatcagtgactgctgtcagttattgccgactgtctggaaatggacggtcagctgagtcatctattgatttttgtttctttcatttgtgtaggagttgtcagcacaggaaactgtagaagatctcaaaggtaaactgttaatcatttatattttatcacagcactatcctcagtgaagtgagaaatatttttataaaacagaatgccagtggattaattgaaaataagaactatacctaagactgcatagttatattttgactttgtttctttaactcttaattttaattttttctcatcggtatttgtatatcaagtcttaattcaaattgtgatattttgttgatcataattcattgtcatttctccagtctatgcctcatttcatatggcttataaagagcagacatataagttttttattgatgataaattatcatccatataaaaatttgtattatagcatatacatcaaaaaatgacaggataaattgtacagcattctgcatatctgcctttctttcaagttacagattttgttttgggggatctttcttttaacttaaacaatttttgttttacatttttactaacttttttttttttgtcttttgactacctgcagaaggcttagaaaagatcttttggaggcctgaattaattccttcctttctctgcaattctattttcttttccactactacaaagacaaattttgtgcactatttcaattttgaaaataatgtaaagtttaattcgctctagaaaatagctgaaattagcaccatagccctgaacccctaaaatgaagtttcttttttcatcattcagttgtatcccattataacaatatgtaaaggattatccatattttttctatattattgctactgaaataaattcacatgagttagacttctaatattttagttgcacgtacagcttcataacaacgttactttatgtgttttatatacacatatacaagcacatacctttttcttcatatgaaacatattcttccagattaggtgtgctataataatcttacatactttgaatatctggtctggccttttaatttcaccattccaattaaaacaataattttctattttttacttgtactaagaattgcagtagaagttttacatacattatttcattctgagtcatagtatgtaaaatgtacaggtagcatttaaacccatacctggctactaaatccagtgtttcttagcaacactgcagtaaagcaaagaattctgttttttccttagtcaaatcttataaaagataccatcctagttggtggtgttctacagtattttaggggatttggttccaggacccccgtggataacaaaatctgtggatgttgctcacgtctcttatataaaacagcatagtatttgcttgtaacctacacacatcctcctgtatactttaaattatctctaaattatttataatacctaatacaatgtaaatgctatatatatagttgttatactgtattgcttttcatttgttttatttttattgttgtgtttcaagaataatttcacagtgggagtgttattttaaaaaataagtatcaatgcagccgtaaataagaatgagttcatgttctttgcagggtcatggatgaagctggaaaccatcattctcagcaaactaacacaggaacagaaaactaaactcactcataaatgggagttgaataatgagaacacatggacacagggaggggaacatcacacactggggcctgtcagaggtggggggcaaggggagagatagcattaggacaaatacctaatgcatgcagggctgaaaacctagatgacgggttgacaggtgcaccaaaccaccatggtacatgtatacccgtgtaacaaacctgcatgttctgcacatgtaacccagaacttaaagtaaaattaaaaaagtatctaattccattagttgctggtgctgttttagttttgttattattcattaggtcttgctcttgggcattactcattcatttctgatgctaataaagttgccatgtgtcatttcaggtgtcattctattagaagaccatcccatagcaccagtgtcatctacctcacctggtatcaaagtggaaagcttacctgcgtctcaagcacacatgctggaaaccacgaccaagtcagtaatacctgtaaaaccagttgccacagaaactctcatcaatggtaaaggaaaggaaagaggaggcaaggggcagcctcctttgcgccacagatccgagggtggcttagtggataagggacccttgaagaagttgccccacctgtctttgtctcagtatgacttactagaaacagacgtttctttccagccgtgggggagtgagaattcagtcctgattccagaacctgtcagttgtccccggggctccataagggaacgggtacaaagcaagtcacctcaggacagcctgagcagcagctgccctcaatgtgacaccatcgtggccaagcctgtggaggagccagcagacacatcctgtcaggtagatacctcctgccagggggacctgcccttgcaccaggaagtggactcctcagatagtgaggtagctgttactctcatcgatacttctcaacccggagacccactgagtctacatgagcccataaaaattgttatcacgatgagcagtaccccaaactccatgacagatttggaaagctccctccacctgagggtggttggcacagagaagaccagtgtaaagtctgacgctgagcccactaacccaggggcggccggttctccaaatgccgagcagatctcaattcctgtaatcaccctggacctgcctgagggtgggggaggaggtgttccctgtcccgaaggcaatggaagtgaaaggactccagagagactgaagacgagggtatccaccaatcagtgttctggctacggatctggggaggggggaaatgccatcaaggatcacagttcttcatcacgggaaccctgggaatcggtgtcccggcttacacctgatacaggctccgagtctaag

SEQ ID NO: 4310 - DNA, 6000 bp, Homo sapiens
gccacagttcctatggcaatgcagaaaggggacacatgtacatgtagtgggttgcgtataggagaggagccctgaatttaaggatcctgaattttttataatgggcagtaaacatgtgtgtgcttttccctacacataggtaatgttgcaaacctgcctttgctcctgagggaggcagtttatattctgaggttgtttactgtacaaacatccttgaaaagacagtttggagcaaaggcagtaaatatctgctcagaagtacagaaatgtgacagacttgagaattgttcctctacttgtattgttattatttttttatttttatttatttctttttgagacagagtctcgctctgtcgcccaggctggagtgcagtggtgcgatcttggctcactgcaagcttcgcctcccgggttcaagcaattctcctgccttggcctcccaagtagctgggattacaggtgtgcaccaccacaccctgctaatttttgtatttttagtagcagtagggtttcaccatgtcagtcaggctggtctgaactcctgaccttgtgatccacccaccttggcctcccaaagtgctaggattacaggcatgagccactgctcccggccgtattattttttaaaagtatatctaatggagttatttttatgtaaggcacattaaaatattttaatgggaacctcctatacagaacagtgcttaatttaaaatatttaatagcatagttttgctcaaatattttgggacagtttttggagtttgatttaaagtgggattagggccgagtgcagtggctcatgcctgtaatctcagcacattgggaggtggaggcaggaggattacttgagtccaggagtttgagaccaggctgagcaacatagtgagaccccgtttctacaaaaaaaaaaaattagcaaaattagcccggtgtggtggtgcacacctatggtcctagctacttgggaggttgaggtgggaggattgcttgagcccaggaggttgaggctgcagtcagccaagattgtaccattgtactccagcctgggtggcagagggagattgtgtctcaaaaaataaataaaatggagttaactaaggacaaggagcacatagcagatacttattatttattgaattaagtgaactttgaaaaactgtaagccttaagtatttttttcaaacataatatgtctattgaaggatatttatagataaaataggctgggcgtggtggctcacacctgtaatcccagcactttgggaggccgaggtgggcggatcatgtggtcaggagatggagaccatcttggctaacacggtgaaacctcgtctctactaaaaatacaaaaaattagccgggcgtggtggtgggcgcctgtagtcccagctgcgcgggaggctgaggcaggagaatggcgtgaaccctggggagcagagcctgcagtgagccgagatcgtgccactgcactccagcctgggtgacagcgagactctgtctcaaaaaaaaaaaaaaaaagaaaaaataagccctcccactcagagttaatcatggctttatttctcctgtcatatttcattagtatgaccatttttcctgctagtatcacttaaaatttttttttcttcccatgcgataccattcaaatagtacaaagatttggcttaatgtgaaattgggtcttctttctaccccagtccccagtcttttagttctgtgttacagaaaagtactatgcgattgttagcaattgtctcatgtagtctttcagaaatattccaagtatataaatagtaatatactttgacatttttatacattgatttcccccttacatatgtttgaaacacttccatatcagtacatgtaatctgactcattcttgttagtagcttcataatagttatatgaatgcattataggtcatttccagtattttacttgcttagtgtttttggtcagcatcatttggagatagtgtgtaaagttaattttgacaaaggccaaggcttttcaggttacatgtaattttatgtaaatcttacaggtgaatatgagaagggcgtagaccatctgacaaatgcaattgctgtgtgtggacagccacagcagttactgcaggtcttacagcaaactcttccaccaccagtgttccagatgcttctgactaagctcccaacaattagtcaggtaaggaattggaatgttatgacataaaagtgagtgggatttagaatcgaatgattagggacattttaaaatgagcctagtgaacatgatgaaataaacttatctgtataatgaaaacaatatgggagatatcagcgcttgacattttcctctctggtgggaaacatccagatgactgcccagatctagtgattgtgccctggaggtggatcaggaagtgtgtgtcttagtgataagtctcaggtcttagtagtcaactgtccaaattcaggtcactcttggctactttctacaagtagctttctgcctactcttccaggagaccatgccttcagttaggtgatctgacagaggagcctagatagctatagcctacacattcgggcctaaacgtcggttctagacattcaagagcatggattccctctgactcacttgtgtaaaggctcatgcctctgctgctgctgaggtgcactttgagtttggagctatttgacgacatccccaaatccctactcaaaaatgcaaaatagcattaatatactgtaaaagattaacttatgtgtaaattaggagttaatgaaaatgctttctcttcattttgagttcttttcaaggagcccaaatgaatcttgctttttggaatagcgtgtctgttacaagtgttgatttcccaagttggtgtgattaaaacagtgaatgatgataggaagtatttacagaactttatagttagtaactgactggttaatttttcaaactgatttttactcaactgaattagaaaaggactggaaagaaagtaaagatcccaacgacttgagggaacaagttggacaaccaaggactttgtctaaattgtttttatttagactaatgtggttctagttctagaggattcatactggaatcatcggtttaatattacgctatttgaaaggcagcatagtatagtacttttggaaaattggcctgagggtgatgtcttttggaatatttgtgaattcactatgaagcctaattccttaaaaatgacctccttcactcaattatcagtgttcttggtttgcctgggagtgaaaagagatcttaaaatctttttggttttagttacataattgactgatgtaatattatgtaatgatggctgtacacagtgtctcatgccctataatcctagcactcatttgagctcaggagttcaaggccagcctgggcaacatggtaaaaccctgtctgcaccaaaaataaaaaaaaaattagccgggcatggtggcatgagtctgtggttccagctactcaggaggctgaggtgggggaggatcgcttgagcccaggagtcagaggttgcagtgagctgagattgtgctactgcactccagcctgggttacagagaccccatctgaattaaaaacatatataatgtaatgatctgcctcctttgttaacttgacttttgaaatgggattgtcagtagtatgatcattgttttcttggatgccgactgtgtgtaaagtgttacattttgaattaaatgtcagaatgggtgaactttactaagattcaattctttgaatacaaagagcattttattttgaagttagaatcctaattaaatgcttatgacactttaaaaaattattttttttttctttcagagaattgtaagtgctcagagcttggctgaagatgatgtggaatgagaaacaaatgtcaacataataaaatctcagttaaaaatattttaaaaattcttggtagttgagcagctctgggggaataagggcaaatatgcttgttatgaactacactgaaatctaccaaagttaatgtttactttgtgtagatccatttgtctattttatttatttttcccagtgaaaagtgtattttgatagagaacttttcattctataaatacactatgagttactaaaatatcatggattttgtttattcctgaaacatagttacatagttaaactgtacatatgacatggcttatgttaaaaatacccagtgctcagttttgaaagataggcaaaaaaaaaaaagtataggagaaactgaagaatgtacacttttttagagggcacattttgctgtaaatctggaaatttgatagacttgactgtgtttgtgaaaactgagcattaaaggttttgattgatcctttctttccatttaatctctgagacgtaaatatgtgaggtgtgctgctgtgctgggttaacagcttccttccctttctgtgtagcagtcttgaaatgttctgtttaaatcagtaggcttaatgtgttctgggtatttatctccttgtattttaaatatatgtagttgcaaatagcaccaggaattagatttctgtacacccctaatctagccttgtgagcttcgctagttaatgtgtgctcactttccctccatttgttacgtgagagaatgcgtctgctgatcactgaagtgtcccttttagcttctgattcattgggttctgttgggcatctttaaatccaccttaacctgaggaatgtatgtgggcaaccaggccctgcatttttttatattctgaattttgcatgcttgcctgacttagtatttctgaattgatgttttttttaatggtataactatcttgattttcactgaaattatatggttctgtcactactctgtaaattaatccgaaacttttaaggtaactgggatgatctgcttgtaaaaatgcttgttgccttttgctttatcttcagtgtacctccttaatcctgcttcaacttgattatcttgtgaaacgatgagagtaagttgcaaccttgtgactgaaaacttgaaaagagtggagcaggtgggacctcttattctcaaatagtgacatattctccgtagtcacagtttcagaactgagtaaggatccttggtacttggtggcatctgttgaactgaggagcatttctcattgtaaagattgcctttgttctgtctaaaagtctggagaaatcccaaagacttttcctatgtactaggcattttattttgattgacttacaaactcttcttaatcattatcaatctcggtttttttgtggtgcagtggaaggagaaataggtctagtttctgcctctgattagccgcacagccttgaacaaatcacatttcatctttgaacttacctctactgttagactaggcgactcacatttgaggacttttctcgggtatcttgagggtttgtgatcctgaacccttaaacagtgcttttttgttacacaggagggcttttttggggggatgaccagtacagacatgccagttagttttactagtgggatcccaaatccaaagcagtgtagtggtgattggtcagtgactaaccaggcagctaagaagtcttaggcagcagcccagacatgtatagaggggcagttagagggagaacaggggtgggaaagggagcaaggggcagatagctcagcaaggaaagaatgggctcagaaaaaggagggctggctggaggagtgaggggcagcttaagtttggggagggtagaaacgccgtttccttgggaactggagtgcagtatgagctgggtgtcacttggctctgaacatactggctttgctgtaatgcttgaaaaggcgttggtatcttcattttacagttcattaacccaagtacgttttcttatttaaatgacaactttggtgctttaaaatgaggtaccactttttaaagctagctgtgtcgagttaaagaaaaaatcagcagttttttctcccagaaatgtaattgccaaacacta

SEQ ID NO: 4311 - DNA, 6000 bp, Homo sapiens
cagcaatgtccaagagttcctgtttctccacatccttgccaacacttgttttccattttgattataaccatcctactgagctctttgggttttcatttgcgtttctctaatgattagtgatgttaagcatcttttcatgtgcttattggccatttgtatgtctttgaagaaatgtctgttcaggctttgcccattttttaattgggttgtttgagttgtgagagttttttatgtattctggatattaaatctttctttatcagacatgtgatttgcaaatactttctcccattctgtggcttgtcttttacattttttttattttttttatttttatttattttttttgagacggagttttgctctgttgccgaggctggagtgcagtggtgcaatctcagctcactgcagcctccaagccccaggttcaagtgattctcctgcctcagcccccagagtagctgggattacaggcgcccgccaccttgcccggctaattttttgtatttttagtagagacagtggttcaccattttggtcaggctggtctcaaactcctgatctcaggtgatccacctgcctgggcctcccaaagtgctgggaatataggcatgagccaccgcacctggcctgataatgttctttgatgcacaaaagtttttaatttttatgaagtccaatgtatctgtttttccttttgttgttcttgattttggtatataagaatccacagtcaaatccaaagtaatgaagatttacccttatgttttcttctaagagttttatggctttagctcttacacttagattattgatccattttgagttactttttgtatatagggtgaggtggggattcaacttcattcttttgcatgttggctcttcaattggcccagcactgtttattgaaaagactgttggatggccttcgcactcttgtcaaaaatcaattggccatagatgcttaggttgacttctagactctcagttctattccatcagtctatatgtttgtccttatgccagtatcacactgttttgattactgtagctttgtagtaagttttgaaattgggaagtgactttggggagtactgccctcttagcaatattaagtcttccagtgtgtgaacataggatgttttcccatttaatgatgtctcttaacaatttctcttagcaatgttttctagtttcattgtccaagtcgttcaccttttggttaaatttattcctaggtattttattctgttagatgctattgtaaacacaattgtttccttaatttccttttcagattatttgttgctggtgtatagaaacacaactgatttctatgtgttgttgttgtaccctgcaactttgctgaatttgttagctctagcagtttgttgtggattctttggtattttttatatagagagaatcatctgcaaatacagataggtttattcttcttttccaatttggatgccttttctttctcttgactaattgctctgttcagaacttccagtacagtattgagtggcagtgtgaaagtgagcatccttgcctcgttcctgatcttaggggggaagtctttcaccatggagcatgatattagttgtggattttcccataaatgccctttatcatattaaggaaattcccttctatccttaatatgctgattgttttgatcatgaaagagtgagcccattttttctaaagtgaaagtttggctcaaagtaataaagtgctgacctgaaagaacaatgtgcctgtagattgtctttgaagtctctgtgcctccattttttttgagacggagtctcactctgtcacccaggttgaagtgcaatgacgcagtctcacctcattgcaacctcctcctcctgggttcaagcgagtctcctgcctcagcctcctgagtagttgggattacaagcgcccagcacccctcccggctgattttcttatgtttttagtactgagacagggtttccccatgttggccaggttggtctcgaactcctgaccacaggtgatccacccacctcggcctcccaaagtgctaggattacaggcgtgagccaccgcacctggccctgttcctccattctttgtgcattacttgctgtgatcacactcatctaggtggtggacataatgcgagttaacgtggacaaggttctggaaagagaccagaagctctctgagttagacgaccgtgcagacgcactgcaggcaggcgcttctcaatttgaaacgagcgcagccaagttgaagaggaaatattggtggaagaattgcaaggtaattatcttttaactgacctttacatttaaccccccttctccattctcagagaattaacaggctacagataatggactttcacgactctgggaggtgggtttgacttcctccacatggaaatgtgggtccactgtgaatccgaaacactgactgcataccctttcctagccccacactaggaatcctctatgtgctgtggctgatcttcagaagatgcaggtagaacaggaatatccaaaatcactcacagtcatcagcccctcccaaccctctaccccagcagggccccaaacagataggagagggctggaattggtcagttttctcgtagttctgtgaatggttccaaggtcaagggaaagaaatgctagaaagccacagtgtgcccaacagaagagtagaaagcagctctcccaggagcacgagccaaagcagattttatacagttagcgtgctgcaatcagatccagatgtatcctgtcctctgccttgtttacaagtgacactttgagacacagggcaagctgagcagcctttccatatgtggaaaacttgtatacacaaacaaatgcctagctagaggccacacatcatttgaacatcttttaaaagcagataagttaccttcaggccctaattgagaacatttaatttaggctttagaaattattaattactccagactgtatgcacctgaatttccctttcagtgactagatgaatattatataatactcttcaacaagcacattatgtctgcatttgaaatgtgatatggacatatgttttgttacagatgtgggcaatcgggattactgttctggttatcttcatcatcatcatcatcggtgagttacccttttctaaactgattggaaaagtcttctccatgtgttcacagaccattgattttgtgtacaagaactcagattaaaatttccctccgaaatgttagttttggctaggtgcggtgactcatgcctgtaatcccaaagctttgggaggccaggagtttgagaccagcctgggcaacatagcgtctctacaaacaattgttaataattaaccaggcatggtagtgcacacctgtaagtcccagctactcaggaggctgagacaggaggattgcttgagcccaggaattcaaggctgcagtgagccatgatcatgccactgccctctagtctgggtgacagagtgagaccttttctcaaaaaaaaaaaagaaaggttcatttattccaaggttttcagttttctttaataaatgttttaagtacttgagttttgtataagtctgagatttgatacaaacattaatcctttgaagttagagaaaatctattcatttccacttcttttctctgaatatatttttttcacatatttccttttatgtaatgtagtggttaaaagcatggagtgcctgtgatccatcctggctccaccaccatccagctgtatggccgtggacaagcaatttaatatctctgggtttctgtttcctcatttgtaaaatggggataataatagtccctgtcttgtttgtttgtttgtttgttaaaggacagatctggtaaatatataaaaattggccgggcttggtggcgcacgcctgtaatcccagcactttgggaggctgaggcgggcagatcacgaggtcaggagatcaagaccatcctggctaacacggtgaaaccccgtctctactaaaaatacaaaaaattagccgggtgtggtcgcgggcgcctgtagtcccagctactggggaggctgaggcaggagaatggcatgaacccgggaggcggagcttgcagtgagccaagatcatgccactgcactccagcctaggtgacagagcaagtctccgtctcaaaaaaataaataaataaaataaataaaaattgcttaggttggtgcctggcatataataataaaaataatagctatataaataatatatatgtatacacaaacacacacacaactattattatataatattcaaacaactcactgccatcggtagcccagtatatgagaaccgaaacatgacttctttcattgatagatggatgttagtggatgtttccttttagcaggaaggtacagttacttggatccttttgactctagtctccttcctctagccctctatagaatggagagaagccagtagtaggaaatcagcccagtctaatttctgatcacatttagactgcagcattggatgttggcttgggattcacactgagagactaacctgctgtttcccctgcctttttgcatctctcctccttcttagtgtgggttgtctcttcatgaagaaccagcggaactcaaaactgctgttcaagaaacctcttcaagacttttgacttagaacctgctatattatcaagcttacctactgttatctctaaaattttttttgtgttaatgtaaagttgaatttctaggaaacgtgcctttgttttttaatatgcactccaaattagaaggccggccccgtccacattttgcacagtgcctttacagatttacgtatgggctgatgaagaggccttcttaagttccagagtgctataatctagatgtaatgttgtcactaattaattgccattactcccagttagttacccttgtcatttggcattattttcagaaccacattttaaacctttgggtaatcagatttccaacttatgccttccagaaaaaaacactactgcctaacacaaatctgtgataacaacaggctgtgccttattttgataattttctgattccctagaagagaaccctctactttttgtaagcactactgactctcgctgtatttaagatgctggtgaagagcttttgctcttgcattagatttgaagatgtttacattgttgttattgttatgtatcacttgctaaaaatattgttttaatcagagataacctctttaaaaaaatttttaaagaactatggctatgaccaaagcttctattttgccaaaaagttaaataccgataaaatggccttaagtgtattcctgacagttaaattcagaaacgtgccaaatggaactcaaggtgccccttcagaattaaaatcattaccttgtgtgtgaaccttctacatcttcataggcctttcttccttttgaaaggctgtagacagtgtggctccccttctgattcagtattttgcatgggggttagagaaggtttgaggtagactctgaccgtctcataaaagagttctacccagcagttggcagattatcagctgtggactccagcatgtttctgataattatgcaagcaacaattctgtagcctcaagtaagaccacctgtgaacttgatcattatctggcccaaatatgaagataaactataactttggagtttgtttcctatttgtattcacattctgcttcctaaatcagttttctaaattatgcctgcaattaggcattggtcaggggtgaatggctcttttcacagagagtagccaaccagagacctttgctttgatatcatcaactgcagagaatgctgttgatgggaatgctggaagcagaaactttgtcatcggaaaaacttttcttgtatgcatgagactcaacatcaggatccacagcttaaagatgggaattcaggtatgaaagaaaacaggcaaggaggcactgagggagaaagaca

SEQ ID NO: 4312 - DNA, 6000 bp, Homo sapiens
acgagaaggagttcatgaagggcaaccagctcatcagcaacaacatcaagttcaaggtaaagaaaacggcatgagaggaaaggcaggtgagagacaagcggtcccgtctcacacggcttagtgctttgcccacccctggctggggtggacttaccggctctcaggggaagttggcactgttctcatcacatgcgacagggagagtagatttgacagcaggggcagctttatcaggccgtgaagatgtgtgtgcgttcttgccgcaatgagcatgtggacagatctgtttttcaagtcagcagctttcatggtttgtttaccatgtgagagtatcagggagagttctagagatgccagcaacagaaatggacttcgacctccttaagaaagagaaagaaatccacaggaaagctcaggacagctgggaaagctgaaggaccagaaccatgtgctgtggggagcagtgcagggtctagcagacatcccttgggtaccaggaggaaggagcactggccctgggttcctcctgattccgattcagaatccagggagagggggtatcctgttgcctcacttgggtcatgtgccactccttggctttgggggcaggcacgttgattgaaaattctatcaagacaggatgtaggagatggcttgttcccctctggagaatcaagctgctcttcccagattaaaggaaaccacagaagctgcagccaggtcctagggttcaggctcatttgaaccaccagcctgagccactcttttgaacctcagccccattaagttcctgcgtccggatgtgcttctgaccctccctgtcacccaaatccttaagctccatcagtactgctgtgttcgtttgcccatgcgcagtagcctgtggcctccccacccacagaaatccagcatcctcacccgggctggcgagcagcgcaaacggagccagtccatgaagtcctacccatccagcgagctacggaacatgtgtgatgagcacatcgcctctgaggagccagccgagaaggaggacctcctgcagcagatgctggaaaggaggtgagagcctggcggggcccccactgcccgcagggctacacagcggtggggtgagcctttggctcagatgttgtgaggtggctcctgagtttcctgggaaagttggatggggagcgggctgggaacatggatcagaagcgctcccgctgagggtatcccaggcagcatctggtttttgtgtaacagatacactccctaccccaacctataccctgaccagtccccaagtgaagactggaccatggaggagcggttccgccctctgaccttccacggcctgatccttcggtcgcagcttgtcaccctgcttgtccgaggagtttgttactctgaaagccagtcggtaagtctctccgaggcagaaatcagccaggccagacctgacgaagctcgaggggttgggcgctgccggcgggccgtgaacagtgccatagggaaagctgaatgcaaggcgagaagtgcagagtggacttaggggaggagtcgccacagccgggtggtgagaagcaacagcggtttattccttcatagttcaaggccagaagtacaaaatccgggtgtcaccagggcagcgctccctggctctggtgctgtccttgccccttcctagctcatgggagttgcctgcagaccttggtgctcctgactgtgaacacagcccccatcctcgccactgtcatcacacggcgttctcctgtgtatcttctctcctttccctaaggacgcttgtcaccggatttggggcccgccctaatccagcatgggttcatctgaactcggtcacatctgtagagaccttgtttccagaaaggtcgcattcataggtactagggcttaggacttggccatatcttttggtggggggacacattcaccccccagccactttacttagtgctttctcacttaaacttcctaataagccatttgcatctcatgaatcaggaagaaagggagtgcagacagatcaggggacttgcccagggtgccacagctaggacttggccaaggacttggtttgactggagagctctcactctggagcgcttgctgctgctgcaccacctgcctcagcagcctggagctgggcatattcaggcatcaaggggaggggctctaaggtgaccctgctggccactgctgcctgagcacggacagtgtctgggttggaattgcagagcgccagccagccgcgcctctcctatgccgagatggccgaggactacccgcggtaccccgacatccacgacctggacctgacgctgctcaacccgcgcatgatcgtggtgagaagggctgccccggcctgtcccatgcggagctgcctcttcatgccgttggcgtctcaggcagtcagtgacacgtggtctctttgcaggatgtcaccccatacatgaacccttcgcctttcaccgtctcgcccaacacccacgtctcccaagtcttcaacctgttcagaacgatgggcctgcgccacctgcccgtggtgaacgctgtgggagaggtgagcgaggccccggccctgcccccacctttgagagaggatcccctagccaggtgctgtttgtgcacccaggcttctcaccagaaacgtaggcatcccaccaggaggggagagtgtggcccaacactagctttgaaccctgctcggcttccgtgcactcgggaccctttcccctgcctgccagcagatggcaccagcgtcccactggccgtcctttccagccagagccgcgcctctaccaggctgtgtcttcctcctgaaatgttgctcttcactccgtaccactggtgttccttggttctccacctgcgtagggatttgcgcattagatgagagaatttcaagcaaaatactttgagttttacaaagatataaaacacctagtaattattgctgcagactttccttttttcttctttttagaacttcattattttcttattacacaaatattttcttattacacaaatatgatttcattgtaggaaaatacaaaaacacatatgagcaaaaaacaagcaaaaaccaaaccctcgtccctaccctgtcgcggtagccctggtaacttttcaaggccaccctctcagtcttttgttgttgttgctgttgttgttgttttgagacagggtctcactctgtcacccaggctggagtgcagtggcaagatctcggctcactgcagcctcgaccttccaggctcaagcagtcctcccacctcagcctcctgagtagctgggaccacaggcatgcgccactatgcccagctagtttttgtatttatggtagagacacggtttcgccatgttgcccaggctggtcttgaactcctgaactcaagtgattcacctgcctcggcctcccaaagtgctgggattacatgcgtcagccactgcacccggcctcagtcttttcttctatgcggcacaaccctggcatgcatagtgcgtacttacacaggttttgttgcagtaggttaacttatgtcccttgaaatgtaattgccaactacactgacagagtcctaacatagtttatgacgtggctttggagttcccaacaacagtgacacgtgggaaccactgtaacgacctgtaacaaatgactcccataggtcactttgcaaggtggtgagtatgaggcatggcaggggtcataatctcaggagacttcaagggccccaccgcttgcacatctgtgaagcaggctggtcatgatgggagctgagcgctgagcatgtgccctgtggaaggacattttagttcagatgccagctggcccaagccctttttggagctaaccttgtccccttggcctccagtgtgtgagccctcgttagctgtttatcccaatcaagctgtgtctggctgtgcactatccaggcctccacattctgtgacaaactaacagggccggctcctgtcactcctgttctcgccagcgggttttaccctgaaggtgactcaggccttctctttgccctagatcgtggggatcatcacacggcacaacctcacctatgaatttctgcaggcccggctgaggcagcactaccagaccatctgacagcccagcccaccctctcctggtgctgcctggggaggcaaatcatgctcactccggcgggcacagctggctggggctgttccggggcatggaagattcccagtcacccactcactcagaaagccgggagtcatcggacaccttgctggtcagaggtcctgggggtggttttgaaccatcagagcttggacttttctgacttccccagcaaggatcttcccacttcctgctccctgtgttcccaccctccagtgttggcacaggcccacccctggctccaccagagccagaagcagaggtagaatcaggcgggccccgggctgcactccgagcagtgttcctggccatctttgctactttcctagagaacccggctgttgccttaaatgtgtgagagggacttggccaaggcaaaagctggggagatgccagtgacaacatacagttcatgactaggtttaggaattgggcactgagaaaattctcaatatttcagagagtccttcccttatttgggactcttaacacggtatcctcgctagttggttttaagggaaacactctgctcctgggtgtgagcagaggctctggtcttgccctgtggtttgactctccttagaaccaccgcccaccagaaacataaaggattaaaatcacactaataacccctggatggtcaatctgataataggatcagatttacgtctaccctaattcttaacattgcagctttctctccatctgcagattattcccagtctcccagtaacacgtttctacccagatcctttttcatttccttaagttttgatctccgtcttcctgatgaagcaggcagagctcagaggatcttggcatcacccaccaaagttagctgaaagcagggcactcctggataaagcagcttcactcaactctggggaatgctaccattttttttccaaagtagaaaggaagcacttctgagccagtgaccactgaaaggtatgtgctatgataaagcagatggcctatttgaggaagagggtgtctgcccttcacaaacacctctctctcccctgcactagctgtcccaagcttacatacagaggcccttcaggagggcctcctgtgccgcagggagggtgcgtggggaagatgcttcctgccagcacgtgcctgaaggtttcacatgaagcatgggaagcgcaccctgtcgttcagtgacgtcattcttctccaggctggcccgccccctctgactaggcacccaaagtgagcatctgggcattgggcattcatgcttatcttcccccaccttctacatggtattagtcccagcaggcatccctggggcagacgtgctttggctcaagatggccttcatttacgtttagttttttttaaaaccgtggaggttgcccacgggcctcggcacctggccctggcagcacagctctcaggcccagccctgggcgacctccttggccaagtctgcctttcaccctggggtgagcatcagtcctggctctgctggtccagatcttgcgctcagcacactctagggaataattccactccagagatggggctgcttcaaggtcttttctagctgattgtggcccctccattttccccattttcttatctccctgaccaaaattgctttgacttctaaatgtttctgcttcccagaatgcacctgacttatgaaatggggataatactcccaggaaatagcgcaggacatcacaaggaccaaaaaggcaattcttatttaaatgttactatttggccagctgctgctgtgttttatggcagtgttcagagcttgatcacgttatttcttccttttattaagaaggaagccaattgtccaagtcaggagaatggtg

SEQ ID NO: 4313 - DNA, 6000 bp, Homo sapiens
tctctactaaaaatataaagattagccgtgcgtggtggtgggtgcctgtaatcccagctactcaggaggctgaggcaggagaattgcttggacctgggaggcggaggttgcagtgagccgagattgtgccattgcactgcagcctgggtgacaagagccagactccatctcaaaaaaaaaagcaataatgataatactttctcacagagatgttgtcaggattaaattgattaatatatgtagaatagtttatttatttatttgagacagggtctcactgtcacccaggctgatgcgcagtggcagaaacatagctcactgcagcctcagcctcccggactcaagcgatcctcccacctcagcctcctgagtagctgggactataggcctgcgtcaccatgtctggctaattttaagatttttttatagagatgaagttttgctatgttgcccaagctggtctcaaactcctgggctcaagtgatccttctgcctcagcctcccaaagtgctggaatgacaggagtgagccaccgcacccgactcgtgtagaatatttggagtagcggccaggtgcggtggctcacacctgtcatcccagcactttgggaggcggggggcgggggcggatcacctgaggtcaggagttcgagaccagcctgctcaatgtggtgaaatcccatctctagcaaaaaaaaaaaaaaaaaaaaaaaaaattagctgggtatggtggcacatgcccgtagtcccagctactcaggagtctgaggcaggagaatcgcttgaacccaggaggcggaggttgcagtgagtcgaggtcgtgccattgcactccagcctgggtgacaagagcgaaactctttctcaaaaaaaagaatatttggagtagctatgtgcgtgtagtggagtgcttggcaggtgctggttactcttaacggccgtcattgttgtaggtgagccggctgcattcttagattccttccagttcagagtccctggttttctgtgagtagagccactagactgtagaccccaggagcttggctgctggccttctctgggcacctagctgccctgatgtgacgtggcagagtcggtgtggggaatgagggctgaacttggggacagattccccacactgggtgagatgtagccccagcctcccccagggcctgtccctgctgcagtctggtaccttctttcctgcaggagcagatcaatatcaccctggaccaccgctgccgtatcttccagaacctggatggagccttgggtgagcagcccccacggggaggggtggatcctcagaggggtgataggaagaattccaggcagggcccgagcccagggaggagaaatgggctgcttctttctggccattgtgctgagaggtcactggcctcatccccaggtccccaggggccacttggatatcctggcgcagagccatgtctctcttgggggcgggggacaagtgagcattcagcctgggaggagttgggggatgcgcacagcaggtgctggaccccctgccctgcataccaggtccttacaggtgggccctctttccccactttcccggccctcccaccttccaggtgaaggagtcctgggctaggggcaggaactcagctggtgggacaggcagcttgggaagcaaaaggctacttgacccttgatgccgcaaacatccctgggcctggcctcatgtctgtggctggtgatgacattgctttgccgcaggtcttcctgtcttcctgagtgacctcaggcaagtcacacctcctccccacaggggactcagttttcttatctttacaaaagggaagtgaaccggatccactgattgctgattttgtggataaatgggcccttttgagaatctgatgaaagctacggctctgctcccagagaaacgcagaaaatgccctttgcctgtggtttctgggggttaagaagcactgagttcagatccacgcaggtcaggagctatctgttttcctttttttttcttcttttttaagatggagtcttgctccatcgcccaggctggaatgcagtggcgaattctcgactcactgcaacctccgcctcccaggttcaagtgattctcctgcctcagcctcccaagtagctgggattacaggcgcacaccaccatgcccggctaatttttgtatttttttagtagagatggggtttcaccatgttggccaggctggtctcgaactcctgacctcaggtgatccacctgccttggcctcccaaagtgctgagattacagacgtgagccatcgtgcccagccctattttaatttttaaaatagagacagggtctcactatgttgcgcaggcttgtctcaaactcctgggctcaagtgatcctcccaccttggcctcccaaagtgctgggattacaggtgtgcgccagcgtgcccagctgaaatacccattttcctatgtgcagactaatagggtcaaacatgggtattgggggccaggcactgtaatcccagcactttgggaggccaaggcgggtggatcaccagaggtcatgagttcaagaccagcctgaccaacatggtgaaaccccgtctctactaaaaatacaaaaattagctgggtgtggtggcatgtgcctgtaatcccagctactcaggaggctgaggcaggaaaatcacttgaacctgggaggcggaggttgcagtgagccgagatcatgccactacactccacactgggcaatagaatgagactccatttctaaaaaacaaaaaacaaaaacacacacaaaaaacatgagtattggaaccctgctgcaggggctccctccactgggacaagatctgtcctgatcatgcccaggcctcccctgcatgtggctctggcattttctcagtgctgctctgcctactcagagaaggcgcgtcccagaccctttctcttggggcttctctgaggtgcctggagctgggatgttccaggtcttcgttcttctcccagcccctgcttctgactgtaagtaaccacaacaagtacaggggttgccgtggattctgtgctcatgatgggccaggcttggtgccccacgcttgttcaacacaaatcctccccctcaccccatgaagaagggattattcctattttatagatgaggaaactgaggcttagagagaagtgacttgcccgaggacataatctactcactgcacagctgggatttgagcccagctggttggaccctgagcctgacctctgggtctgatgctgggtgggactgtgctttctgacccccagatgaggtcgtgctcaagtttgaaatgggccatgtgagagcgaggaacctggcctatgacaccctcccggtcctgatccatggcaacgggccaaccaaggtagggggtccccagcccctggggagtgtgggagggggccagagccctaatttcattctcactgtgaccccacagtgtctccctggggccagggccaccttcctggggcctgctatgaactcactgcctctgtcctcacatctgagctcagcgtgatgccttcttttcctgctgtggtggtcagtggtactctgtctgttcttgctggtcacaggacacgtaggaggctgccatccccttccaggcctaggctgggctaccagagccatctgcactgtcaccccagggcagagtcacttattcactcagtaaacctttatttcatgtttgcaccagacagtaagacatagtcataagcaggacggatgtcctgcattcatggtgacagaagggactgggtgcagatgcggccagggacagaatggacctcactggtccctggggaactggctcatagctcatagcatatttgagtgtggtccttcaccgctggaatgagggagaggaaggaggatgtgatgtgtttaaaatgcaaatttgctgatttcacccaggatctgttcagatggaatctctgagcggggtgggacccaggaatctgcattttacaagctctcgggagaagcactagagtgccaagccctcccctgccctctctcagagcggcttggtgatctcctggggatggagcattatctccaagaccctcttagggagtgggagggggctggatggtgctgacccactgggggcccagggagatgtgagtcagggctatggcaggtggggctggctggcttctctgtgaccccacgtctccccgacagctgcagttgaactacctgggcaactacatcccgcgcttctggaccttcgaaacaggctgcaccgtgtgtgacgaaggcttgcgcagcctcaagggcattggggtgaggctgcgcccaggcctgtgcctgagggacacggggggctcagtcccctgagatggcgagatgggtgattctggaatagactccattgtctttggtggaaagtgaaggggtcacctccctgcctggggttctatcccggttgccacccaagtgcctcctcctggaagccctctcagattgcatgtctctagcttcccccgagatgtccaggttctggtttcttctgcctggtccttcaggctctcctgcagccccctccccatcccatgaacctcatcctcatttatgactcacctcgaacaccacgccagccacgatctcctgacagcaggccctcaaccgagtccttgttccaggcctgggctcctgctgctctctccccggggcaccctcctgctgcttccctgcccccccgtaccccctgactggagttccccggcccgggcacctttcttgggaagtctacatgcttctgattctggctctgactcccttgggccaccctggggtggagtggcagtgctgtgactggacactgctggactcttgtgccgccctccctggtgcaggatgaagctctgcccacggtcctggtcggcgtgttcatcgaacagcccacgccgtttgtgtccctgttcttccagcggctcctgcggctccactacccccagaaacacatgcgacttttcatccacaaccacgtgagtaacaggcgctctgtggggtcgtcatgtggcttagatccagggcccagcttcacaaggtagcccgagacctctgagggtctcaccgaatctagcttatctgggccaaatgacaatcaccagtggactgtgtccccaaatcactgagttaactttggagtcagactgggtgagtttgaatcccagcgccgctattttattggctgtgtgaccttgggcacattactcaacctctctgtgctttagtttctcatctataaaataggcataaaagtcgggcgcggtggctcatgcctgtaatcccagcactttgggaggcccaggtgggcagattatctgaggtcgggagttcgagactagcctgaccaacatggtgaaaccctgcctctactaaaaatacaaaattaagctgggtgtggtggcagatgcctgtaatcccagctactcaggaggctgaggcaggagaatcgcttgaacctgggaggcagaggttgcagtgagccgagattgcgccattgcactccagcctggacaacaagagcaaaactccgtctcaaaaaaaataaaaataaataaataaataaataaaataaaatagggataataattgtgcaatcacacagaattgctgcaagggctaagcaagctgacatgcgaagttcgtaaaaggtgcctggtgcacaggacgcatctagttgcttctaactgttgtcatcttcacttccatccctgtcactgttaatccttcctaccttcctaattgtacctggtggcagtcaaattggttttcttttctttttttttttttttgagacagagtctcgctgtgtcacccaggctggagtgcagtggcacgatctcggctcactgcaacctctgcctcttgggttcaagcgattctcctgcctcagcctcccaagtaactgagactacaggcatgcgccatcacaactggctaattttttgtattt

SEQ ID NO: 4314 - DNA, 6000 bp, Homo sapiens; identical to SEQ ID NO: 3566

SEQ ID NO: 4315 - DNA, 6000 bp, Homo sapiens
ggccagtcctctgtccagtcagagttgtagcggtctgggttataaatcagaattttggtcccactcaaacccgtaagtgtgttacttattcctgggccatagagctgcctttgctgtcagagattcagttgtgggtatctcagctctggaacatggcatattgatttttaaagttattattattattattatagagtaagggtctagctctgttaccccagcaggaatgcagtggcatgatcatggcttactgctgccttgacctcctgggctcaagtgattctcccaactcagcatcctgagtagctgggatcacaggtacgtgtcaccacacctggctaatgttatttttattttttatagaagcagggtcttgctatgttgcccaggctggtctcaaactcctcacctcaagtgatcctctcgcctctgcctctcaaagcattaggattacaggtatgaaccactgcgggttggggggctggtgtcccattgtgtgttgagaagcatcttcccagccaggtcagcccaggctgcctggagcagctcagccaggtgctctctggactctgcagagccctcagaaaaacacagagcttgaggagaccctgatgtgtcatctccagcatcccccagggtggaaggtaccaaactggcagctctggctcagctcctcattccactgctggtccacaccttttgggggtcctcttgcttcctaaaagcaatttacagacgtttcccacacagtcctgcaaggcacaggcacagtgctagtaacaggctcaactcctgctctgcaatggaaatgcatgaccccaccgctcctaccttgtaggatcccacacaatttgcatggtggcctctaaacccacagtcctcaaagtggggacccaggaccagtagcttcagcatcacctgggaacttgttggaaatgcaaattcttgggccccaccccttacctattgaatcagcactttggcagtggagcccagcagtcttgccttccaggcaagcaagccctccaggtgaatccactctcaacctcacttgtgtaggaaatgggtatcatcaatgtttggaagccaaccgttgttttggggctgaaaggaaatagtgcgtgttcctggcaggaagataaaggccagtatgtagcagctgctgttatctcaccagtaacgcatcatcattcatggccatggctttctgagcttaagctgtttgccaagaatggagccacataccctccttctttccctcttcccctcagctgagcagggtctcatgcttccagatcccctgtgtttcacttcagctcctttagctaaccgagtctcgctgcccaaggcccatattccttctctcatgagctgctggctctatctggtccaggagggtgagttctttcttccctctggtcttcaggttccccctcccaagacccagcttttctctctaggttttcagaccaacagcacccagagccgatccactaactccttcatcctggcccctctccccaccccaggacccccagctgaatgcaattccttattacctcccactcctccatcctgatcaaaaggtcatgtgaccaaccttctagattctagacacatccgggggtgtgggatagaaggcaggtgtccttgaatcatgacctagcctcagcatccctctaaattagttgcatgtaacccaatctcccccacctaggcttcactgtgtttcaatctttttgaataaagcgggccatctttctttctgtgtgtgaccttggagttacacataagcagaatagatgtgcatctattctccatctaacaggctcaacagacaatgcactattcctcctgtcaacagacattattgacactagagtcataaaatgcatctccaagatggggaagtcagttcaagaaagagtatctgtatcacgagttttctctttacatttccaactccttggctctaggggtgttgccgctacccctcatcttctaggttcaggtgctcagctcctgtttgtagccccaggacaagacgttacctgggagatctttagaaatgcagaatctctccctatcccacaacagaattgcacctgcataaccagtgccccaggtagatctggctgagaagctatgatgaagggcaaggtttgccaaatgttcatggggacaagttctccagcgacactggtttaaaataggaattccgaaaaggtctgattaatgagtttggggtggaacccaggaaactgggcatttatttaaaacaatctctcctgtgattcttagaaagtaaatttataatggggaggggtcaaagataagcatctgaaaacaattttcacgcaatgtggagctttgagacagcgttagtcttcaggttcttttgttgaatggaatttgtggcatctgggagtggagcagagaccacttcccaaactcctgttcttatttttttaaattccagcaattcagaaggaattaaagtaaaagacgtaagttctctggttgctgatatctggtacctgagatcaaggcaagatcgcttaaaccagtaaagtgaggattatgggagcaaactcaggaataaagagggtgaaccaggcctggaaggggacacaggtttggcgaccagacgggtcaccgcttggcccggcctaatccaactgcgcacgtcggtgggccacagcatcgcagcgctggatccccgggtcggcagaggcggatggagttcagcctctttttcaaaactgccaaagccacccggtctgccaaactcccccaccagccagctctggggcagccccccggagcccgcccgctccggtccccgggacaagggcgcaattgaccagcgcgggccgcctctggcccacccagatgacggccaactttttttgtttttaagccatcaaattcaatatttacaggaaaaaccccatgcttggttctaaaactactggccactcaagaaacagtttacttctcacttctgcccataacaagaaaaacatagacttgtgccttactcttaaaaaaataataataataaatataggttttttaaaatttatatataatttttaaaaccccgtttgttgcatgtggtccctttccctcctgttgttgagcagaataaaagcccattttgccagggcccgcagtcctggcggcccccgcagctgcggccctgtaactttaaacctggcctgagatcatcgttttggcgccggccaaacagagcccgagggcgggcctagcgcgcccggacggagaccaccttgcggccgaccccgctcccccgcctcctcgggagagataaatgctgactccgctcggaaagttctcaactgcaaagtttgctgtccggctgcctagggtctgggaagctcgggcaccctccctctccggggctcctgctcccacccctccggcccccccaccgtcgcgctcctccaggctgggcctgtggccgcggtgctttttaattttcccccagctcagaatcttgctgctcggcccccaggagagcaacaactcaacgggaacgatgtggaaggtgtcagctctgctcttcgttttgggaagcgcgtcgctctgggtcctggcagaaggaggtaagacccagcgcaagtggcttcctgccgtcgctgatggggacgagcgagcagagacttgctggaatgcccgggcctggtattcgaggttgtccaggggagcgcgggggagctgagggtgtgtgcgtgtcaggcggctgagcgccggaggaggagaggcagcggcttagtcggtgccaggtcccaaagacgcagctgcgcgggtgtgccgggaggagccccggaatccacaggctgcgaggtgggcagcacagggggcctccctccgagtcggcagcaccagagagatcgggtggaaggttcacagtaggcagccccgcttgctggcagcagtggctggggtttccttcccatagagcggtgtgttggaggaatacgcacgcctcgggagaagctggcctcgtagaatcaggagggacgttcaggagggcttgggccaaggggagggttccccgccctgcggtggccctggtcccccttgggactacctagtctggcgccctgcctgttggacacactcagcaccccgtcactggactggaagaggcctcctttatcctctttagagaggatagtgtgtgtggaaaggatccaagtggaggcttccgaggagtgtgagtgcatgaggattgttacgcgttacgaacattgaggtttaagtgggtttgagccacgtgttcatcttgggcaacaacatcagtggctgaatgtctgttggtgactccttaggctttaaatattttgtatcccatgttggggtgggggcgtccacagcttccattaccctttgtcctctcctggagccttacctcttcccgctgggttgctgtgttggtggtctccattgacatctgtcaacattttgttttcttttcttgggtttttatttttatatttcctcaatagaacatatgttctgcaggacgcagctacatccagccatgattccccacggccaaaacaatgcctggcacatagtagttgctcactaaatgttggttgaaggaattgtaacctaactcgtgatctttggggctggaggttgctgagttatgctgtgaaaagtaaacattttccaaaaattgaggatcaaggtaggcctaggccctgaggaatacttcttggagagggagcggtttgcaggaggggtgcgcctaacctggcctcctacaatggtccacacagacaaaaatacccaatctcagggaaatgacagagttctgctctatgctgtgctgtctgcttcaaagggactgagcaactctttttataggggccgtgggttattcgtagcagtcctatctttggaacttctctttccactggaatatatacagttctgtattttcagttacatttcctttttggcgagacaatgtgcaaatgacaccgttttgtgctcaccagggcaaagcaagggagcgccctcacttcagcatctcagccctgctaaagaaaaagctgctgggtaacatcctttgtttttgcccagggaagctttagctgtgattcccttcagccggctcctgaatgtcaaaggtactcctaaaagatggcgttaaaaccgaaaaaccatcgttggtgctggaaactccactactaaagaaagaagtggtatgcggggctggctgagtgagggtgggtgctgagttgcctggctgccagaggagcagaggcccagcagggtttttgtctgagaataatgagcgaggcgacttgaatatggatgaataacatcattgagcgaagctattgtgggcttttgttggggagctgggctggggggtaattatggtgatgaattttatgatccttttcataagatcctacgccctactgggtttccctcctccagggttataatctggttcagttttataatctggtcccatgtgtcatccctttgggtgttagtggattcaaaggaggtctgttgtccacacatctggcatttttttccattgtcaggcgccaccctcatgctgaactttcatcaggaaggcacgttttgggggccacttcattagagagtttattttgtgagattctgcaagctgctgctcgctgctaacccacatgtgcttttccgggaccaatccacccaggattaatcatgcggccaacaaatttccctgtgatttccccgaaacgcttgccagtttggaggccctgaaatcctcatgagttgttaagagtttttgttgcactgaaggcacttaataaagatcaggtctgttagaggctttgtgagggaggcctctgcattgcactggtgtataagatccaaaatagcattgaatatagaaaagcacaatttaaaaaatgtgtccgggcatgagaaggctaagtctggacgtggccaaagggacta

SEQ ID NO: 4316 - DNA, 6000 bp, Homo sapiens
ctgcttcagtgtgtgccagtccaacatggcagcttccctgggctcgaggttacctgctgcagggacctgctggggtcttctgacagccattggcattgtttctgttgtcaaagcctccatttggttcaggtgtcttcaccaacccccaggtgactccaggtgaatcctgagagcctatgcccattttgagcgtccttgccagtgacaggcatatgacccagttccggcaaaggaggtatcaaggaagtttactgggagcttctgggaaaggtttcgtcgctgatgaaaaagagacccacgggaagatgagagagcatggagcccaagggatgacgagtaatgaggctgagcttgtgagaagggcccacccccttaggaagtcccacatgtccttgcagagaaggctggactgcatgaggggacaacggggacccactgaattgctgactttacaatacagagaatggattaaagggggagggtttgggagcaggacaccagttaggaagcagccagatgaactgcaatcatgctgaggcttagagggaagtttctacaagctggagcacaagaggagatggggtgatagggaggtagaattgctagctggctgttctcaggggtctcaagaacttgtaccccaatgcgacgatgtcctcagaagcttcattctgggctgtctacacaggtccagttacactggtaactcagatagaaacacatttccagaatcaacatttttcagcaaacgggacaaaactgttttatttaaactaatggtccaactatccaattttgctttgcgctacgtgagcacaatttgtctgccacacagacctgattcagccttcagtggggctgggccagtatatcaccagtgaaacctacacgcaagacacatcccttcccggtgactaatgtgcaccgtttcaggaaaaggccaggttgaaagtgcacatacgtgatttactgctgactttggcaagagtcatacagcagagacactgctcagctcctcacaggtttagaaataagcccacattaagagtaagtgggggctgggcgcggtggctgacacctgtgatcctagcactttgggaggccaaggcaggtggatcacttaagcccaggattttgagaccagcctgggtaacgtagcaagacccccatctctacaaaaaaatttaaaatttaaaacttagccaggtgtggtggtgcatgcctgtagtcccagctactcaggaggctgagatggaagaatcactcgagtccaggaagtggaggctgcagtaagcagagattatgccattgcaccacagcctgggtgacagagaaagatcctgtctgaaaaaaaaagtcagtgggaagagagagtgacctgctcagaaccaagcaagggtaaagaatgacagatggcagagaacagagcaagcaagggaggatacagggacagataataggaggatatgctcctggtggacaatacaggtggtttccagccaactttattattaacacattctcactaaaaaataaaattacctccccaacacacacacaccccccctcagtttctaagggtaacctgtttggtttgattcctcccatagtctttctgtacataatcaaatatatgtatgtgtgtctacatctttttaaaaagtcatttgtgagccaggcatggtggctcatgcctgtaatcccagcactttgggaggctgaggcgggtagatcacttgaggtcaggagttcaagaccagcctggccaacattgtgaaaccccatctctactaaaaatacaaaaaattagctgggcgtggtggtgtacgcctgtaatcccagctactcgagaggctgaggcaggaaaattgcttgaaccgagaagtcagaggttgtagtgcaacctctgcaccactgcactccagcctaggtgacagacactctgtctcaaaaaaataaaaaataaaaaaagtggtttgtgtagtatcatcatatttagtgcctttctcggtgaatgatataacttggacgttcttccatgtcagatagctctacctcattctttctggtgacttcatagtgtgccagcatgagtctatgccacaatttacttagcatagctcctagtgctgggcattgaggttggtgaccacttttcaccgttacaattaatcagcaatgaaaacccttggacgttctgttcctgagcacatgtgtgagttgttctgcatgatgatctatttctataagctgattttccagcctcactttcattgatgtgcctggaaagtcagtagcatgacagactggggtcttggtcactaaccagggacagtcgaatattttaaaactgtcgttatttacccattcagccagaaagaataaaaatgtaatgccacgggaattctcagaacagcatcctctcctctttgaattcaggctttcagaactagacaggctaatgctcccacaactcatgttcaggccacactgggtactttgtcacatactagttcacctgatccccgagttggtcctggaaaataggtattattagcatagaaatgctaataatttttttttgacacatgaggaaactgaggctcagagaggacaagacatctgcccagggtcacacaactcacaaatagcagaggattcagaaaccaaagacaaaggtgatggaatcctgccttctttctaaatccgtgatgtaggctagatcatggtgcctcttcagaagtttacagtggacagttagccaaaaaagcaggtgaagtgaacatctgcctaggtgactgagtttgcaggatgtattagtttcctcccgctgctgtgacaaattgacccaaacttcatggcttagaacaacacagtgaactatcttcttacagttctggaggtcagatgtccaaaacggatctgcaaatgccttcccaccttcaaatcataaggcagacccaaacttgcctttttgtggatgccaagagctccttctggatgctctggctgacactccattcctttccttttctagctcctagaggctgcccacattccttggctactgacccttgtccagcaactgtatcattctgatctctacttctatcaccacatctccctctctaactctgaccctcccgcttccctcttgtaggaacccttttgacaacattggacccaccaggaaaatcaaggataacctccccgtcccaacatctttaacttgatcccatctgcaaagtcccttttgccacgtaaagtaaccagttctggggatcaggttgtgaacatctttgggcagccattattctgcctatcacagaagggggttcctagcttagtgatttagagcaagggccctgcaaagaccccagattcaaatactttgtcacttgctagcagatccaggtacctaacttctctgagtcttaacagcctcatctgaaaaactagaataatagaatcttccttctagggctgttttgaaaaccaaagaacacaatgtatgcagtgcacgtgaaacacagggttcaataaatggtagggaagattcagagaaactaaccatgtagagggagagggctgtggaggagaggaggataaggagaggcatgcttcctttggtagcttcttcagttttgcctgggcctcagctttgcctgagaatttcgtcagtctctccccagatcagccagggtgagcctgcttaaatggaacactctgaagatgatatcctgtgataaacaagacctgcccagttgagtctgcagcagagtggggcgggtctgggatgaccctggcatggaaaagtacagcagctctttgtcttcagattaggagctgggacagctgttctgacatgatcaccccccgcccccaccccaggcctctccaaagtccatcttgcagagtcaaatgaaaaccagattcctggtcttatctgagagctacgtgactgtttcctgtcactcctttggagcctgggaaggtccccacatgcattgtctaaactttgggatgaatacgcacagctcttaaatgggagcatattattataggtacctgcctacacaaagggtcctccctattcactaaaatcatgggttattatttagggctttcattcatccaacaaatgtttattccgcatttgcaggtggccaggcaaggtgaacattctctcagggtggagagtatgtgcagacaggaggaattatgctatgggagggagagcagaagctctggagtggatcatcttgggtctagatcctgatacttcccagctgtgttttcactgggcaaaatgacctcacctccttaagcctcagccttctcttctataaagtgggcataacaaataaccgcctcctaggttatgaggattaaatgagatggttcaggggatgtgggtggtaaccccgcccctggttcatagcaaggatgtgaggaatagcagttgctgtcatagacatggagactgtttccccaaatgccttcccacccccaaatcataaggcagacccaaacttgcctttttgtggacgccaaggttctgtcgagctgttagggtgcaagttaagaagccagaatggcgggctgaggggagaaatgcccgcatgttacaactctgcaggtgtacacacgtggacaccatatgtacccatgaattccgcctttggaagtgaacttgattgcagcctattttcgtctggaggcggtggattcccggtaggaggcgccttcagtcctcggctcgatcctgtgacgccagccagctgcctatcggcttctcagtgtttgaacttcaaagggctggacgctcacccaagaaggggaccccggcctgacctctctcggaattcaaaaaaatctaaggctcagagagggaatgggagctggctcttccctctgtgtttagcatccacgttttttggcggtctggctgaaaccagcccaccctagttcgggcgccagagcaacgcagttccgagggcagatctccaaggggcggaggcagagccgcgggtgagaggcttccgcgccgacttcgggtttgcactccccggagccagaactccgtggcggctccgggcctccgtggatccgagcagagactggctgcccgcctgccactcgcaggctgggaaaacgccagccggtgcctcgccgggaaagttctcggcaaagctggggatgagccctcagcagggcaggctcccggtgcagcgcgcccccatccattgcccgcgcgcaagaacccggaatgggccccacctgggccgggactcgggcgtgcgatcccgagggcgccctggggaccacgcatcgggtggggaccctggccgagggcgtgagctgactcagtttttaaaaactcgcttcctccttccctacttgtgccggtcactcacctcgctgggaaccagcccagggcagaagggggagagggaggcggtggcctccccaggaaggaggagaggtgagtatcccgccaggtaaaggcggggcggctggcggagctgtgcctcggcgtctgcgcctggtgtgggaggaaagcgggtctcccagctccacttaaacccctaaaacctgggacttctagcttgagacattccccgaccaccacccgtcacacacacgcgcgtgcgcgcacacacgcatgcacaccgattctctgggccctagggaggaggggggatcagggctctattttctcccgaccccctcttatccaactcggctggcaagggttggggagaacttaggcccagcccccggcacacgctcagcgcgctccagcggcatacgctggggagtgggtgcccgcctcgctcagctgcgatccctcgcctcgggcccgggggtggtgccgagggccgggagggagggtcggccggtgggcggtgcttctccgggctggaggccgctcctggccggcaccgccctccgcctcccgcggtccctccctcccgcacgccggcgctcccaggccgc

SEQ ID NO: 4317 - DNA, 6000 bp, Homo sapiens
ggccacatctgtcttggtggccacacatggctgcaggctgtgcagcacctgttccaggccgaccggcagccacagcgccttcggtggcgccctggagcagacgtcccctccctgtgcacctcccctcccctcagggcccggatcacttgcctgggaaggccaggggctccgagtggggccgcatgaagctgccaaagtcatcggaaaacatgctcagggccttctccatgggcgggtcctgggccgggagagcacgggaggccgaggaggaggtggaagaggaggaggaagaggaagaggaatggaaacttctctccgctcggaaggtggaagaggttctgtggctcatccacggacggcgccgggccctgcccaggcgggcgagggctggacaggagagggtgtgggcgcaggcctctgggcgagcgtgccaggctccgactgcggccgctttataaggccgactgtccctgggcttggggccagccccttgtctactagctaaatttaggcctctccatggcccagagggggctggaaatcttctcccgtgcgccggccctgctgacagcccgacacgcaggccgagagggctgagctcacagcctgacattccaggctgatcacagcagccccaggggcctcctcaccactgcacagggctggatcctgtctccttgccactcggacctcggtgcctgccccagaaccttgcaagtttggggtttattgtgtgttttgtttcccccgtcagcctgggggctcctgaggactgtgcctcccctccagactctggttctcctccacggctgtacctcctccatcagtgtgcaggctccttggggacagggtaggtggaagcaccaccgctctgtgacgtcaggagctccttccctcaaggcagacaaccttcacagcccatctctaaggaaaggttgagccctgccagggggtgtaaaatgtgcagctgtcccctgccagcccccatggggacctggattctgtgcctgcactccctctgactctcagaacattcagcagccccaagaggacaaagttggcagctttctccttaaaggtctagaaggttgtgttcccggcaactgtctgctccatctctgtgtcagaggtgatgcctgcgagcgccttaggtgggatttcagtcagaggtaaaagagaattccggaagacaattattctagccctgagttctagaatgccttctgggcatgggctcctggctgcaagctgtccagcacggccccgtttgatccccacacagctgggagggtggaggggctcttcccatgttacggacggggaagcgaagcctcttggaaagggcggggctcgcagttgcgtaagtggcagagctgggattcgaacctagatgtgttggacccaaagcccttcagaggccgaggtggtttgaacatgtgcctatggagacaggctggcccggaagagccagagaagcccctccctacccacctgcttgctcagcaaagctgggactgaccttgccctgggccagggtggaggccattctgagaggcggccaggccctctgctctgcccaggttgcagttaagggcctctgctgtcctctccaaatccgtcccttccgtcccagatcagctccaatgcctcctcccccagggaggcctctctgactgctcctgctcacatgggcccacacccagtccagatgcccccagcactgactgtctttgtcctcccacagcacctggcagtgtgacatagtcttcctgtgtgctgtgactctctgctgtgtcccttcttccctatccaactggcagttcccacgggggcgagggttcacctgtctccccattagattgaaggttcttgaagacgggcagtttctcttttgtctgagccccctacaacccagtctggagcttcatcctggagagctccttctacaggggtattagcggtgctggtggtatgtggagtggaagcagagcagggcacagggcacagcggcgggccaggctgttgcctggagcaacagggcctgttgcctctggcagagtttcctgcccgtgtcggggcctgtgacacccagcctggctgaggggtttctagggcagctgggaagccaccagcactgaggtgagatggagagagggtggggcggggtggggggcccagagcctgccgctcgccagggaaacaggagccggtggctaaatgcagacacactgtcatggtgctgagggcctgagtcactgcccctggatgtcagatcccgttacccacccccgcccaccattcctcctcccctttttcccccttcccgaggcatcacccacacaaatactggatcctctggcttcactgacccagagggacctcaaaaggtcatcaaggacattcccctgcctctaccttcagatcacagagacagaaggagctacaaagatgatgcagtcctttgaatcccagtcacccaggagagcttttcacaaacacagaccctttccttggaccccaggattttgatttgggatctggggaagggacctcacatctcttcccatcagctccccacacagccagctcataggccagtgatgaagccctcatcactcagtaggtattcattgaaaccttgctataaataggtgctgggcactgttctaggctctgaaggactcagagatgaataaggcagagacaggcccctgcttccaggctcacctcatcatacagaagaggaaactgaggctctagttgatgaaagagttagggtcagcagagctgtgctggcttcaaaccggtcatcctgctgagccaccctggctgccctcttctcagcctcctggtgcacacagggctggggggtgagggtagatgtggacgtgcagtgctggctgtgggacagtagccagcagctgccccagaccagacactggaaatcgggatgttgacagggcagccagttctggtgctgtgcagagtcaacaggtcggggtggccaaggtgaaggtgggctcgagtccatacagagcggcaactcccatcccacctcccacaacacacatctttgattttgatttgacttgcctggcatctaggggcaaagggtggcccagggtcccagattttaacaatcatccaagggctatcataagcttcagagggtggctttgtctgggtgggagtggaggcaattgtccccaacctcttgcccaaaagtggcatcagacacaactcttctgttctgtgcccaaaccattgccctggttcagcctcaggagctggaggagctttgggcaggggaagagctgcacagtgtggggctgggttcagcctctgctgtgtgaccttggatgagtgactcacctctctgaccatctacaaaatggcgaggctctccccattcacagggtgtgggaaggaggacttgagctgcagatgtgacgctcctgacacgtcgcaggcacacggcaggtgcttgttcctcgccatgtcccctcacacctgtgctgccatcctctgttggggtgggacaaactctgtggaattacccagaagtccccaccagagccgctggcccttggacgtgtgctttgagaagcatttcctgagcctggagggtctggacacaggatcaagtccgagttcctgaccccaattcactgccttgccccaggtgtcggcctcctcgccagccctggacaagatgggtcatcaggatgggaccgtgtggcacagcctgcgggctttggagccaggcaaacctgggctgggaatcctggctctgcctcggcctccgtgatcttagacaggcagccccagctccctgagacaccatttctctacaacgggatcacgctgcctgcctcgtgggatttccgtgggcactcagggtaattaatctgggagaaggctgactctctacctgacacacagggaggctgtggtcatgctggccccactcaccattgcccccctgccttctccttcccttcccagcctcctcccctctccctctgtgctttttcaaaccttccatgtccagctctgagacccctggaccctgagtctcagccttggcagatgacccctctctgtcctgctgtgtgcatgagctcccccttcccagccctcgtccagcagcacccaggagcctgagtacagctgggcaccaccctctgtgcagctgtgatgggtggggaggctcctgctccccttctctcttggcagttctgccctgcacagctctggcctccacagttctggttggtttgtcaaggacgtttttaatctccatggtaaaccccggccggcggggaaggggggtggcagggagagagtgatgattggtagagcatatacctgtccaggtgcactggagctgggagcaaaggaggctctgtgagaggagggccagttcagccgcagcaggaggactgacaggtgaggggtctctgggcgtggactggagtatgaacctggaagggccaggcaggcagggcataggggatggtaggggcagtagccagcacctcactttggctttgcagaggccttctggtcctggggttttcctgcctctgtgacctgagctgtcggggagaaaggagggtgctccgagattggcagggagagtcggagccatccatgggactctgcagtgagagagtcacagccctgggcagagactgctcccagtagtggaagcaccaagcgacccaggagggtgggagcggtgtccacagtctgctgctggacacagggggacacctaggaatcccaccctcatcccacaaaatgacacacacaggcacacaccctcagtgacggaacctcagggatgagggcacacacagacctagtgtgataacacacacacacacgcacaatccttcctcttcatttgggtggggagagcactggaagggcccagaggcagcgcgaggacgtgcagcagctcacccgggtccttccctccatctgcttctccaggggcctgatggaggagttggtggggctgcgtgagggcttctcaggggaccctgtgactctgcaggagctgtggggcccctgtccccacatccgccgagccatccaaggtgagagccaggtcctcttccctacccgcgggggaccactcaggacatcattcctgcctggctcccaccccacctctctgcccaggaaccaccctcctgtcatttgtccaggacatgactgcccaaagtctcctgggtggcagggagggaaggggtctgtctgtccagctgtctgtgggtcagatgggccaggcatctgccctctgcctttcaggagatacagcccaaggcctggtcactgtgcctatcttccacccaggcctctccctcacctacctgtgccaatgaggggacgtgggggttagctgctgggacagctgggggcacagcaaggggctggggcagcctgcacttggcacccttccttggagccccatgtgccttgttcactttgagacctgactgtcccctcagctacggggcagagcaagtagggaccacagaaggagactaagtgcagtgccagtggctggtgcccacagccagtgagggccagctcccaggctgggctgcagccagcgggccaggggcattgctggggacccagaggatacctggcgccacaggccctgggacacgcagaagtctgctagaccctggtgctctctaagctatggatcctgcagggatacaggtgaaagctatagctgccagcccccttcacactccctgtcccccaggaacctcccagtacaggcacgggtggggagagtggacaggtcaaaggccttctggcaggggcagcagtcctggcatccactgtgccaccactgtcacctgccacaaatcctgcccagcccccagtgtgaggcaagccagcagagggtagctccaggctcactcagtggtggcctgaggttctgttcagggctcctccatcctgacacagccatct

SEQ ID NO: 4318 - DNA, 6000 bp, Homo sapiens
tatgattgagaatgaatgattggcccacgctgcagggtgttgcactgatagttttgttcatttattcattcactgaacagatatttattgagagcctaatatgtgccagagatccagcgtgaaccagacagacaaatccctgcctgccttcagggagtttgcccagttgttcagttgccttctggcacagagcagctttgggcaggctggcaacctccctggggccttgatttctccacctctgtcatgaggagcttgccccggtcccctgtgaactgacgggcatggaggtctggggcagatgactccctaaaactcagctgttccatagtggcacctgctatctcctctggggaggaagctctcatagctagaagtaaacaagcaaaagccgagtattcttgaaagtccctctttaccctgaaatttttttttgtttgttttttgttttgttttgtttttgagacggagtcttgcgctgtcggccaggctggagtgcagtggtgcaatctcggctcactgcaagctccgcctcccgggttcacgccattctcctgcctcagcctcctgagtagctgggactacaggcgcccgccaccatacccggctaatttttttgcatttttagtagagatggggtttcactgtgttagccaggatggtcttgatctcctgacctcatgatccgcccacctcagcctcccaaagtcctgggattacaggcgtgagccaccgcgcctggccaaccctgaaatgttaagaggtctaggacttcgttatttcatgacccaaatgacagttataggagagcacacatgaagcgtctataaaggtcccagccaggtgcgggcctcatgcctgtaactctagtgctttgagaggctgaggcaggaggatcacttgaggccaggagtttgagaccagcctgggcaatacagcaagaccttgtctctacaaaaaacttaaaaaatttagctgggtgtggtagcgcacacctctagtcctacctacttgggaggctgaggtgggaaggtagcttgaacacaggagtgcgaggttacactgagctatgatagcatcactgcctccagcctgggccacagaacgagactcttgtctctaaaaaagaaaaaaaaagtctcaagttcaagataataacagtatggccacaaggtggcaccataaccctggcccaatcttaaaataaaattttaaattttagcacagagcgcattataacaaacatcagcggatccatcacccagaatgaacaaatgttaaagttattgccaggttttctttagttagtttgtttgtttgagacactgtcaccgaggctgaagttcagtggctattcacacgtgtgatcatagctcactgcagccttgaacacttggcctcaagcaatcctctcacctcagtctcacaagtagctgaaactagagtcgtgcaccaccacgctcagctaatctttaggtcttttttttaaaataaaagatatcaagtattgtgggaaaagtgaaagcagaaagactaatattctatgcactacctacagatttttacaaagcaacatttatcaggcaaaattttttactcatctcattcacagctccactgccttggtttcatagcagcagagaatttaagaggctttgcacaacttcacagagcaagtggcagactctggatgatgaacccaggatgctgggctccaaaatccttccacacagcacctctcagggttgcagctgttcacgtcagaaatccctgggctcaaggagttagcacagagctgaatgcattacgattgtgctgatgggaacactaaagccaagagctaggttttttttttgtttttttgtttttttgttttttttttttttagatggagtttcgctgtttttgcccaggctagagtgcagtggtgtgatctcagctcactgcaacctctgccttgtgggttcaagtgattctcctgcctcagcctcctgagtagctgggattatgggcgtgcatcactacacctggctaattttgtatttttagtagagacggggtttcatcatattgaccaggctggtctcgaactcctgacctcaggtgatctgcccgccttggcctcccaaagtgttgggattacaggcgtgagccactgtgcccggccagctagtgttaacatagtatcaaagacacagattacatcagtgtcatttaatcccctcagctactctgtgaggtgggtgccatattgttctgctaactattacagaagagaaagctgtgacccaaggagatggagccactggccctgtaatcccagagctgggatggagcggggatcccaagccatgtgtttctgactctctgcccaggcttgctgtactacgttctgttccttgggggcatggcagaaatcgtcacagtggtgcagtgtggtggcaaggaggaaggacaggcctcctctatctgcttaaaagatgcttctgtgggcaaggctggggctctgagcaccaaatagcagcttagagttggcgggtgggtgctgcaggctctgaggtgcctgaggggaggtttttgaccatctgtaatgggctctctttgccatgggcatcgagcagatctgggtttcaggtccacttcaccacttgctgctggtgatctggggcaaggcccttggcctctctgaaccccagtttaacgtctacctctcagcattattgtaggggtcggaataaataactggaggagtaggaaccgtacaacaaagcccctggggacagcgcaggagccttcgatttggaaagtattatttttctgtttctgtggagaaaaaatgatcccaccccgttctctttatactacattttctttttctctttctcttctttctttctctttctttcctttctctctttctttctttcctttttttttttttttttttttttttttttgacagagtcttgctctgtcacccaggctggagtgtgcagtggcacaatcttggctcactggaacctctgcctcccaggttcaagcaattctcctgcctcagcctcccgaatagctgggattacaggctcccgccaccacgcccagctaatttttgtatttttgatagagacggggttttaccatgttggtcaggctggtctcgaactcctgacctcaggtgatctgcccacctccgcctcccaaagtgctgggattacaggcgtgagccacctcgctgggcccactttctctgttgattatgcttattgtttattgtctgtttcttccactagaatgtaagctccatggaggtgcggatctttgttttggccactgtagtgtcctgatgggtcagaacagtgcctgacatctagtggatgcgccttaaaagatgcattgaagtatctgttcaatgaatgaatgaataacagtattaacctgcacagcagtgttaggcagagactcttctcagccagaggggagacgtacagagggaggtcacacccaggggaaaccacaccccacgcctctgcctgcagcgactcttaacacacctggcctggggattctcaaatctgttcacgctctgttagactaggagcgccaacagctcagggacttcatccttagtacctggcccctttggggatcgggatggtttctgcgggaaaggccctggggaaggttagcttcttgctcaaactaacggtgaagaatgcccagaattactaacccattttacagatatggcaactgaggcccagaggggtgtcaggcgatttgtccaatatttcccaactcctggctcccctgaaagcccggtgaccccgttgtgagtgggcaggcacccattagagagcagcccctggataagggcaggtcacagccccctgctcccagttccgcctgcgccgccgccacgtgtgggttgggaggggcatctgagggtgtgggggctgccacagcccgggaggtgacccctcgcagctggggcgctctgatcttcggcccacaggcccggggtgccgggaccccgccctcctgcagggccagggctcggctctccccgcccaccgcgaggcggggcgcacgctccgcggcgcggggaccgcgcgctccaggctgcacccggcctctcctccgcgcgtgcgggcccctcgcggcgcctcccgggctcgggagacccggtcccgccgcccgcccggcccgcggccgcctcttcctctcgcagccccgcggcgcttgccgcagtcgcaggcggcggagcagccagagcgccccaggtaccagtgcgggcgggagacggaggcgaccctgctgccgggtggggagggggcgccgcgcggccgctgccctcctcttcccgcggggcctggcggccccggcgaacccccgcgccgcacaggccgtgtgcgccggatcccggtgcctccgcgccagctgagacctgcctttcccaggggcggctttgctccggcccctaggcccccgccctggtaccccacacgcccaccggccgcggggagcctgctccggcccgagagcgcccattcacccccctcacccacctccccgcgttcccacttccccgcactctgacccggccggacgcccctcccctatcttgccgcccgccccctccagggggctctgctcccaccccagggagcccatccgacctctgcttgacttcccgccgcttccttcaggggcctcggctcatcgggtgcccctccccaaacttccaacccgtttgctccaggagttcctgccccatccccgagggcgcccaaatagccacactgtgtcctcctgtagtcgctgccccctgacctagcgcgacccagcgcccccgcccatgtccccccactcacctcccccggggggcgtggtgagtcgcggtctgttctcacggacggtccccgtccagcctgcgcttcgccggggccctcatctgctttcccgccaccctatcactcccttgccgtccaccctcggtcctcatggtcccagagccgggcccaaccgccaatagcaccccggcctggggggcagggccgccgtcggccccggggggcagcggctgggtggcggccgcgctgtgcgtggtcatcgcgctgacggcggcggccaactcgctgctgatcgcgctcatctgcactcagcccgcgctgcgcaacacgtccaacttcttcctggtgtcgctcttcacgtctgacctgatggtggggctggtggtgatgccgccggccatgctgaacgcgctgtacgggcgctgggtgctggcgcgcggcctctgcctgctctggaccgccttcgacgtgatgtgctgcagcgcctccatcctcaacctctgcctcatcagcctggaccgctacctgctcatcctctcgccgctgcgctacaagctgcgcatgacgcccctgcgtgccctggccctagtcctgggcgcctggagcctcgccgctctcgcctccttcctgcccctgctgctgggctggcacgagctgggccacgcacggccacccgtccctggccagtgccgcctgctggccagcctgccttttgtccttgtggcgtcgggcctcaccttcttcctgccctcgggtgccatatgcttcacctactgcaggatcctgctagctgcccgcaagcaggccgtgcaggtggcctccctcaccaccggcatggccagtcaggcctcggagacgctgcaggtacctggggtgcgcagggagacccgggctgtgggatagagaggaatgagcagcccctggggaccccctgggcatccccacttagcacacatttgctcatggccctgcgtggctgttgtgagcgcccacctttcttctgaactccagagccaatgcctgacccacccaccacaggatagctccgtcaggatttgggggcaggcttctcccaggtaccatgtacaacagggaatttatggtggcccaactctccccatctttgcctccctggtcttccccatcatgg

SEQ ID NO: 4319 - DNA, 6000 bp, Homo sapiens
tttccttggcaccaagagggtaaaagtgtctcctcctgaccttgggtattttggaccatgggatctgaggtgtaccaggagacaggaagtgtgatcagaaaaggcctggtctaatggtgcacagctgtgcatatccaagtggcttgacctctctgggccgtttctgaatctgtgagatgggaatcataaccactctcctgacttcacaggatgttttaggagagattggatctgggttggggagacaattttggaagcagaaaaggcccctccgtgctggcaacagctcgtccacctccagcctgtgtgtgctgcctcctgggtgactgctggctttaggccagcgcctggcagggcttcactaaagcctccgtaggctgctgctatctcagttctgaggtacgggccgtggagacccccagatttgggcttaaatcccaactccaccattgcacctctgagcctctgtttctctgcaaatggggatactagtccctagcccagatggggcctggtacacagttggtgctcaataagagcagttcgtcttcttctgagcatgggtgcatccctctggctggggtaagcaccaactcagatttctaggcccatagatgggctggaacagctgctgctgttaggggaaaacctactgtgttactagccaaggggttcccttccatgtttttgccccacagggcacctggcacaatgtctagcatacagtaggtgctttgtccacactggctggtcagttacctccaagctgacagaaactctgtcccgttcccgactgtttccatagaacctagcacagagatactcagcaggtgctctgtaggtgtttgggagtgaggaatgaatgaacaaagttgaatgaacaagcatcgggccctcccccggggctcaaatgggagagaggagcttcgtagcctgctccccctcccaccccagcaccccgtttcatcccttctgactaatccacaaagattaacccagggataaagcgggtcacggccactgacccagggctttggagctagtgtgaccgagtgtgtgcagggcgtggtggctgctcccaggggccctctttgccccaagatggccctcctgtcccccatcctggatgtggtcctcacggtggccctcagcctcctcctcctggggctgatcctgggcctcctttgtttcttcacttgccgcctggccaggccgctcaggtaggggaactcagctggcctgactccccctgcatcccgccaaattccctgccctaagctcgttcagcttccatttgttctcgtgagatggagcaagcggggcactcatttctcttactcttcatggtggggaaaccaaggcccggagaggttgagccctggcgtcagcctgggcttaaatggcgcatagtcgaagactagccaaaccctctgttgggtttcctaagctacaaaacgggggctcttcatccatattgtgagatcagggatgtaaacagcatggggctgagtggaacatgagggcctaagaaatggtagtgacacgtttgtcccattcttctatcatttgccccagatcttctgagacccagcccaaggctggctttttgccccactccaggatgctcccgggccctctgcctgggttgctgaatcagtcctcagagctaaggcctgcctggctcctcagccccctgcactgaactgccaagtagctgctcctctggcgccacagcctagccggggcttctgcactggccatgcgtaatcaggctacggaggagccgggagcctggcagagaagggagggagggggtggcgatggggctgacacacacccggaggccccattttaagctggcagacattggcagagggtggtgggcagccggggcccccacagccccaaactgggcccctccgcttccagggctgccacagagcagccaggagcctctgcgagggggaggggtcctaggggtggggccagcagggaggctctgggttctgaaggctttcccaggtccccaccctctccttgtcctgagcggaggctatgggagaaggcacctgcctccaggccaagcctatctcaatgcctatccctggggccaaaattcagagcatcccagcctgaactggtggcacttatggaactgctaccatgtgcaagggctcgggatgcagagatgggtaagatgttggtctttacgttcacagagcttcaggctagcagggaggagagacagaccaataaccggaagaataatcatgtggggctggatgagcctttcagtgctcccgggtcactacacttttatttttctttattcgctcacctgttttggaccctcagtgcagagagagtgggatacgttatctcacttagcacatgacatacccaaataagctctcagttcttgttttgtttattcattttttcctttgtccctgctccctgcctccccactgccattcccacagctcaccgaagtccctatgctaatgtacttaatatggccttggagttgtaagtgtccttgtacgttacacagcattctgtccgtgggggtggtttgcacttacatacactgcgtttgattctttacattcatcactcagtcctctgcctttagaccccaccacgctgctgtttggacatctagttttaataccactgccacgcagacattgcctccaccactccttactaattcatttccctagttgtggacgagactgccccggctcctcaccatcataagccagtgttaaaaggagtttgccaaagctttctccagcgagtatgatggtttctgcaggttcttggcataaagcctttatcagattaaggaaattcttttcaatacctggtttgctgagggcttctgtcacatcgttttctgtgaccccattccctctccctaggtgagcacgtcaagtttgatcagggtgttaactgccacccctgtgcctatgattcccaaatttatactctaacccagacttctttttcaaatgccagagccaaatattcagctgcctccttagtgtctccacttctaaaagacatctccaactcaacatatccaaaaacaagttcctgattgtctccacctcacgcctcaaaagaccaccccaaacgccgaaaggctgaatgcttttttctttttcttttttttttttttctgagatggagtctcactctgttgcccaggctggactgcagtgatgcgatctcagctcactgcaaactctgcttcctgggttcaagtgattctcctgcctcagcctctcaggtagctgggactacaggtgcacaccaccatgcccagctaatttttgtagagagagtttcaccatgttggccaggctggtctcaaacacctgaccttaagggatccacccgcctcagcctctcaaagtgctgggattacaggtgtgagccatcgcacttggctcggtagtatatggctcagaaacattgccatttacaatagttccccaaaaagcaaaattcttaggtataaatctggattcagagtccagaatgctaaccattacacgatggaacccgtaggtataaatctaagaaaacatatccaagatctacaggctgaagactacagagtgctgataaaaccgaagaactctgactgaatgagtggagagacgtggtgtcttcatgactgggcaactccatgtggtatagacgtaaaccctcccacattgatctgtggatttaataccatacctatcaaaaacacagtggtggaggacagatcagggatcgccaggtttagggatggggggattgtgtaactataaagaacgcaagagagatttttggggtggcagagctgttctgggtcctgacggtggcggtggtggttacataaatctatccatgtgtcaaacgtcagaacactcattttacacttgggggcaacagaaatccctccctctggagggggtgactgatggtaacctgattgctaattctggaatcaggagccctgtggtcaggtttctgctctgcaacttcctgttggtaaccttgggcaagtctccgtccagagccttggttttctcatctgtaaaaggagatgataggtccttttctgtccactgcatagctgattagtgaaacatcatggtgaaattctttatgaactatggagtgcagcacatagacttgctttcattttgtcagtatcctttatagattgttcatgtaagctcccaaagagtagtatttattttattgaaataaaatgcacgtagagaaaaatgtgtgtatcatacattgacagctgaacccaccgtgtaaccagcacccacccacccagatcaatcataaaccgaaccgcaccagcaccccagcagcccgttcccgtttccgtaccctccacgtggagcctccgttctgtctcccaacgccctgggttagtttttatactttctgtcatcggaatcacactgtaagtgctcttgggtttagcttcctttgctcaagcttaccttgtgcgattcattcatgttgttgtgaggagctgtggatcatccattctccttgctgtctgtggtggtttctgtgttgtgaacacacacaatgtattatccagcctgccgtagatggaggcagttttgaagccattataaacagggctgatgtgcacattctgctggagagaaacgggtcccagggtacaggtaggatgatcagcttcggtagatcctgccggttttcccatgcgctgtgcctgtctgcactccaccaacggcgagcggaccttccggtagttaaacatcttcacgaactcttggactttcctgcacacacagagaagataattttggatggctcttcccttccccccacaaccttccttagggcactggctttcaactgatgtaaatatttactatgccaagcactaggagggcagagacaaacaagacaaagtcctcacacttagaaactcccggtgtggcagctgagatggcccaggaaagaactatattaccttcaaaaagagaggtacatgcgatgtttgaggtggcatgaagctcagtggtgttatattggaatgagtgagtgaccatcctggagccttcctgaaagaggtgacttcatttttaagtgattttaaataatagtttaatgaattagtatttcgtattcagttaataacatttttctgattttaggatttgctatagaaatatttggaaaccgtaaagtagaacaaaaaaaaaaatgtaggaatcatctgaaattccaaattctaccactcacagttaagtgttgttagatgttagatgtgggatattgccttttaatttccactctgcgccgctacccccagcccctaccccagagccgtcacttctggcactggagcgcagcttgcgtggttttttttttttttttttttttttttgagacagagtctcgctgtcgcccaggctggagtgcagtggcgcgatctcggctcactgcaagctccgcctcccgggttcacgccattctcctgcctcagcctcctgagtagctgggactacaggcgcccgctacctctcccggctaattttttgtatttttagtagagacggggtttcactgtgttagccaggatggtctcgatctcctgacttcgtgatccgcccgcctcggcctcccaaagtgctgggattacaggcgtgagccaccgcgcccggccatttgcgtgtttttaaggttgaatcaagatccttcttctggtggtagtggtttctttttctcccttcccttcccttccctttcctccccttccctttcctccctcccctcccctcccctccctccttccttttctccttttctttttctctatttttaaattaaaaaaaaaaatcttggatgggcgcggcagctcacacctgtaatcccagcactttgggaggccaaggtgggcagatcacctgaggtcgggagttcgagaccagcctgaccaacatg

SEQ ID NO: 4320 - DNA, 6000 bp, Homo sapiens
cagtgctctttccttgctctcactacgtatagaacctgctctcacagcattacaagacggagacagtagactctgacaggcatagagggctctggatcctgattgtctgggctcaaatctctcttctgccacttcctagctgtgtgactttgggtaagttccttaacatctctgtgcttaatggtacccctcacatggggtgttgtaaggatcaaataagttagtcttttttttttttttttttttttagacacagcctcactgtatcaccaaggctagagagcagtggcgtgatcttggctccctgtagcctctacctcccaggttcaagtgattctcgtgccttagcctcctgagtagctgggattacaggcacatgccaccacgccgagctaatttctgtatttttagtagagacagggtttcaccatgtgggccaggctggtctcgaacttctgacctcaggtgatccgtccaccttggcctcccaaagtgctgagattacaggcatgagccactgtgcctggccagtttagtctttaacttgtttttaaaagggctcaatcgcataataagttctccatccatcttagtagttgctaatagcattaacagaaaacacatagattctgtgattagatgggcctgatttcttctcatattcgccctgtgtggctttggacaagtcatgtcacatcctgagtctcagtttccccatctgctaaactggggtcttgaaacctacctcagagagggctgttgcgagggtgagataggatgtgagtgaagcactagcactggtgcctgggggttcccttcctgatgggccggattggtctgtgtttgttgccttttagacaagaagttccatgaaggtgggcttcatgtctgtgtcagggctgtatcccctgcctctctgtacctggcacatagtagatgttcaataagtagtttttcactggatgaatgaatcaatagtaacaagggaccatgctttgctcacctttgtgtccaaaactagtgcaataccttgcatctaatttgaataaatatttgttgacagaataaatagattttttagaaatagctgtttgtttctgttcccagttccatttgaatttctgaattaaactgagaaagatactgtgaaggttaattttgtgtgtcaatttgactgggctacgggatgcttacatagctggtaaaacattacttctgggtgtgtctgtaagggaatttctggaagagattagtaattgaatcagtaaattgagtaaagaagatctgcccttaccagtatgggtgggcagcatccaatccactgatggctgaaacagaactaaaaggaagaggaatggcaaatccatgctctgtgcttgagctggaacatccatcttctcctgcccttggacatcagctctcctggttctcgggtcttcagactcagactgggatttacactatcggctcttgtggttctcaggcctcctggcttggactggaactacaccaccagctttttagacctccagattgcagatggcagattgtggaacttctcagccttccataatcacagaagtcaatccctcataataaatctctttttatatatctatatatagcctattggttctgttctggagaactctgattaatatagatacttataactcatcccaagtctctctaagccttggtattcttatctgtaaaatggggctattaataattatctaccacaaagattattctgaaaagtaaataagacaatatgtatttggcacatagaaaatgttagttcactgttcttccattccccgagcttcagtttctacatctgtgaaatgggcatctactcactcatttcttcattcatttactgagcaaacacagtgcccatgtggaaggcattgtggttaagacccggggcagttagagaagttagagagttagagaagtgaggaagccgtggtgaagaactgagcatctgctttgtgacaacacaccaatagtctttaaaagtcagtgggagaagagccacgggatgtatgaggtctctgggggctagaggtgtggggcaaggggacacccagggtttcagagagctttttagagagactggtatctccctagcaagtgatggtatcaacaacttggtgtgatcaccaacatcacatcactttgcaatggagttacctgctggggcctctggttttcatagcctgagtgtgaaaggcacgtcagtcctgctgcagccccactttccaccctggctcacagagcacaccagagtttggtcagagtgtcacatcacagtgagcatctagttcaaacagacatttccttctgagattcagctctgctcttctccctttctggatcctaccttcacaggggactgaacagtgattcccctacactctcaatgaggaacaacacagatgatgactctaatgaatgctgggtccctgcctggttctccaaagacaaggttgccctttcctgcagtgggacccagtgaggcgatgcttgggtgttggagacatgggtgaggccaggccaggtctctgggctcctgcacccaaatgggtcacatgcttatctctgatttgcacagctggctccacatcaacctgccaacgaaactcacaagagattgaaatatctgaattagaattttatatttaagctgcatatatttgtgggattgggaaggattagtcatctccagtgaccaaaatgtttgcacctgttacccactttcattttcagttgagagaaagttgcatgccagggatatttaaacatcgagggtgggtctgctgtcagtggtctggccagaggtagaaggatgactgagtcccagccgcccatccccagcaggcctcagggaagaagcaagatttacgaggcgagagcctgcctggcccgcttcttctgtcgggaaaggcttccctgcagtattttctgtctcgtcaacactgcatttcattttaaattgcagctgaaagtagatattttccctcttgcctattacaaacctcttaatttgtctctccctctgctgttatttgtctctataaagtgttttgcatgaaagacccacacagcacaatgttgcttcaccctgggttaggtttaacaggaagggaagatgcagagactaagtccaaggaggaagatgtgagggccttggggttgaggacacgcgtgtctgggagttgatgcctggctgtttttggaggttatctgttgcctgagtgtctgtgggtatgcgggtgcacatgtccatgtttgtactaatttacatatatgtctatgcatactgtggtataatcacttgggtgtccatacccaaattaagtgtatgtttgagtgcatgtacacacccacatgccagtctctgtgtgcatatagatctatgcccagacgcacacatgtgcatataaacacacgtaggcatcaaggtagacgtccgtcacattatgtgtgtggtcttctgtagacacgcccggggctctcttcctttcgctgcttctcaaggctgcggtcagcctccctccgtgctccacccaggagccctggccccgtttagggttgtgggaaaaggaaggcacgccagtggtctgcgagggggccagtggaaacatcacctccgccgacccggccgcggtcacagctctctggcttggctccagccaccagcagcacccctgcagcccggcgttagcgctgagaagcccggggcagccgccagggcgcgggctgccagctccctgacaaccccgggctggcactcgggggcgagagaggtcacccagcgacgggcacacccctccagagcaacaccgtctccggcccgcttccgggggccaccaacccgagcctcgcgggcgggctggggggtggtctctgtcgcttggggtccagcgaaggctgggcagtaaccaatggacgactgtggcccaacggggatccctcggatgcagccaatgccctcgttgcgctctccgcccccgccctcgcctgccccgcgccgctggaccattggcgcccgctggatggggggtgcgcgcgacgcctgcccttcggggagggcggggcttggagcgggctgcgctcccgcccgcgctcggcctctgccccgcccccggacgcgcggccctcagccggctgcggcgcggcggcggcgggagggggcgcggggcgcgcgcgtgggcgtggccggcgggcgtggccggcgggcggcaggaggcggggcggcgggcgctgtcgcagtgaaagcccgagcggcggcggcggcggggacggcggtggaggcggccgggtggctgtgcgcgcgtgtggggcgcaggctcggcggcagcggccggtctggagcggccgctgcgaggaagacagctgcagcgggggaggcgcggccagggctgcgcgctccgcggagccggcggggccgggaacaggtgatcccagtgggagccccgcgccctgccgagttcgaggggcgggagcccgcgctcccgggcgcatctgcagccgcccagccgcggctccggacccaggcatccctgcgctgtctggggcccgggggaagccccctgcccccgcaggctcggaagtgcctgctcctgctccctggccactccggctcccagctcccggcgccctctccgcggcggagaaagttgtggacgtgtcccgatagtcgagcccgggcgctgtcgcgaccgggccgggtgtgcgcgcgctcggggcggcgctgacacgccagccccccatcgcctcggtcccctccggaaactgcttctgaagctgaaactttgggcgcctaccagcgcgggcgggagcctagggggcggagggcggcttggtgcgggcctgcgggcgcccctcggcgcggacagccgggacgccgcggacggcatgtgacggtcccggcggccgcagcgcgggaaggcgcgggccccggcgcggcggggagggctcggccggaggggaggctgcggcgcgcggccggtcgctgcgggcccgggccccaagccgtgccgctccgctcgcccgggccccgccgaggccgctgcgcccccgcctcctcgcgggaggactcgctccaaactccctgaacttcggggacagtcccccgaagcggcgaaactctcagggttggcaaccctgcccagggacccccatcccgggcggcgctccggacgccctcccctcaccgcgcccccgcagacacgtgcctggactccgagggcttctggagccaccggccgggccacgatgctcatgaggaaagtgcccggcttcgtcccggcctccccgtgggggctgcggctgccgcagaagttcctcttcctcctcttcctctcgggcctggtcaccctgtgcttcggggccctcttcctgctgccccactcctctcgcctcaagcgcctcttcctggccccccggacccagcagcctggtctggaagtggtggctgaaatcgccggccatgccccggcccgcgagcaggagccgcctcccaacccggcccccgccgcgccggccccgggcgaggatgaccccagcagctgggccagtccccgccgcaggaaaggggggctgcggcgcacccgccccactggaccccgcgaggaggccacggcggcccggggcaatagcatcccggcctccaggcccggggacgagggcgtccctttccgctttgacttcaacgcattccggagccgtctccgccacccggtcctgggaacgagggccgatgagagtcaggagccccagagccaagtgcgagcccagcgggagaaaatcaaggaggtatggactcagcccccaaactcctcccaccaactgccccctctaaggagagaagaccctctggcgctcccacccctttcccttgcctcagtcactcctggtcccaggtctacttctggccctgcagactgcactttgcaccttcccctttcctcccaaatgtcccaccttctt

SEQ ID NO: 4321 - DNA, 6000 bp, Homo sapiens
caggcgtggtggcgggcgcctgtagtgccagctactcgggaggctgaggcatgagaatcacttgaacccaggaggcggaggctgcagtgagccaagccagcctgggcgacagagcaagactccatctaaaaaaaagaaaaaaaaaagtctgcaaggatctcactgaattttagtgaaaaccctctaaggagagattacccccatttaacagatgagaaaaataagattaatttgcaaaaaataagtagggaagcctccactgtggttctgaggtggaggagggtcctctgtctctcagtggtggtgggagtcggttctgattacaggaaggaagagtgggtgtttagttttcttttcttttcttttctttttttttttgtgacggagtctcgctctgtcgcccaggctggagtgcagtggtgcgatctcggctcactgcaagctccacctcccaggttcatgccattctcctgcctcagctactcgggaaatagctgggactacaggcagccgccaccacgcccagctaattttttttgtatttttagtagagatgggttttcaccgtgttagccaggatggtcttgatctcctgacctcgtgatccacccgtctcggcctcccaaagtgctgggattacaggtgtaagctaccacgcccagccttgtttgcttttctgagacggagtctcgctgtgttgcccaggctggagtgcagtggtgcgatctcggctcactgcaacctccgcctcctgggttcaagcgattctcctgcctcggcctcccgagtaactgggactgcaagcacctgccaccatgcccggttaatttttgtattttgagtagagacggggtttcactatattagccagactggtctcaaactcctgtcctagagtgatccgcccacctcgacctcttaaagtactgggattacaggcatgagtcactgtgcccagactggttttgtttagaatccaccccttgtcctgcctctcccaggggtctatgaggagcccactaatctttaatccatggccctaggttcaggggagggggttgggccagggcaggccatgggaagtgaagtggacttggggggagtcagaaagctttggtgtggcctcttgtgcccaagacaacccaggaggttcatggtcctgaagccaatgtaatctagggcccaaaccttctaatctcagggtgggcagaatctaggtgtagaatggggtgagttcaggggggctccacatagacagagggtgtgggaccctcaccttggcactagaagagttcaggcctcctcaaacagatggggctcaggacagcagaggggacagagagggctgctctgccagcatgtcccagaagtgcatgtggatatagagggcagcagctgctgagatggccgtgggcattaggctatgctggagtggggacacctcaccccgactatgccagctcgcaccgggcactttcacttcccttagtataggctccttgcactctgctacccacagtttgcatcagaagaaatggaagagacctgcttaaggtcacatcacacacccactggcagagcagggactctgcacagggtggtctaactgcaaagtctgccatcctgccattccccttggggctggaaaagaaaggtttctaacttgctttcaaagcgagttcctatcagccccgttgtgggcaaggtggggctgctacccgttctagagggcctgctcagtggagctggggccaagctgggcctctccagtcggctgcgggggcgcacccccgggcgctgggagtccaggcccggttttgcatcaggccctgccgaggtgtttcctcctcctccgtgtggggcagctgctggctgggctgcctgttgagtcagccttcttccctcacggctcttctcccggtccctgaaactcggctgccaggggagctggagccacctgcgaaggtgtcctcccatactggacccctacaggtaacacgtgtcggtgccagggtcccctgccagggtccagagacgcaggcactgccacctggtatcctgagcaccctccagcaccttggggttgggggaggtgggcacatgtctggaactggaacagctggacagatggacagaccctcctcttgaccaatgggtctgtcccaccgtgtcaaaacagcagagaagaccaaactcctacctaactctggtaggagattctgcctctggttggtaggagaggggacttcagggagggggcactgctgaggacgctgggctgatgcccatggcccagctcaggcaggcctgaaggacagaaataggctcagttctgccgaacgtccccccggcctccatccacactcagacacacacacctggtggcccccaaggcaccaggggacaccccacagcacacagcccagtcacacatacagcacaggaggaaatgcacaatgcatactgtacacaccccacacggcgctgtcacctagaaagtcactgaacacaccacacagacaatatagtcaccatgcagcatcacactgcaacaggacacaaagacacacagcaactacacagctcacagactcacgcaacgcagacatgcccaccagactcggacccacacagccacacaacagggcacagagagggacgtgggctcacaccccaatccacaggggaggccgaacgtgggctcacaccccaatccacaggggaggccgaacgtgggctcacacgttggccacagaagtccagggaaactgctgttgtggagcacacaggtatccacagagtgaatgcacaccgtgcagccgtgctgaggccttctgctcctgagggtgtcaagagggatcgctggggctcggccactgactcagctgggaggggacagagcatagcaggcggcggacacaagccaggacctgcccgccaagctgcctccgccggtctcagccccacctggagccgtggcaatggaaggggcggggaagagaggagaggccgcccagtgggctcaggacacagccctgaccaagtcatgggccccttgccacgtctacatgcccctcagcgctgggcaaatgctttctttccggagtcactgtggtacctgagcatgggctgctgcgctagcctaggcctccaccgccgggaccccagcctggtctggggagaactgtgtggccagaacagaggggccctgtggctccaggcaacagggcagggctggcggcgggggcatccctgggttggaggcctccgtgggagtgggtgcggcagttacctcaggagaggaagttgggggtgtgggctgaggaggaggttgcctcagacaggaaggccaagtgggccagggcagggtggaggtggtggcaggaggggacccaggctgtgaggttcctggtgcgggggagtgagcagatgtgtgtgtgtgtacgtgtgtgtgtgtgtgtatctgtctgtctaggtgggtggttgtatgtgtgcattcccatgtgtgtgcaggcatatttctgcatttaattaatcaaacttttaccaaccatctgttgtgtgcaaagtaatggctttgagggtgactccctctccctgcctccaaggagctcacaacccagttagccgggcaatgtatgtgtgccaaagtctgtatgatttttatgtacatctttatcgagggacatatttgtccccagacttgttcttgtctaggtgaacccatccgggtgggcctatccccattggtgtgcatatgctgtgtgcaggtttttttgttagtttttgttttgagacggagtctcactcttgcccaggctggagtgcagtggcgccatctcagctcactgcaacctccttctcttgggttcaagtgattctcctgcctcgcttcccaagtagctggaattacaggcatgtaccaccatgcccagctaattgttctgttcttttcattttttttggaggagtttcactctttttgcccaggctggagtgcaatggtgtgatctcggtttaccataacctctgcctcccagtttcaagcaattctcccacctcagcctcccgagtagctgggattaaaggcatgcaccaccatgcccggctaattttgtatttttagtagagacggggtttctccgtgttggtcaggctggtctcaaactcctgacctcaggtgatctgcccgccttggcatcccaaagtgctgggattacaggggtgagccactgtatctggccataatttttgtatttttagtagagaagggggtttcaccatgttggccaggctggtcttgaactcctgacctcaggtgatcggcccaccttggcctcccaaagtgttgggattacaggcgtgagccaccgcgcctggccactgtgtgcagatttaagaacatgtgtagggccgggcgtggtggctcacgcctgtactcccagcactttgggaggctgaggctggcagatcatgaggtcaggagttcgaggccagcctggccaacatggtcaaaccccgtctctactaaaaatacaaaaattagctgggcgtgatggtgcgtgcctataatcccagctactcaggaggctgaggcaggaggtttgaacccgtcaggcagtggttgcagtgagatgagatcgtgccactgtactccagcctgggcaacaaagcaagactcctcaaaaaaaaaaaaaaaaaaaaaaaaaagaatgtgtgtgcatgtctctcgtgggcatgggtccgggtctgtgtctgcagagggccctttctgggggaacagctgtgcatgcgcctgtctttatgcaggtgtctgtgtgcatgtgcgaccatatctatgcctacatggacccgcgtgtgcacatgtgtctgtgtgttccatcgctgcagtcctgtgtggccctacctcagggtgtgtgcatgtgtgtctcttgcttcttccactgtgtctccaagtgtgttcaagggctagtgtatgcatgtgtgcatgagtgtctctcaccccaccttgagctcagccatcctggggtggcaccctacccatacccggccaagtgtttggggagaaaagggctgttggttctaggatgtgccaagcatttgtgcagggcttgacctgaccctcggtctgcccccaggaagctccgtgtgcccagctggggcacagccccagctgatgccccagaggggccacccatcgcaagaggggctttgggctctgccctccctccccatggcgcatgggccaaagcctgagactgaaggactgttggacctcagcttcctgacagaggaggagcaggaggccattgctggcgtcctccaacgagatgcccgcctgcgccagctggaggaggggcgggtcaggtaaggcagggcagaccctggccggggagcaccaagaggcttgagtggcccccatcctgctccctaccgacaccactgcctgtcagatgtctgcgtggttcttggttttgcccttcagtctcctctggccttggccagctcacagctcatcacttctccaggggtgactgcaccagctttctcgccagcctccctgcctccaggcttgcctcttgggcccacctcctgcagctggtgctccccagatctgtctgcttttttttttttttcttgagacagagtttcattttttcgcccaggctggagtgaagtggcacaatcttggctcactgcaacctccacccctccgggttcaagcgattctcctgccacagcctcccaaatagctgggattataggcacatgccaccatgcccagctaatttttgtatttttagtagagatgggttttcgccatgttggccaagctggtcttgaacctctgatctcagatgatccacccgcctcagcctcccaaagtgctgggattacagacgcgagccaccgtgcctggccagatccgtccttaatatccccgctgaaaacttcccctggctccccagtatcaagggcaagctcctaggcatggtccac

SEQ ID NO: 4322 - DNA, 6000 bp, Homo sapiens
tggggttatttcctgcacaagtctcccgcttggcacaaactcacccacccacccaaagatgcccatatcccagagggtcctttatcagcccggcaccagcagagggcttcctccatcctcaccacagccctgtgtgctgggatctggagcccactgcagatgaggaccctgaggctcataaagagtggtgacggtcccaagtcacataataagtgacgaagcccagactagaagaccagactccaagtccagtgctctttccactcccaccacatgcacagctgcagccagtactgtgtgccagatctccaggggatgccctgcccttgagtgtgtccagctagcctgctggcctgacagctcctcaaggactggctcagtgtctcatttgcccaagtccttgcactgaccagcccatcccaagaggatctcacagctggtgcccatgagcatgcactatgccaacattgggcacgttgtttaggacattatgcggatgatctcaggtagcagaactatggaaaccccggctcagtagcgagtccatcattctcaaaaccccaccagctatgtgctattccagatgagaaaacagcagctcagagaggtgatacacagctggtgtctaagctgcagtctgactccaaaactcatacatttaactctgtcccctgttctaactcctgccatggtggccaagtgcccaggtgttgtcagatgagtgactcaaggaatgtaagaaacgaatgcacattaccgtgtagcatatcacacaaccacgcaagaatggtttcgttgcagtgttcaagctctccaagagaagagtagtctttgaaggattaggaaagcttcatgggggaggtgctctttgaagtgtggggaggatttacagaagtgaaaaggagaagggtactccaggtggcaggcacagaggtgggaaggtatgtggtgcattcattgcagggcacagggagaaagtgggacatggaatccgggaggccttcagggaggagatacatttgggcctgtctacctgcctttggggcaatttgcaggttttgagaagtagaaatgagggtctggagagggcatctgtgagcctcttctgggaacccctcccttgtaggtgtacattgtcggccacgtgcccccggggttctttgagaagacgcaaaacaaggcatggttccgggagggcttcaatgaaaaatacctgaaggtggtccggaagcatcatcgcgtcatagcagggcagttcttcgggcaccaccacaccgacagctttcggatgctctatgatgatgcaggtattcaacctggagggcaactgccagctccctccctccttctctccccagacccgctcagtcctgctgtctctctcctgacaggtgtccccataagcgccatgttcatcacacctggagtcaccccatggaaaaccacattacctggagtggtcaatggggccaacaatccagccatccgggtgttcgaatatgaccgagccacactgagcctgaaggtcaggagtcctgcggaggccagaggaggagggtgggaggggcttaaatgcatcaccaccttccctcactctcagcttatccaccttcccctgaccactgagcctcaggaaggttgagctccttccacccttctccagctcaggatcagaaccctggaggcacctgccaccgagtcagggcagtgcctcaccaagtcaccttttcccctggatgactgtcacagcttcatacctggtctccctgcctctggccctgccctgctatggcccatccgctacacaagagagaagaaactaatctcctatagcaccactttcatcttgtctccgtcctgctcaaaaaccttcagtggctccccagtgccttcaagataaagttgtgtctccttgacctagtactcaaggcttcccacagtctgacttcaagcccattgtccacattttccgtacacagacgaggctccagcccctaattctttgggcagtccctcacctcgtaggatgagcttgtggttgttgagatgaaaaatattattcctttatttatccaacaaaatgcattaagtgtgtgccattggccaggccctgttctaatctcagaagatatgtaaatttaaaaacaaagtcacccctctcctggacctgacatcttacaggagagggacaataaatatgtagaattaattatagtactgagagaagggctaaggagaaaatcaaaacagtgaggcgacagggtgacagctatgggaggtgtgtactgtgttagataggtgggaaggggaagtgtccacataaggtgccatttgagttctgagtgtattgagggagggagcccagtgggtatcttggggaggtggagggaacagcaagtcaaaggccccggggtgggaatgtgcgtggtaggttaggggaagagcacggaggccatgtggccacagtaagaggcacaaggggagagtgggaggggaggtccgatcttgcaggcctccatgaggactctggatttggagggttttgcgcagaagaatgaaatcctgtgacttataattttatggaatcatcatgtctgctgtgcagggaacaggctgtaggggcaggtgggggagcagtgaggccgtttggagggaaggacaaatcccagatgacaggatagtagcttgcccagggtggaggcagtgagatggtgaaaagtgccaggtcccagatgaattctggatgcaggatttgctagagtggatatgagctgtgagaaaaagggacgaatccaggaggcttccaaggctcttggcctgtgcaacggtaggctgtggctgccgattactgagataagtggcagggtgatcaggcttcggagggtcagtcagaggtcttgttttggacctgttacctttgggagggctaaatggcatcaagtgaaagtggacagggaaggggcaagttggagcttgaagaggtgaggatagagatgtgatctgggagtggagagaggacatttaaagccaacgactgcatgagctaacccaggtccttgattctagtaaaggtagattaagaagaggtctgaggggtttaaagagtggcctgttgtccacatgggcactccaagggtctgagcaaggggaatggcaggctgcaccatcaccccctaacaggccctccattctcctcagggagggagtcagccctgagcttgaatcctggctccaccactcataagctttttgatcttttgacctctgtgcctcacttgcttcatctgtaaaatgggagtaacagaacctcgcagggtttgaggaggactacatgaaataatggaatgttcctggcacagagtggccatgcatacgggcagctcctcttaccccgtctgcagtggcctgaagcaggttcataaatgtacctggaacccgctggactgatgaaccctgcagagtctagccgtgaacatgcacctgggtcctaggagtctacagttcataatctctctcatgcttagtgttgctctttttatgttgcttttatctattcattatgtaaatatttactgagcgtcttctatgtgtaccctagcatggtgggacctggggtaaacctggggtccaatcctgctaccactgaatacctgtatgaatacctgtatgaccctggccaagtgaattaacctctttaggcctcagtttcctcatttgtgaaacctaggtaataagcgcagttacctcattcgattcagaggatgtctgccaagcacaatgggtgcacagctaagtgctcaataactactagtggtcatggtcactgctctaaagaacttgggggcaaatgcaaggtgcaggatggggatggaagcagacaactgctcacagccggtctaccccaaaccctttttccaggacatggtgacctacttcatgaacctgagccaggcgaatgctcaggggacgccgcgctgggagctcgagtaccagctgaccgaggcctatggggtgccggacgccagcgcccactccatgcacacagtgctggaccgcatcgctggcgaccagagcacactgcagcgctactacgtctataactcagtcagctactctgctggggtctgcgacgaggcctgcagcatgcagcacgtgtgtgccatgcgccaggtggacattgacgcttacaccacctgtctgtatgcctctggcaccacgcccgtgccccagctcccgctgctgctgatggccctgctgggcctgtgcacgctcgtgctgtgacctgccaggctcaccttcttcctggtaacgggtaacgggggcagcgcccaggatcacccagagctgggccttccaccatttcctccgcgcctgaggagtgaactgaaataggacaaccgaatcaggaagcgaagccccaggagctgcagccatccgtgatcgcgccactgcactccagcctgggtgacaaagccagactctctccaaaaacaaaccagaaacagaaaagaaatgacgacccaagacccccctacaagcatacttcttttgcgtattatgtttaactcacaaaacaaagctcatcatgcgtttgattctgtgttgtgttccttttcttttcttttgagacggagtctcgctctgtcgcccaggccggagtgcagtggcgctatctcggctctctgcaacctctgcctcccgggttcaagcgattctcctgcctcagcctcctagctgggactacaggcgcgcgccaacacgcccgactaatttgtatttttagtagagacggggtttcgccatgtttgccaggctggtctcgaactcctgacctcaggtgatccgcccgcctgggcctcccaaagtgttgggattacaggcgtgagtcaccgcgcccggcctctattcccttccgtatggaaatgaggttaactcatttgcaggaacctaacgcccgccctcccccgactcggatcgctggcgtgaacccagcggccccgtgctctccgggtatccctggatcgaggcgcacgcgttgttgcaaagtctcgcacttagggattagaatgtgcctttgcgtttcgttttgttttgcaacaatacaggtgtgagggatcgcagccctggtccaggctctagtctccccgccctctcgctttcttgggcctccgggcgcctcaaaggtaaaactaggccatttgaagcctgcgaagcgaagggcagtcggtcttcaggcctagcgggcttggctgggctgggtcggtggacccctgggctggcggcgggagcagagcatcgagcggcttttagctggggttcgggcggaggacctgggacaaccgcgggcctcgctcctccccggacggggcgggacggggaagtcccgcccaccaggcccaggccccgggccgccccgagggctgcgcccacctccttcctgcctcggcaaccccgggccctgagggcaggccccaaccgcggaggagcaggagagggcggaggccggcgggccatgccctggtcgtcccgcggcgccctccttcgggacctggtcctgggcgtgctgggcaccgccgccttcctgctcgacctgggcaccgacctgtgggccgccgtccagtatgcgctcggcggccgctacctgtgggcggcgctggtgctggcgctgctgggcctggcctccgtggcgctgcagctcttcagctggctctggctgcgcgctgaccctgccggcctgcacgggtcgcagcccccgcgccgctgcctggcgctgctgcatctcctgcagctgggttacctgtacaggtgagtgcttcgccccgggaggggaggagtgtcggagcccagcacctccgtcagctgggtcacctgtacaggtgacacgccatatgccgggaaggggactgggagagggaaccaagtcctgtgggcgcctggcctacaggtgagcgtgcagccctttacggaaagggaatcccggtagactgccttcattctagc

SEQ ID NO: 4323 - DNA, 6000 bp, Homo sapiens
gccacccagaccctgaaggagggggcccatccagaggagaagaggcacaaaggctgaggacctggatatggggaacaggaggtctctgggtccctccctgggcatgagctcccagaggccactgctgttggcccaaagacaaaaacaccacagccgctcagtggcctcctaggctccgccctcagaatccccctttccaaaagcacagcccatctctgctggcctcccctcacccaccccacacctcggcctgctgcctgatctctgctcttctacaaagcacctctgccttccccagagttttcctatccacgtgcccaggtctgtagcggcattagcaagaggaaacccaattacattccaattactctagtcctagccagacagaggttactgtaagtcacagcaggatcgggaaggaggaggaggtagcacctggggccagtgcctagggtgacacttgaagatggatatgacagggacctgtggctcagaggctcaggattagatcaacaaggctggggctggctggtttcgggaaagaggtcgtgggggcccctgttgacagacagctcaagcacagcaaagccctgaggccagccctccctgggcagaggaggcacaagggctgggagcccagcctggacatggaggacctgaggtccctagggccctcccttggacatgggcatttggccagggttcccagagccagtgctgttgtgcccgaggaccaaaatcctgcagcttcttgtaggtcttctagaacactactggttcccaccgccccgcccccaggattttctctgagcatacacccactctctctcatgcccatctaggccaaataactggcctctcccacccttaggctgtggctaaataggccagattcaggaccagaggggctgcgaggcctagtgcctccaggccagcgccctggctcctgctgctggcttgaaaatccctggccagcgtctgataggggagacagggagatctgttgcttgtgatggcaggaatctcttaggatatcccttgacctggggagcagccatctttggggcaccaacggataaagggtgggggaaggttggcaattgagatccctcttaagtggagatgggactgactctgtgacattgtatactggggggaattctcagccatgatttcctccctacacagacatgcaccaccctgtatcatgacatgggggagcctggcgagccccttgcccactccaacccatggtatctgggaggccctgtaatatggagatctgcactctgggctaggttctaagcctgggctgtgctgggcttggccagtgcctaccgcccacacagacaaacatggatctgtaccttccacactgcgggctgaaccttgtttgccgcaactgttattggagtgtccccacacgatctgcctcccatccccctacatgctgcagccccctctgcagcccctacatagcaaacaatcacagctccaggtaggggggagaatgtggggggataagatgagtcattgccgtgggaacagatgtaccaagttccacatatgcacactcacagaaccttacacacaaaggcatggccacactcacattcccacactcacagggaaacacgctgggaggccagtgctagtcaaagccacagttgaacattcagatccacactgagaaacagtcatctcctcacacatacacattccccatagacacaaacgccaaaacacagggacagatcaagacccagacagacacatcccacccagagtgacctccagtcatcaacccagagcccaccccctgctcatatgcacagtcagactcaaacacactggattccctagacacacaccacagcccttacttgaattcaagactcaaacacaaacacacactcatgcacacatatgcagacatgcacacacccacacattcacacatgcacacacgcacacacacacacacacacacagcagcccctcttctgagtcccttcactcattctcctacctcggccagcacctagggaagacaagacatcacacaccatgcagatgccatacctgcccaaggacaaagttctgccttgggtttagcttcagtccatcctcctgttctgcagaggttaaggtcactggccccctcccttatgctgctccagttcctctcccacacctcctatgcctaacggcgcatcttcagagcctttgaaaagggctttggctgcaatgggaaagatggtggttgcatcccaggagtcacctcccaggagggaaacagtgtgagtttcagagggtgacatgttaggaatgtcctatgctgagctaggggatggccaaggtgactgcatgatgctcaggcagtcacccttcacctacctgtgatttccagaatccccaaccttcaaacctttgcacctgctgtttcctgaccttgaatgcctctcctcgaataccacaatcccccttgcaggctaccttcttattcttcaggtctccatggagatgtccctgctccaggaagcctgttctcatgccctggctgagtcggtctgtcctcctgtgccccacagcccccagggccctcacaccctcctcacaccacaggttaattgcctgggtgtgcacctgcctcccccaccagccagagagattttgcaggggagggagactgtgtctggtgagagaggctagaggcctgagaggggcagaggctcaaagcccagctctgcctctgctgtgcgaccttgggcaagtcattgcgccatgtggatccagtgtccttatctgtaaaatggggacaataacgaccacctcaccaggttgatatgaagattaaatgagagcaggcatcatatgcattatccaaacggtagctgtattattagaactcactgcctagcacacagcttaataaatcgttatttgtggaattaacgaacccccacttctgtccccaccggcgtccttgatttttggggggaacagtaggtataacaaaaagagaaactgggggcagataggatggggggctgggagatgggagaacaggcttctctggcatcgttgggagctagctgttacagcagcatccggagctaggctggaggcggtgcaggcatcctctctgtctcacccctgtgacccacctgtgccatcctcctcctcagttaggtgaggcagcaaggagaggcggggctgggctccacctctgcactgtggccctctgaagctgccaggcccgccggcacacactaagtgcgcccagaatgcggggtggccaggggcataaatgttgaatgaatgaggatggaatgaatgaacggatggacgcatgaatggaggtgggatggaagcttgaagtgggaggctagaaggaacgagcgtctccctccgccctgcgggtctcggggctggaagacagggagccaagaccgtctgggggctcccaccccgccctgcccctcccgccggccctccctccccgcagcgcgcagcccggcggagcccgcgccgagccacagcccgcgcagttgccgcggatcgtgctgagccccgcgagccgaggcagcgcagcctagggagggggctgccccggccccctcctgcagtcccggcccctagaggctcggccttcctcgcaggaaggcgaagtccccggtgccaggtccggggaccagcagccgagaacgcccgggtcccggagccaacaggtgcggggtgtgggggacccccaggcctgggatgggggttccaaaggacccgcggcgagggatgggaggagccaagagtctcggggggtaacctgggtgctgggagactggctcctcggccagcgctgctctcctctaggcaggctccgagtgccctcgctcccccgcgccttcccggagccccgccagcccccgaggtgcaggaaggtcccgcggacggagcgggcctgccggcgttcagtggggtatgaaggcgtcccctccccttccccaggggtctccagggatccgcaaccctccggcacctggccggggtcgtcctagcccagccgggggaaggaggggctgagtgcgggaggaggggaggggcggggagctgggctggctggatttatgaatggagagcgacccgcgcgccggaacagcggctcctggcggccgtcggggagcgtcgcggccctggggacccaaaggggcctcttagggggcctggatgctccccttgctcgcaaggggtcgtcagtccctccgcgcaccacccccactgtgtgtgtgttgtatgtgtgcgtgtccgcgagtgcccaccggagggtctggcaggtatggcgggtggggcttgggtctctaacacctcccttggcccgttttcccaacccaaagttaaagcctctgaactggctcaagaaatatttgcaatcgggatggcttctcctcccaaatctacggtgtttggtgggttcgaacagacctggcttaagagctttgtgaccttgagcaagagactcaatctctctgagcttcggtctcatctgcaaagcagggtaccctaataatggtaaccggaaacgtccccgaaactaccttctcgtaccaggttcttggtgaagcacttggcacgcatcggagctcattactcctcatcgtggtcctgtaaggtatgtagggctgtcaccccattagacagatggggaaaccaaggctgaaagaggccaggtaagctacccaaggcaactggtgtggaattgggatgcaacccaggtctgtcttcctccaccaatttcatgactgtgagaattaagagggaacttatacgcaaagcgcctggcacaatccctaatgtttccttccttctctcttttcccactccctcctttccttcctcccttcaggaagtttgaggctgagacccgaaaagacctgggtgcaagcctccaggcaccctgaagggagtgggctgagggctggcccaagctccctcctctccctctgtagagcctaggatgcccctctgctgcagcggctcctgagctcatggagccctcagccaccccaggggcccagatgggggtcccccctggcagcagagagccgtcccctgtgcctccagactatgaagatgagtttctccgctatctgtggcgcgattatctgtacccaaaacagtatgagtgggtcctcatcgcagcctatgtggctgtgttcgtcgtggccctggtgggcaacacgctgggtaggtccagggcttgcccggcagtgctgccggctttccctggggattgaagggggttgtgtgggaggagggctcgctgattaggcagaactaggatgggtgtggctctgccaccagcttcacctcgctgcaccctgcagtctgcctggccgtgtggcggaaccaccacatgaggacagtcaccaactacttcattgtcaacctgtccctggctgacgttctggtgactgctatctgcctgccggccagcctgctggtggacatcactgagtcctggctgttcggccatgccctctgcaaggtcatcccctatctacaggtgagctctgcccaggcacccctcaccactccttgtcacgcctgtaaaaaacccacggccttgcataggtctcagtgacccccagacttgcctttcagacaggtcagtggctcatgacccctgaagtgtcatcctctgctgctagcaagggcaagccaccagatcagacactcgaggacacagacacaaccccacacactcacagagatcccctcctggtcacagccacagacatatacatagacacgtgtggacatgtatagtcacctccaggtacacaggcacacagtcaaggagagaggcaacagcccacagtgacacatacacgacaccctaggcctgctccccaatcccaaaggggcagacgtgaggggcctgatggaaacagccgtctcctctccctcctgcactggccaggaaagaccccagtggtggaaacc

SEQ ID NO: 4324 - DNA, 6000 bp, Homo sapiens; identical to SEQ ID NO: 1490

SEQ ID NO: 4325 - DNA, 6000 bp, Homo sapiens
tgcatgggtcttaatggacacacccccatctccaggaatcaggcagaggactcgcgggtgaggaagtggggaccccttactctgcctagcagtcacagtccttacgcggaggtgaatctgattctgtgagttcatcaggccaaattcaccagcagaactgacaggagcagcatttcccacttgatgtcttgacaaggctgttccacaagatgataaatgttatgtcaggaggaaaagggcttctgtgggcaaatgagtttgggcaatgccacatatttcatacctcttttggtgaatttattagtgagtttattagcacggttgagcaaaagaaccctatttaactttactaaacccaatgtttgccaacttttcttgacacagaatcctcttctctcacttctcctattgccaacctatgggacagggttccagggaacactgtttgggaaacactggaataccaggttactctaggaaacctactgtatgaagagaatttattgctgcctgctttagctttcagctggattgcattgagtggcacttgagcaggactctgcctggctaattacagagtgttagaccagatgggggcttggggacaaggttccagcctcctttccagtcccatccctgagccaagaaaaggacaaagagcaggttcccctggggaaggggctgtctgagaagaggcagcagtgctcagaaaggagagaaccatctcaaggctcagcccccctgaggaggagggccagggttgaaacagagggagcaggcagaatgtcccagctccaccagtcttcactctgcagaacctcaagaccagagcctcaggcccggggaggaatgagtggctccctggacctgcccttatccactggtattggtaagagctgggttctggacttaattacctatgctcaaatcccagccctgcacctaatagttgtgtaaccttgtatataatgccactaaacctcagctccctccctctacaaaatggggacagtagtagaacccagctcctctagtgatggtaaggatgaaatgtgatgacatatttctacaaagtgctcagagcaagtctgtgataaatgtaggaaatgattgttcttgtttccctgcagtagcagctgacgcgtgggtccaccatgaactggagtatctttgagggactcctgagtggggtcaacaagtactccacagcctttgggcgcatctggctgtctctggtcttcatcttccgcgtgctggtgtacctggtgacggccgagcgtgtgtggagtgatgaccacaaggacttcgactgcaatactcgccagcccggctgctccaacgtctgctttgatgagttcttccctgtgtcccatgtgcgcctctgggccctgcagcttatcctggtgacatgcccctcactgctcgtggtcatgcacgtggcctaccgggaggttcaggagaagaggcaccgagaagcccatggggagaacagtgggcgcctctacctgaaccccggcaagaagcggggtgggctctggtggacatatgtctgcagcctagtgttcaaggcgagcgtggacatcgcctttctctatgtgttccactcattctaccccaaatatatcctccctcctgtggtcaagtgccacgcagatccatgtcccaatatagtggactgcttcatctccaagccctcagagaagaacattttcaccctcttcatggtggccacagctgccatctgcatcctgctcaacctcgtggagctcatctacctggtgagcaagagatgccacgagtgcctggcagcaaggaaagctcaagccatgtgcacaggtcatcacccccacggtaccacctcttcctgcaaacaagacgacctcctttcgggtgacctcatctttctgggctcagacagtcatcctcctctcttaccagaccgcccccgagaccatgtgaagaaaaccatcttgtgaggggctgcctggactggtctggcaggttgggcctggatggggaggctctagcatctctcataggtgcaacctgagagtgggggagctaagccatgaggtaggggcaggcaagagagaggattcagacgctctgggagccagttcctagtcctcaactccagccacctgccccagctcgacggcactgggccagttccccctctgctctgcagctcggtttccttttctagaatggaaatagtgagggccaatgcccagggttggagggaggagggcgttcatagaagaacacacatgcgggcaccttcatcgtgtgtggcccactgtcagaacttaataaaagtcaactcatttgctggttccaggtgccctctggttgtgcggccttcgtgaccctcacacgttcatggtgtcaatctctctgcccccgtgaagagctgcacttgatccagcctgtgaggggcatcctctcttccagaaagggggcccccagtactccaggggacgtgctacttgctcatgctcccatctagcctttatcccccatggcaagtttagtcctgtgggttgtctgcagagagaatggagcttagtccatgttgcagtgggaagttcatgaacttagaatgcctgtgtcgaatccaagttccaccgggactctgggaaagtaacttaagcttctctccaaaatgggttaataatacctagcctgtggggttgtgctgaggactgatgagctcatggctgtggacagggctagccagctgtaaaaggacacataaatgttaatcattggtattaggaagtgcttgataatgcctgtgagaaacgaggcagaaggcccctccctagctgcacattaaccttcatcatcccagccagaacacaggtcccaggccccccaccagcatatgtgaggtcacactccagcctccctggaggccttccccaggacccacagaggatggacagcgatgctgtgcctggccctgtgctaactggggcatttcatgctgctgacctgcattccttgcctccaccaaggctatgggtgccctggtctagaaaagtcatagttgacccctcccatttcctacacaatccaagagcttccagactccagtcccagaaatatcccaccaccagaatgggatgcgttcctgcactaaattaaggttgcccctttccgtagatgtcagctgctgagacctcagtatcaggcttcccaggaaaagggcaggagagagggcaaggaggcagggtaaggaggcaatgggaaggggacagggtcaatcccactggtgctgtcctaggcctaggcataatgatatcaggctcctgaaccccacacagcagtctcacccacatacctgcctgcctgggagccaggctcagccatacccagccaggctagagaggaggcgtgggccaggagagaagagccgcaggtgtttgctctgagtatgtgcccggggaagtccgccctcctgcctgcccacccaatcactctcgcttggctcattggcccagaaagccccacccagcaagggagagaggaacaaaagctgcctccgggaggtcctgaggcaaacagacaagcccaaggacaaggaagcagctactggacccaagaagggtgaggaccgaatagggcaggaggctggccaggaagcaagcaaccagctgagctgaggatatccaagggacctcaggctgtgggctgggcttcagggagggagccagagggtcagtgtccctagaggatccccagggaagtgccaaggaggagaaggaatgtcctggctgacctaagggacgacagaagattggggaagagggggtatcaggaagaaatgggtttcagttcagtttaacaaacatctattgtgtgttcactgggccaggccagtgctaggtgctagggagacagaggtgaagagcctgccctctagcagctgacagcctggcaaaaaaataagacaggtaaatagaccatttgggtacaggcgatgcctcttgctctgaaagtgtcccaggcacacgatgtctgaagaggctgagagcagagtcagggattggggatggggaaggaggagggtaggaggaggggagggttggacatggggcctgatggggactccagacaagggggtgtggaggtcagagtccacaggagaggggcctgagaggaaataatggaaatgcggctagcaaacagccactaaatggacagaggagggggtgcccccagagaaagtaaatggggggtccagaccatgccagaatccatcctcagtccttcctaaagctggaatggttggaattccagaggaacccactgtggtcaagacagtcagccctcaggccccagcaccagtacacgggttggcagggatgatatcaagtccccgtgattccaaagcacctctgtttagtttgggagggaatgccagggctgagaaccttcctggagccagaggcaaggagtaaggatgcagattgttctgggatttaccaaggggctgatgtgaacgtccccaacacggggccaggctcttgttggtgttcagtaaaagtgggatggatctgacaactgataaggatacgttcccacccctcctgccctggcccagccctggcagctgatgggagagcagatcgtccaattcaagccttcctacggtctctttagaagacatgggctgaaacttggggtaatagaggttggctggcatatccatgcaggatgattgtcttcacatgtatctattaccttgtagaataaggtagaccctgattttggaacctgaagaccaaagtgcaagattagctctgctacttccatctgtggaccattgggcaggtatctctgggccttcacttactctttgtgaaatgaggacaggggcaatccctaccctaccaagtcattgggagtgaagacatgatgacacggtgattgtgaaaagattttgtcaatcgcaccagcattaagggtgcccatctccaggttcccccaggcctcaaggctcccaaggcctgagtgggcaggtagcacccaggtatagaccttccacgtgcagcacccaggacacagccagcatgaactgggcatttctgcagggcctgctgagtggcgtgaacaagtactccacagtgctgagccgcatctggctgtctgtggtgttcatctttcgtgtgctggtgtacgtggtggcagcggaggaggtgtgggacgatgagcagaaggactttgtctgcaacaccaagcagcccggctgccccaacgtctgctatgacgagttcttccccgtgtcccacgtgcgcctctgggccctacagctcatcctggtcacgtgcccctcactgctcgtggtcatgcacgtggcctaccgcgaggaacgcgagcgcaagcaccacctgaaacacgggcccaatgccccgtccctgtacgacaacctgagcaagaagcggggcggactgtggtggacgtacttgctgagcctcatcttcaaggccgccgtggatgctggcttcctctatatcttccaccgcctctacaaggattatgacatgccccgcgtggtggcctgctccgtggagccttgcccccacactgtggactgttacatctcccggcccacggagaagaaggtcttcacctacttcatggtgaccacagctgccatctgcatcctgctcaacctcagtgaagtcttctacctggtgggcaagaggtgcatggagatcttcggccccaggcaccggcggcctcggtgccgggaatgcctacccgatacgtgcccaccatatgtcctctcccagggagggcaccctgaggatgggaactctgtcctaatgaaggctgggtcggccccagtggatgcaggtgggtatccataacctgcgagatcagcagataagatcaacaggtcccccccacatgaggccacccaggaaaaaaggcaggggcagtggcatccttgccgtagcagggtggtgaggagggtggctgtgggggctc

SEQ ID NO: 4326 - DNA, 6000 bp, Homo sapiens
agagtaagttcaagagaagatgaaagagaaaaaatggagataatgaatcaggacaagtctttggatagattttgctgtaaaggagtggaaagaaatgaggcagatgctggaaggagaagtggggttcaggttaaggtgtcttgttgttttgttgttaagatggagaaatacccacatggtaacaggaaagatccagtaaagagcaaaaggtcaatgatggaggaggaagagaggaggtggagggaggtgcctggtgggtaagaaggggtgcgtgcatattagaatggtatggttggctcctgacagcagctcagcaaagtcacgtattacctccattcgaggagcaaggtgtgtgggcagaagtttcgagcaactctaggtgtcttggaaaataagcaacactccagcccagggcctccctggaagatcgcctcctccctgcctgcagccccagacatgcctgagcagggctcaaaagcccccatccctctgcctgatctgtttcccatggcttctgcctgccccacctctccactcaaggaaggaaagggcctcatgcctctgctgcagacacacaaagataaggaaaactccagtctgagaggtggcaggggtggggggcggggtggtcttcccatctcaggaagcacctgcctgaggcctgggcagagctctaggtggagaggacagcctgggagcagcaccgcctgggccagggccagggccagaagaggtacaggctctggccctgccacccctagagagcaggtgtaagccctgagggcagctgccaatccctggtgcaacacagctttgtcctgaggcagggggatggcctagatggcctcctacacattcccctactcagggagcagaaatttagggcaggaccacaaggcattaaggttctcagagccattctctctggaatggggaactcttccagctcactccagaaaaagcaaaggccagttgttgggggcactatctcatatcaagagtgaaaagccagcatctggcagagtcagaatgacaggacctaggtgataaaatcacctggttaccagagcagaataacccaaccacacacatagacaccactacacaccaccacaaccacatatgcacacagcctcccacaccaccccagccatctccatcatcacacacattcacaaccacacatgcacacagcctcccacaccaccccagccacctccaccatcacacacattcacaaccacacatgcacacagcctcccacaccaccccagccatctccgccatcacacacgttcacaaccacacatgcacacagcctcccacaccaccccagccacctccgccatcacacacgttcacaaccacacatgcacacagcctcccacaccaccccagccatctctgccatcacacacgttcacaaccacacatgcacacagcctcccacaccaccccagccatctccaccatcacacacactcacaacaacgcacatcaaagcctacacacacgtggcccacataccacccttaacacacagctctccaggcttacacacacagaaacagttctcgcacataaccttatgtgcacccagtgtttacaaatagtgactgagagtctgtacattccaggccctggtaatgtggcaggaacgtgaccagggagctccctgctctcctggagataatttcagagacggctgtgaagagtgtctgctgaggaagtggagcaaggaacatttggggtgggggtgggggaaccagggaacacctctgtaagaaggtgagacctgaataaggaggaggaagcttccaagtaaagagtcaggagaaggcagtccaggcagagagaacagcaaaggcaaaaaccagaaggctgacctgaatgtggcttgttcaagaaccagaaagaaggccactacagcgcccaaggggatgagagatgggggagaggcaggactaggtcgcctggtgccttggggctcaacgtcaagagagtggatgccagtctaaagttaatgataagtcactgtaaggttttaagagggaagtggcatgatctattaggttggtgcaaaagtaactgcggtttttaccattactttcaatggcaaaaaccacaattacttttgcaccagtctaatagatcgttaaaacactacttcagctagaagcaaccacgggaaaaaatgttattgcagtcctcagagtggtgaaggcatttctaatgacaacaaaacccaagggccataaaagataatattaatacactggactacataaaacatgtttaattctgtatggcaaaacccccgtctataaagtcaaatcacaggtgtcaagaagcagcagaggcagagggaatcctttctatttgtatcacagacagaggagggcttatttctttagtatgtaaagagctcctgagaaataaataataaaagtcaaccatccaatagaaaaatggcaaaggcaaagaactgttcacaggataacaaacaaaagcggcccttaaatatgtgaaaagatgctcaatctcactcataccaagagaaatgcaaaataaagtatgatgagatatcattgacaaagatcataaagcttgataacgctctctattggtacgtatatggggatacaggcactcccttgtcccttggagtgcaaactgaaacatctgtgaagacgattgggcaatatgtatcaaaattttaaatacacatacaactttaaagcaaacatttcacatgtaggaatatgtcctgtagacacaattttcaaatgtgttcaataatgattatccaaggatagtcacgcaatggtatttgtaatagaatgaaataaaaaagtggaaacagccttttcatcagaataggactgattaaatagagtacatatactattcagctgtttttaaaatgagagagcaaggcagctccatatccactgatggggggaatgtctcatattttgttaaatgaagaaagcaaagtgcaaaagagtgcagatagcatagcacacttccataggttaaatgtaaaaagaatatatagttgaatatgaacaggtgatttgggagtaagaacaagaaactagggaccctggtgttcaggtaggcagctccggttacagtctggtgttcagggagaagtcacgtccggtgttggaaatgtgtgaatcatcagtgagtggatggtatctagagccccaggactgggtgagctcacctgggaaggaagagactgggccctgggacatgcccaccttagaggccaggatgtgaggcctgtggtgtcaaggaagcacggggaagaaagtgtttctagaaggaaggagtgccccattgtcccaggtgcttctgaaggtcaagggtcatggggacagagctgtgattgctggatttagcattatggagatccacggagactctgataagccgtttttagtgacatggtagggacaggaacattgttcaaatgtgtcaaaaaatgactaggaggggaggtagcggggagcaagtcttgctctgacagggagcagagcagcaggcggcagagtccagggccccacaccctcatgctcacttccccgctgcccatgcacagagcatagcacatgcacctgagccacctggcactcctcaatctcagcaaagattttcaagggccacgaccccagtgagtacaagggagcctctgccctgcggcttttctgtatctggaaacaacactgctgaggcctccagagctgggtctgctgcttattatctgtgtgaccctgagcaagtcacctcacccctgtgtgcctcagctttctcattcataaaagtaggagggattggaccttcctcatctggatgctgccatgatgaaataaagcatgtgggacagtgtcgggtgcaaagatgccgctgggctcccaactcagtgctcattctctaccaaaatgaataggaggagggtgaccataattgatgctcctaactttggggcatttttgaaagtaaaagggggcattgttaatgatgccagcactgcaaacataaaccagtacagtcctgggcaaacaccatgtggagccaccatagtgccagcaatatcatctctgtggagacaggactcgggccccaccctaagatccagggactcccaagggaggctggaaaccctggggttttccaaaagaggctggggcactgcaggcttttattagttcctagtcaggacacactagtaaataagacaatgtgtccttatccccagggcacagcccagccccaccccagccgcagacccacctgctttggcagaggctatttactgcaatggtatttgtaatagaatgaaataaaaaactagaaacagccttaatttttatcagagtaggactgataaaatatattacagtacatatactattcagctgtttttaaaatgagagagcaaggcagctctatatcgactgatgggagaaatgtcgtattttgctaagtgaaaaaaagcaacgtgcagaagagtgtagatagcatacttccacaggttaagactatatagttgaatatgaacagacgattcaggaaggaaaacaagaaactagggaccctggtgttcaggtaggcagctccggttgcagtctgcccctctgagtcactccaggcggtgacctcccccaacccgccctcattcctgaacttctttcctggcacaggactcactgtgccccttcccgctgtgggtacaaggtctgccccccaccccagctctccaaagcccaccggcctccctggaggccgaggtcgacggcccgtcgcaccgggagggggggctcccaggggtgccccacgcacggtcaaggtcccgcgccaagcggggaccgggctgggccggaagcgggcacggtactcgcggcaaactagcgtgggcgagtcctgattgcagtcggacctgccgccgcggcacttaacagtttgcagagtgcttcccgcccctgatctcattggagccttcggacagcccagcccatggccaccgatgcccccatttcacgcctgaggaagcggaggctcagacgggccaccagcccctccggaggctggcccgggagcgcctggcagcgtcgggtctaggagccggctccctcctgctccctcctccgcgccgcccggggtgtgcccgccgtctgtgtgcaccactgctgagcccagctccggcgccctcgcctctgctgtgggccccggggacgcggggtcaggccaccgcgttggccaggccgctgcaggtaagtgctggacggggcggggcgaggctgggcgggaccctcaggggcgccaagcgctcctggcgaccccctgcggcagggctggggcttgagcctgccagtgcgctgggatggggcgcgaagcgggggtgcggggagcccgccaccccgtacctctcaatcctccctctcgcctctcaattctgggcccattaggggtcccggctgcgggaaggttccgagacaccccctccccaagtccgcaagctcccaagctgcctaggatggagggaaactgggaaggaaagggagctttatccttcagggacattgtggggcgggaggtagggctgggcacagtacagtctgggggtcagggaaaaaacggttgcgctgggagctggctttggagggcagctgggggaaccagaaccggctccaccagtccccagcctagacttgggaaggaaattctttgccagtgaagctcctccctggggtgtgtcaggagggactgggcagacagcacccaagggtagaagatgggggcccaggagggagctgcaccctggtgggcagccatgggagtgtgtcaggtggaagcagccgtcagggtccctctctgctctctgtccggacagacagggctccaaccttcacttcagttcttgtgaactcccaccaggtgagtagcagcctgggagggaagagtctcaggattctaccagaaagtaggaat

SEQ ID NO: 4327 - DNA, 6000 bp, Homo sapiens
ttcaaatgcatttatagatcattcagaattcatattaaaactacccttgatgcttatttaaatactggacttttaataatagttgctgtggcctttactaaaagcattataagtccttaattatacattatttattagtattgggaattggctgaaagaaataccatcccaggtcaattagatcaacaactacagcatatgtcagacagtggtaccaaagcatgtcttttgggaaaacaaggtttatgtctaagattgaattagttgtagtaaagtggaaatacctggaggtagtgttaggggagccttttgaaaagcaatttattggggctgagtgcagtagctcatgcctgtaatcccagcactttgggaggccacagtgagaggactgcttgaggccagcctgggcaacatagtgagaccccatctgtacaaaaaattaaaattagccaagtatggtggtgcatacagtcctggctacttggggggctgacatggaaagatcctttgaacccaggagttcaaaaattcagtaagctatgatcataacactgctccctagcctgagtgacagagtgagactctgtctcttaaaaaaagaaaacaatttattaaagcaatgattttcaaactttagtgtacatcaggtttacctagaaactgctgggccccacttccagcttctgatttggtacatctggggtagggcctgagactttgcatttctaagaaattcccagatgctgttgctgctgtccagagaccatatttgagacccatgatattaaaccaatccaatgtactggtaacagtctaaaagatggatagtttaaagtgtgggtgagattgtgggaaaacagaaacactggagtactgctgatgggagtgtaatttgttataaacactttaggaaatatcctgataataccaaataaagttgaagtccaccatggatggatctaagaaaatttagaatataaaaagcaaatcatagactgataagtataatatgatgtcatttatatacattctttaaaagcatacataaatcactatattatttgtagatacatgtatgaaaatgggaattagattggaagggtacccatgaaatatgatagtaccaaaacccctcaaaccatgaggaactatgtctgaaccagtgggaatattgtgcttctagtcaaggaatgtgattgatcattgtgttcctaagctgctgtcctacagagagaaaaaataaattgattcctcttgacaaatgagttccacaaagttgtatgtgttttgggcggtagaattcttaaacatgcattcttctcaaattttgagctgcttcctagctcctaatgtcctggttatttagtgaatgtctgtgttcactttatctgcccaagaccaagacaaagggtggtgctgaggaagagccttctcctgtgaaagccgggcccctacctcacctcttcctgacccagcaaagacacagataatcccattctgttccccagtttagtaagtggacatgactctccacttctgtgctttgttctgatggaaaaggactattttctttcacagaaaagacaattatggagccatattaatgtggttcaaattccatttctatcactcattagctgttggatttcgaacaagttttttttttttttttttttttttttgagacagggtctcattctgtcacccaggctggagtgcaggcacgatcatggcccactgcagcctcgacatcccaggctcaagcaatccttctacctcagctcccccgagtagctgggaccacagaatcatgccaccataattggctcatttttgtatttcttgtagggacaggtttcaccatgttgtccaggctggtctcgaattcctgagcacaagcaatctgcctgccttggcctcccaaagtgctgggattacaggcatatgctaccatacccagctgtttaacctttctaagtttagtttgtgattttgttgtggtcttttgacaaaaggtttttttttgttttgttttagaacagctttattgagataattcatgtaccatacaattcatataccatacaattcatccatatatagtgtacagacaaaaatgttatattaaccacctaaatttagtatctcaatggttagtactcatctaaatgcataatttatgctaaatgtgaaataggtctattttttaaaaaaatattttattttgttattttattttattttattttattttattttattttattttattttatttgagacagggtctcagtttattgccttgctggagtgcagtgtcacaatcacggctcactggagccttgacttcccaggctcaggcaatcctgtcacctcagtcccccaagtagctgggtctacaggtacgcactatcaggcccagctaatttttaaattttttgtagagatggggtctcaactcaccttgttgcccaggctggtcttgaattcctggcctcaagcgatgcttctgtctcagtctcccaaagtgctgggattacaggcatgagccaccgtactggcctcttttgtttttttaatagagatgattattttgtcctttctttctttataccatgctttctcatatgatagtttctagtactgttcaactgtgatcaaagtatgctttgttttatagcttattcttctctttggaggaataccttatctctggagactttctggacggttctgtggttatgctggctttggaccagaatatgaggtatgtgattcattagcatgtatttgtcatggtatttcttttagcttggcaggctttccactaaagttaattttttggcttctgccaatgttaagatttgcctctctgtttgcatagtccttggttacccatgctgtattggcataacattagttacaataacaaatcccagaatatcacaggcttatttgcaatggtttatttctcaatcacgtaatagtccagtgtgagtatttttagttatcaggtgactttcttccatgtggtaagccaagaatccaggctctttatcttagggatttgtctgtatgatttaaggtacctttcatatagtgcctgtgtaataaaaaaggaattgttttgtttctcatttacttctctcaaaagtaaacttttttgaaggcagggatgatatttcagaccttatgttatccatagaatcaagcatattgcttgggatgtagtaagtaagtgctcagcaaatacttgttgatttgtttgccagtagttcataaaaactggatttttgttttttcttttgtttagatcactcagtccctggtgtttctgctgttggctacacttttcagtgcattgactggtttgccatggagtctttataatacttttgtgatagaagaaaaacatggcttcaatcaacaggtataataaagaatacaaatgttctcttttaaatgtgaaaaacttctgtgcttttgtcctgtactgtttataatttaaacataatttactatttcagagtatgaattgagaaaaaagggaactacagatatggtaaagatcatagctgaaagtcttgggggccgcggtggctctggccagttgccctggcactcggggaggcaaggctacatgttcgaggccaacctggtcaacactgattttaaaaaaaaaatacttaaggccaggcccagtggctcatgcctgtaatcccagcactttgggaggctgaggcgggtggatcccaaggtcaggagatcgaggccatcctggctaacaccgtgaaacccgtctctactgaaaatacaaaaaattagccgggcttggtggtgggcgcctgtagtcccagctactcgagaggctgaggcaggagaatggcgtgaacccgggaggcagagcttgcagtgagctgagatctcgccactgcactccagcctgggtgacagcaagactccgtctcaaaaaaaaaaaaaaaaaaaaaaaagaaagaaaaaaagtcttgactgggtacagtggctcacgcctgtaatcccaacactttgggaggctaaggcgggaggatcacttgagttcaggagttcaagaccagcttggatagtatagtgagacttcatctctacaaaaaaattctaaaagccagttgtggtggcatgcacctgaagtcccagctacttgggaggctaaagcaggaggattgcttgagcccaggaggttgaggctacggtgagccatcattgtgccactgtactccaacctgggcaacagagccagacctgtctcttaaaaaaaaaaaagaaatttatgttataaactcctttagcactaatatctattgtttttcagctactaatcatttgtttgtttgcgacagggtctcgttctgtcacctaggctggagtgcagtggcaggatcatggctcactgtagccacgaccttccagattcaagcaatcctcccacctcagcctgcctagtatctgggactatagatgaattatactacactgggttaatttttttattattatttttagtagtgacagggtctcactatgttgcccaggctggcctggaactactgggctcaagcaatcctcccatctaggccttccaaagtgctggaattacagttgtgagccactgcactcgtcctcagttaataaggtttaaatgaattttcagctgtaaaatgcaagacatttacccattgtcttaagctgcctaatgtcatataatatagtttcactgcatgttaattttaaaaattgctttaataatgtatcctttgtatttatttatcagttattttaaaaagcagaaccagtttctcagtttcttgtggtaatgttttctttttgcagactttggggttcttcatgaaagatgcaatcaagaaatttgttgtgactcagtgtattttgttgcctgtgtcttcacttctactttacattattaaaattgggggtgactatttttttatttatgcctggctgttcacattagttgtgtctctggtgagtaaaatctttatttcgttttcttttgcaaaagttccttggtgagattactgtaatcttcattggcatgtaaacagttcttaagaagcagctgaaatataaataggtgcttatatacatttcccccttggtttctgcttttgattgtagacacaggagtattgactgaccataaatttccttctccttatgctaactcttcaggtcatagaaactagttgttagtcacttttaatgattcagttgtcaggcagttttgggttgtgcatttgcgagttgccaccagaatgactaagtgtgataatttaatgactcctgactgacctccactgcctaaaatcatggttattttgaagagaaatgagatttaagagggacaagagaaagaaagcatatacttaactggctttcttctgcttcccttcccttgcctttcccttccacgttagacactctctcccttctttgccccatctgcttccccttccccttctatcttttacccattcttcttcctttccttctcctgtcttcccttttctccccaactgccacctattcctgcctctcttctcctttccttttccctctcactcttttccccctgatttttccctccctcacatctcctattcctcttctctttccatactctcaagtgcttcacaacacaaacactacaacgcagtcaaaatggtctgttcagggccaggcacagtggcttatgcctgtaatcctggcactttgggaagccaaggtgggaggattgcttaagcccaagagtttaagaccagcctgggtaacacagtgagactctgtctctacaaataataatttttaaaaaacccaaatgaaaaaacccaaagtggtctgttcagtgcacccagaaattatcatctatcagctcttcagctccactgatgaggtttattttattttagagatagggcctccctgtgttgcccaggctggagt

SEQ ID NO: 4328 - DNA, 6000 bp, Homo sapiens
ttttttttttttttttgagatgatgtcttgctcttgttgcccagactggagtgcaatggtgccatcttggctcactgcaacctccgcctcccaagttcaagtgattctcctccctcagcctcctgagtagctgggattacaggcgcctaccaacacgcctggctaacttttgtatttttagtagaggcggggtttcacgatgttggccaggctggtctgtaactcctgacctcaggctatccacccacctcggcctcccaaagtgctgggattacaggcatgagccaccgcacccagcctgcattttaaattttatattagtttgttattaccgaaacaacccatgtttgttccaaacaatatattaggaaatactggctgggcgagtggcttacattgccagctctgggaggcagaggcgggaggatcacttgagcccaggagtttgagaccagcctgggcaacatagttcaaccccatctctacaaaaaatttaaaaattagccgggtgtggtgtcatgtgcctgtggtctcagctactcaggaggctgaggtaggaggatggcttgagctcaggaggtcaaggctacagtgagtcgtgatcatgctactgcactccagcctggttgacagagtgagaccctgtctcaaaaaaaaacaaaacaaaacaaaaaatagaaaatacagataagcagaaagcaaaacaaaagccaaatcacttaattttaccacccatagataagccttgctgactctgggtacgtgtgtaaaaaccatctctgtttcaaacattgggatcacattgccgttaaggttttataatctgctttcctttttttttaaattgtgaagtggaaattttatagatgtgtaattactgacatggcaagaaaagtgttaatgatggccaggcttggtggctcacgcctgtaatcccagcactttgggaggccgaggcaggtggatcacgaggtcaggagatcaagaccatcctggccaacatggtgcaaccccgtctctactaaaaatacaaaaattagctgggcacggtggcatgtgcctgtagccccagctactcgggaggctgaggcagcagaatcgcttgaacccgggaggcggaggttgcagtgagccgagatcacaccactgcacttcagcctggtaacaggatgagactccatctcaaaaaaaaaaaaaagcaaaaggaaaaagaaaagtgttaatgaaacattcaagaagaagtccccagagtggcccactgctgcctgagcttctgaggtcagctgagaaacgggactggagggtgtctgtcaaggccggggtaaagtcttaaaaagtcctggctgtggccattccccgaggagagggctgcatgagataacctcatgaaggacccttctggtcctaaaccctgcttcagctgcagtcccgatgcaggtacatgtggccgctgccttttttgtgattaattattgaacatgaggagctggtgctcttctcttctgttctcccgtaccccgtgtttttgctgactcagctctggtctggaactggccgaggaataagctcttctcgaactcattcactcataacactttaccgacatctgccacctaccttctcaaaccaggggtatttgctgggatacacttgccccccaaaaaggtcaggaacccctgtccaggaggtgtaagtgagccagggcagtgccacgccctttgcatgtcttccttccatagcccccacttcatagataacgagatggctcagagaaggcaggtgacagtctcaaaaccacacacacaagcaggactgggatccaaactcaggtctctctgaccccgagctgctgtccttaaggtcaccacgaaacatgaatataaataaagccacatagaaggtgacttgggccacacatagggaggcaagcatcgggagttggcagttctgaaggggggatagtggggtgcgggaatcagaggctccgtagagctttgtagcatttgtgttcctgtaggcgtggacgatgagcagagtctcgcaggcacagacatgaggtgttctgcgtagcatgcaccgtgccagcaacggtgcagaggtggggagactggggacatctgggaaggctggcgggtcagtacacagagatgtatttccagagaagcctgttccctccggagtctcctccagggtgtgtgcatgttcagcacacccccatcctaaagaggggtgctcctggaggccacctcattcgcctctgctgtgtctgcagcctgtgacctctcacctcgctctccttcacccatccacataccgcaaggccaccagtttctctcctcatgcccttggtcctcttcccatccactgggaggttgggaaccctggctctaatctcagctctgtcctgggcacactgggcgacaaagggtgagtccttcttcctcttcgggcctgtttcctcgtggtgcactgggggatgagggaagtattggatgtgctagggtctaaagttccttccatttctatgtctctggttctgggccactctgtagtttcatgctgtctgcagggaagttcctggcctcgatggcccagctccacactgcccaattcccctccctacatcctctccctgctgcatcattccttctctacctgtcctccatgatcctctttccttttctagctgtctcgttacttaattccacgaaggcaggggcagttgtcccaattctgcagatgaggccaggctcctgccactttggagtgcataagaaagaaggtccctccttcatccgctgaccttccctgagccctgggctgacctctggggcacttctcccaagacatcttaaaaccaagctggggccaaggccaccacttgtggatggctagacctggaggaaccctgagtcagtctatttccactgccagacctgctactcacagatgagtgactacctctctgagctgcagcctgcagcagggggcaattgagatagttgtgaggtccagtagcttggggcttgagggctgctgcctttggtgcccagcacagagctgtaactccagggaattccaattctgatttccacataattttctgaaaataatgttctcctctcttggctctgtaaccccctgccaggggcaccttggctgtcctgtccctccaacaatctaaccctctccctcatgttgtaattgcagatttttgctggtcttcagctgcctggtgctgtctgtgctgtccactatccaggagcaccaggaacttgccaacgagtgtctcctcatcttggtaagtgctgggagtccgggactgaggggggctgtgtgaggtagcacctctgggctgggagtccgggactgaggggggctgtgtgaggtagcacctctgggctgggagtccgggactgaagggggctgtgtgaggtagcacctctgggctgggagtccgggactgaggggggccgtgtgaggtggcacctctgggctgagggctgaaggtggaaagaggcttctcataccatggctcagagagcagcttgctgtgctgtgttccctcagctgtggctgcccctctctgggcatcatctccactttatagcaagtgttgggggacctcctgcctctatgcaagggcttatgatgggtccagaatagaagtgagtaggctccaccccttctcaggacaaaatctgcaaactccacgtgtggtggattttaggtcagtttttgcctaaacacaaaacaccaaatggaagcccctcagagggagacagctgacagccagcaaccccttttgtcaccaggtcagagttagggagtctgagacagctgggacagggagggcctgttgaggagcagaaaaatccgatcagttcatggggaccggaaggggaggacacactagggcttttagtcttcttgcaggaggcggagggggccacctgccctccggaatcgtcaagtccaggaaactccaggagaggggtccgaggaggccctggtccccctaacccagggactcttggctgggtccgcgctgtgacctgggccccagttctggagactgaggaccagaactcaggcccctggtcccacaggaattcgtgatgatcgtggttttcggcttggagtacatcgtccgggtctggtccgccggatgctgctgccgctaccgaggatggcagggtcgcttccgctttgccagaaagcccttctgtgtcatcggtaatgaggcgcgccccgcccgacctgacccctgaccccaggagccagggtgacgcctttactcccaatcccgactctgaccctggagacccgcacagattcagcggaccctccccctccctccccagtcccctgccacatccccagaagtccccgcctccgggtccgtgcgcggggtaggctggctgtgatctcgccgcccccgcccctgcagacttcatcgtgttcgtggcctcggtggccgtcatcgccgcgggtacccagggcaacatcttcgccacgtccgcgctgcgcagcatgcgcttcctgcagatcctgcgcatggtgcgcatggaccgccgcggcggcacctggaagctgctgggctcagtggtctacgcgcatagcaaggtgaggcctgcaagccgcgcgcggagacccgagggcgtgtctggggcacgaccagagcgggcagggcggagagggcgaggtcagaggggctgtctccgtgctgggaaggggtgtggcctgcgggggttggagccctagcaggaggcgaggtctaagcgggtggggcgaagtggattctgaattaggtaggggcgggcctaggagtccggaccggatcagggggcggggccggagaggcggggcttgagggtttcccctggatgcttctgggtttgaagggaccactcgtaccacaaagtgggcagctgaggtgggacttgagggtggggctggagcggggctagggtgggccccaggtggaagcctgaaagtgggacttgggggacggggcaaggtaggccgggtgctggagtcctgagcctggaacctggagactcaaggcaggcggggtgagggtgggggtgggaatgggggtcggggtagggggagtgctggcggtttcgcgaaggccggggcagggtcgccgtgatgggaggagctgagaaagaaaagcgagcctgggactccgggagatgggggacctttatccctttcccgtgtggaagccccccacatctcccaggcaggcacagcgctcctcaccgcgcccctccgcctgccccgcaggagctgatcaccgcctggtacatcgggttcctggtgctcatcttcgcctccttcctggtctacctggctgagaaggacgccaactccgacttctcctcctacgccgactcgctctggtgggggacggtgcgtgagggtctttgtagggctgcccttctccctgggatcctccctgggaacttcccgaggtctgcccatcgtgactcctgactcagggttgagcgggcctgcccctgccctctcactagagctgggacccccctgagaccagccccaatgctaaccccccaacctgctctggtggacctgcctctgtccccagctagccccgcacatcaagaccttgtgactatacccctttcccctgaccagcccaggagagggagaatccatctatgaccctaaccagcccccgtgggtgaccaggggccccttccctcatgatcaggctcctacctgcctgtacccccaacaagccgtaggtggcccccgtgaccagtcctgcctgtaacctgtttgtgtctccagattacattgacaaccatcggctatggtgacaagacaccgcacacatggctgggcagggtcctggctgctggcttcgccttactgggcatctctttctttgccctgcctgccgtgagttgcctcctgctcagttggtgggggaggctgagggtgggacctgctcacccctgtcacacattt

SEQ ID NO: 4329 - DNA, 6000 bp, Homo sapiens
cccactgtctcctaacctttttccttccctaccctcccctctgcccaccttgcttcctccaggcctgttttctctcccaccggccccgtctctgttctgcctctctggcctccagtcccggcctgacacccttccttctgcgtgcctctacctctcatctcctctcctctgtctcacacccccctcctggtctctgcttctctctctattgtgtctgtacttcatgaccactccatctacacacttggtgcccgggatgacgatggctgtgagtctcccatggtgactgccaccggtgaggggcaggagggctgtctgcaggcagatgcgatggagcccagctcctgtcacgtctgctgccaccgacctgggcgtcccacccctcctgggaggaaggaagcctctcttccatcttgagagacctgccaggcagggcctagtgcccccactcagcaccccgccaccaaaacaggctccacatgctcatggcacaacaccgccctctgtcctctcccaccctccgccatccctgtcgccgcatgtgctgctgtctccatgccaccagttccaagtgctccatggtcacacatgttcacatgtgcacatacatgcgttggggctttctctgccacactgctcaagcctcacactaatgctgcctgtgtatgccctacctcccctaggtatgcgagaccacccacccatccccatcaccgacctggcggacaacatcgagcgcctcaaagccaacgatggcctcaagttctcccaggagtatgaggtgagatgttcccgccccctaccatgtgcctggcccaggcctacccaaaccagctcctgtcctgtcctaggtcccagctgtggtgggtgaggaagcaggggtccagctttttcaggagcacagagaggagggttggcagtggtaagggtcagctgggaaccgggtgcctcagatgctgggtctggccatagcctggcccagcaccttcttggggtcacccttaggagatggtttcaaaaggctgtgagtgacaccagggtctggacactcagacacgtgctcaagtgctcacaggcagacacaaggccacaggcatacagacatagatcagtgataacagccacagtagctggcatctatcaagagcatcctgcaggccagcaccggtctgggcacttggcatgcattatctcttttggttcccccacagtcttcagaaatggggactgttattatcccatcttccaggtgaggaagcgggggctcagagaggggaagtgacttgcccaagtcaaacagctgatgagtagtggagccaggattcaaacccaggcctgcctgctgccctgtgctctgcacatgcatgtgctcacgtgtgtactccgatgccacagctcacggggagtcggggcctcgagactggctgctcaggctgtacaagtcccgcttggagccctccacacgttcatcttgttctggacttaactcctaggagcctgctgggggctgagccttcaagagtctgagggtttcccacccacagatggtgtcggggtgactctgagcatccccaggctgcccatctaggaaggggatttgttagagaaggaggtgatttaaagacaagactcctggccaggcgcagtcgctcacgcctgtaatcccagcactttgggaggccgaggcgggtggatcacctgaggtcgagagtttgagaccagcctggccaccgtggcgaaactgcatctctactataaatacaaaaattagccagctgtggtggcacatgcctgtagtcccagctatttgtgagggctgaggcaggagaatcgtttgaacccgggaggcggaggttgcgttgagccaaggtcatgccattgcgctccagcctgggtgacagagtgagactccctctcaaaaaatataaaataaaaaaaactcttaaaaaagagtatttttacttaaaaaagagagagagagacctcctcctcttccacctcctccaagcagcagcctgtgcttgtcgttctgccttgtccacagctgtttcctcagcacctggcactggcctcagtagatggttggtggacaggcaattgaggggttggctgagcctaacctgtgagtttgcgccccttctgatgtccaccctcagctgtgtttgggggatgcatcctagggctcaaagattgcctttcccaagggctgtgggccaggtttctgaagagaaagctgggcttggcaggcaaatggatgagtatgtctgcggcacagcaaccgtgctgcctctgcctatagggcccccctggggccctgctccacacaaggctgggctttgggtcacggagcccgtaaggtgggctccctgcctcccatggcctccacccacactcatctgtaccatgtcctacacctgcccttccttccagcgcagccctgcttccccatctgggctcgtggggcctctgttcacagtagtccccttccatcttctacctgcttccctcctctgatcagagctttccttacaagaccctcctcctccaggaagccttctcaggctccccaaggctgccgtgggctctccctcagccaggaccccatagctctgttgtcttttttttttttttttttttttttttttttcttttttggaagtctcgctccgtcatccaggctggagtgcagtggcgtgatctcggctcagtgcaagctctgcctcctgggttcacgccattctcctgcctcagcctcccgagtagctgggactacaggtgcccgctaccacacccggctaattttttttatttttagtagagatggggtttcaccgtgttagccaggatggtctcgatctcctgacctcgtgatccgcccaccttggcctcccaagtgctgggattacaggcgtgagccactgcaccaggcctgctctgttgtctttaacgttcagtcagtcattgatcacacattttccatgtgccagtccccgtgctggggatgtggagacacatgccctcagggaacccagtcgtggggagcatgtgcagacagataatcagcattgaatatgtgactctgacagcatgccctggtgttgaatagtaccgacaggcgtgcaaaaggtgggctgacagcaccagagcagcctgaggtgtggggtgtgctgcggggtctcacggaagcagtgacgcggtcctgtggagagtaatgaggctggggacaacatatggaggacattgcgtgctatgctgagaacttcagatagtatccatctggaaaatgtgaagataataatggaacctatctcgtatgagaatttgaggagggaatacatgcaaagtgctcacagcggtgccaggcacactgtgggtcctcactaacgcttcgctattatcattattgctctccgaggtgaagaagagccacagaaggcctttaagcaggaaattgatattcacatctgcattttggaaggattattctggctgtggggctgagtgggtcagagtgggacaagaggaaagaggcaggaagaggctgagcctcaattggggtggcctggcccagggcagtggcagcaggttggagagagctgagggggtgggggagcaccagaacctggtgactggcagggcggggttggtggaggccggaggaattttgagcttgacttctaggttctggcctggcactgaggggtgagggtgcctttcgctaaggtgtagtcccagcagcagcgccaggtttggaggggaagctgatgaactcagctttgaaaggactgcggttgaaggacctcccggtggaggtgtcagagaggctgctgggtactcggggaagagctctgtgctgctgctgaggttatgggcagctccagcatgtggtgtaagaatcaggtgagcaaatgaggtcacccaggaaaggttgtagagagagaagagggcctagaaggaaccctggaggagctctgcgtcctgcccacgggaagggcaggggagagagaggaaacagagaaggagcagctgaaaggaagagagccgagcagggagggatcctggactacctgagaggggccaccatcccttccatctgtcctggctcatttcattaggtgaatgcagggcttcgggagggactctgggtgttcagagccctcagcagtttcgggactgcctgagagggggccaccacctgtcctagctcatttcattaggtgagtgcagggcttcgagagacccttcacctgccccatcccagctcagaccactctaccaggcaaggggatttggtaccatggtcagaggagtccccagtccatcacttttctgataggtgatgtggcaacctgtgagctccatggctggcaccacgagatagagggcctggctgtggcctgtggagtgaaggcaggatgtgagcatcaccgggaaggctgggtcccctgcaggagaagcaggtcaaccttggctcttaccccaccccacccgctttctccattctctgcagtccatcgaccctggacagcagttcacgtgggagaattcaaacctggaggtgaacaagcccaagaaccgctatgcgaatgtcatcgcctacgaccactctcgagtcatccttacctctatcgatggtgagccaagggggtgcccctcccatccccttgctctcccccttgctagctagggcaacatgtcattctacagaggatgtccacgagtctcaggggtgcactgaggcatggtgggctgggctggggaccctgtagtaatgccctcccacctcctttcttatccataggcgtccccgggagtgactacatcaatgccaactacatcgatggctaccgcaagcagaatgcctacatcgccacgcagggccccctgcccgagaccatgggtgatttctggaggatggtgtgggaacagcgcacggccactgtggtcatgatgacacggctggaggagaagtcccgggtgaggctgcagggccctgccaggaggcgggtgggaaatgcccagccacaaggtgatacagggcaccttcttctgtgccgctttcttctgtggaggaagtcgctcaagtgatccccagatgctattgttactgggggtattatgctccccaaatactgggtgtttctgggatacagcatgttccccacatgctagtgggttccttaagatgttaatatgtttcaccaaatgctgtcattttcggagaatgttaatgtgttccccagttgctggcgtgttcccggggtattcatgtgttccccagatgctggagtgttcctggggcattaacacatctcctaagttaattagtggaaagagctgctgttatctgtttttggactgcaaagcattgactggaacgtaaaatttacagagcttgaaaatggcacataaacgttatgggtaaatttggcagaaaatgtgcctggtgcgatctggcgttgaataaataattttcaattatgacccttattccactagctagggcagggcggtgacatagcttgaggacctgatgtggcttgtggaggacagggggcaatggatctgagagctcagggctggggggctttgtagccagaaaggctacagccagggagttgaccagcctccaccctgcttctgcccgtctgagcctgtgggcttccttcagcctgccctgctcatcctcctgcaggtaaaatgtgatcagtactggccagcccgtggcaccgagacctgtggccttattcaggtgaccctgttggacacagtggagctggccacatacactgtgcgcaccttcgcactccacaaggtatagcctttccccagtgcatatctcttacccagacactgtaaggacagtggcctgggtgtggtgtgctgggtcggggggaagctggagcctgggtgttggagggtcggaggctcaggtgtgtgagtgatgtgatgatccatgttatgggaacagtgctaggagcttcaggctactctgtgtgg

SEQ ID NO: 4330 - DNA, 6000 bp, Homo sapiens
gtgcagtggcacgatttcggctcactgcaacctccgcctgctgggttcaagcgattcccctgcctcagcgtcccaagtagctgggactacaggtgcgtgccaccgcacccagctaattttttttttttttttttttttttgagatggagtcttgctctgtcactcgggctggagtgcagtggcgcgatctaggctcactgcaagctccacctcccgggttcacgccattctcctgcctcagcctcccgagtagctggggctacaggcgcccgccaccatgcccggctaattttaatttttttttttttttttttttagtagagatggggtttcactgtgttagccaggatggtctcgatctcttgacctcgtgatccgcccacctcggcctcccaaagtgctgggattgtaggcgtgagccactgcgcccggcctaattttttgtatttttagtagagacgggatttcacagtgttagccaggatggtcttgatctcctgacctcgtgatccacccaccttggcctcccaaagtactgtgattacaggcatgagccactatgcccggccctgactaatttttaaaaaaaattttttgtagagacagggtcctactgtgttgcccaggttggtttagaattcctgggctcaagtgatcaaccagcctcagcctcccaaagtgctgggattacaggtatgagtcatggcgcccggcccttaatcttaatttttaaatattattgtcatcttcgtttgttgttgccagtatggggccatatatgtacatactattctacagctagattttttttcacttagcagtaggttctagacacacttccctgttagtacatgcagatatgcctcattctttccagctggtacattatattctgcactgttattctcctgccctggcagatactttattcaccttcgtttcttctgtgtactggcagctggtctctgttacctgcatcatctgggcttccttgccttctggcttccagctgggatcagctgataaaagacactgccaggagatctgagggccaatgttgggaggagtcagactatgttttatcccccactgtcccttgccatggttctagtagcagctgtgctcgttatccgtgatcactgctcttgtagggtggcttctcttctccagccagctcttgctgggctccagtgacacccttctcttcttttgccctttgaggttgaagggtagaaatagcttcctgccgtttctagtccctggctgcttcaccattccttgttggttcctttaaatgctgctcacaacagctataaaaaatcctgtcattaaactgccttcagtttactcctttgcatatgccatctctttcctgctaagacctcaatggatgtgaccagggagacttaccataatttaattattgggtccctattattgggcatttaaactgtttctagtatcttgctgttatactcagagttgctaatgaacattcatgtacatgtcctttttaatatttgttggagtattgtttgagaaaaaagtcataggaatagaaagactgggctaaggtatatgaatattataaatttcaatagatacttctaaattgttcccaaaggagtctaccaatttacatttctacaatgtgttgtttgatttttttaatagtaaaaaattaatggaggcagtacttgtgacttcataaaaaatacttttttttttttttttaagagacagcatctctctgttgcccaggctgatgtgcagtagcatgatcatagctcactgcagcctcgaactcctcaagcagtcttgaggcgggctcaagcaatcttcccgcctcagcctcccaagtagctgggactataggcacatgccaccatgtccagctaatcttaaaattttttgtagagatgggggtctcatctcatcatcttgcccaggctggtctcgaactcctgggctcatgcagtcctcctacttcggcctctcaggtctgagctgccatgctaggccctatgacaaataaatttaattcagaagtgtacaaagggaaaagtaaaagtcctctgagtctcacctgcttctcatcatcccatcctattccctacaggtaagcatgctaacagctgtatagcctgtcaggcctttctcccatttttatatgtacatgcttagcgtagagtaaattgagtacatttatatgtataaagtaaactcattcgtatgtgtgcgtatatgtatctctttctctatttgagataacatatttctagactctgttctcttccattgacctgttttttcctctgccagtacctatctaccttagtaattatagctttgagttggttcgatatctggcaaggcagattctcatcccattatttttcattttaagaaatttcttggcccttcttgggcctgaactcttcagattatctttagatccaagttcagaaaattcatggattttgactggaatgaaactgaatttatagaaaactcacatttcaggaaaactgacatatttcaaattgaatcttctcacttaagaacctctttcaccgggcgtggtggctcacgcctgtaatcccagcactttgggaggccgaggtgggtggatcacgaggtcaggaggccatcctggccaacatggtgaaaccccatctctattaaaaatacaaaaaaatcagctaggtgtggtggcgcgtgcctgtaatcccagctactcgggaggctgaggcaggagaatcgcttgaacccggggaggtggaagttgcagtgaaccgagatcgtgccattgcactccagcctgggcgacagagggaaactccatctcggggggtaaaaaaaaagaacctcctttgtctctttatttactcagatattttatgttctttggtgaaagtcttgcccatttcttgctaagtttatttttagttattttatagattttgttgccatcatgaatggaattttttcactttatgttttcttttctttcttctctttctttcttcttcttcttttttttttgttttttttttttttgagacagggtcttgctctgtcacccaggctggagtacagtggcacgctcacaactcactgcagcctcaacctcctgggcttaaaggatcctcctgcctcagcttcctgggtagctaggaccacagatgcacactactaggcctggctaactttttaatttttctttttgtagagataggatctcatcatgttgcctaggctggcctcaaactccagggctcaagcagttctcctgcctcagcctaccaaagttctgggattataggcgtgagccactgtgcccagcccacctaacattttctaattggttattgctggtatggtttttaagaatgtgttgatttttgtaaattaatcttataatcataatcacctactttattgaacttcctattctaatgattttttagtatattctcttggctttcctaggtggacaattatctgtaaattataatgttttgtcacaccattattaatatttatacatcatttttttctcttatgtcattgtaattttgtggctgagatatctgattgggtttggttgagggcctgacccagggcagtcttcttggccaatgttacattttacatttaaggtgtacctgctatgcatccttttacatcaaaggatgcatagcaggtacagtagcagggtgggtgaattccagacagaccttgaggatagaaacaaggcagcattcaatgaatagaaagtacaatgactagagcatagggcacaaatgaggttgagagaagcaagagatggattggagagtaaatcgaggctcagtcagaaaccgctaggctgtaaggagcaattactttattcagaggagttgagaattgaatgaaagctatgttaggcagaatggctctttaaagatatccacaccgtaatccctggaacctatgaatttgttactcgacatggcacaagggacttcacagatataattaaggttttgggtcttcaaatagggagattatcctggattattaaggtgggcccaatataatcacatgggccccaaaaagcaaagaagtttctccagctggaagagaagcaagatatggcggagggggaatttggagagattcaaagagtgagagagcctgaaggggaccacatggaaagcatgaaaaggactgtaggcctgaaggctggcccctggcagataaccagccgggaaacgggggccttgtccctacagctgcacgaactgaattcagccaacggcctgagtgagcatggaagtggattcttctccagggcctccagaagggaacacagccctaccagcaccttggttttggccttgtgcgactctaagcaaggatccagctgagcctcaccatatccagattttggccttcagaactctgagataattttgtgttgttttaaactgctaagtttgtgacactttgccacagcagcagtagagaacgaatgcaaaggggtttaagcagggatattgtcagattttgtgttattaaaagacttcttgtgccatgtggaaatggatttggagaatgtaaatttgaaggcagggaaacgtgtttgtgggaatgctgtgataacacaatctagggtagtgatcatgggaaggggctatgatttgaaaaatatctgggaggctggaattgccagaactagtcagggactggatgtcggcggctggggtggggaagcaaagatgattgctgctttctagcttaggcgctggctgatgatgaagctgttttttgagatggggatgagcaggttagaagatgccatgatatgaaagtgataactctaagttattcttcatttggaaattctctctatagatactttaagagagaatatatcaataagatgagtgctttgtcttttaagaactaaactttttcttttctaggtcatttaggaaatcgtaaatcatgtgaagatgggactcttggtatttgtgcgcaatctgctgctagccctctgcctctttctggtactgggatttttgtattattctgcgtggaagctacacttactccagtgggaggaggactccagtaagtatagtcactctagctcaccccaggagaagcctgttgcaggtcagttactggtttttcgtgtggctgcgtctcatattcttcagagatgggcaatgagagtaaactgaacatttctgggactttggcctagaaattgcctgccattttagctggtataggctgagaactttgatgttttttaaaaactgcatgccatgacaaatctcagttccttttacaaacttggtgagaatgtgctattcttcaataaaaacccaaactatactcatacttctagttcttgaacgcttttgttctttctaattgctgtagcatattgccactctattttgccatttattgccttagggattagtattgaagttggtttccatctgcccttaaaacattcatctttatgttgaattttcaacataatattgtctctgttttgttttccctaaagaaacgttgtctactgaatctttgtagccgttgctgctattgaacttgcacctggctacaataatggcttattttccctacccagtaactcctaatttttttcttctctttgtgcactttgtctcatgtgttacatagtgttttccacatagcctgaatcccactggtttggtttctgtttacctgatgtggcctgtgttttggttctaggcttgcagttgaagggcttacattgatcagcaccagcctttgcacattgttttcttggctgtagcttgaaatatcacacagtgaccatagtggttttctttttggttattttgtctgactgttatctgagcttggtgtgggaaatagtataaaatcagaacagagtggcctgttttgacctgcagtgatatgtcttctcttaaaatagttttatttttacta

SEQ ID NO: 4331 - DNA, 6000 bp, Homo sapiens
ggtgacgctgcggggcgggcggacagactgcgggacggacggtggacgctgggacgcgtttgtagctccggccccgccgttccgacccccgccgccgtcgccgccatgacggggctagcactgctctactccggggtcttcgtggccttctgggcctgcgcgctggccgtgggtgaggccgggtcctggcgggcgggagcagcatcgcggccgagctggccgggtcggaactcggcggggaagtggcctgcggggaatactggccccccgcgcgctctgcacccgaggctctggggacttgcgcctgcgagggcctctgactccgacaaaggagacccggatttccagctgcttgaggaggggtgcgggcgggtaggggccgcgagggcagcactcccccgtcctgccactatcgctgtctcccctcgctcccacgtctcactgctgtcccccctttcttgctcctgaccggcccgctcggtcacaagccggctgctccggttcctcttttcccagtcgctttgccctcccccacccacagcttgttgggtaaacagcggaacggactgggccggcgggatctggctggagcgcttgctccctcggtcccgcctcggattcgggcttgcgggtggcgaccctgcctgcgcaggtgcttggtctgggaggtggttttagcgagggaatggcagaaaatggaggcctaagcagaggaatctgtctacacagctgtactgtcacctgggggcagcctgaggacgccccttcagggaggtggcccttcagctcggcagctactttaggttgaagaacttctctctaccgagcagcccgtaaccccctttttctccctcactgctgcaggagtctgctacaccatttttgatttgggcttccgctttgatgtggcatggtaagggagggcagggggaggattccccttgaagcttcttccctgcagcctctcttcttttctctggtctgagtccctcccccacaccactgcctgcctgggacatggacctttgggaaatacgcggtcagttgttgcctgtagaactggtggtggggttgaagggggtttgaggggttaagattttgtgctccgcttccctgctagagctgaactgctttcttctctgcttccacaacaggttcctgacggagacttcgcccttcatgtggtccaacctgggcattggcctagctatctccctgtctgtggttggggcagcctggtgagtattggggtggtgggactgggggcaggggctgagtcatggcaggtggtgtcactggggtcttaggcatgctgagggcagtgacagcttgggctctgctcatcagttttttatccttccaccaggggcatctatattaccggctcctccatcattggtggaggagtgaaggcccccaggatcaagaccaagaacctggtcaggtaagtgtcagggtccttggacttttgtcagaaccagctgtgttggcgctgcctgtgtgtttgatctgacatactgtttctgacaagccaccttgtgggatgggatgttataggggaaagattgctggggacttactgggcaggaaggacggtttctttctcatttctttctcctttccactccttacccctaatctctaccactaccagcatcatcttctgtgaggctgtggccatctacggcatcatcatggcaattgtcattagcaacatggctgaggtatggaaggccagggtggtggcgggaatccattccagtgtgttctacacattccttagagattggatggggtgcatcaggatggtttctgattacttttcttcttccctcagcctttcagtgccacagaccccaaggccatcggccatcggaactaccatgcaggtgggtggatgggcgtatgaatgcaaaatgctgggacttcatgcctgcttccactctcccccatcccagcttgggccatcattttgatattctctcacctactttttctgctttgcagagtggggatggtgattggccccattagcccatatctcccccattcctggcttagcctcactgcacccctctctatcctcccaggctactccatgtttggggctggcctcaccgtaggcctgtctaacctcttctgtggagtctgcgtgggcatcgtgggcagtggggctgccctggccgatgctcagaaccccagcctctttgtaaagattctcatcgtggagatctttggcagcgccattggcctctttggggtcatcgtcgcaattcttcaggtgatgaatccccttgggaagcctctgtgtccttgtccccaacctagccttaccctccttctggagaagctgaagtgctctccttctctacctataactatagattcccccaaacagcttccacctcctcatttccatcttctggttttctcctacaggggctctctatttttgtctctgatttggtgtcactgacaacagccctgttctttttcccccctttctaatgcgttgtatctgtatagcacttagtcctccctctttctgttctctcattttatctgccatgcttttcatgtctccagtctgtatttgtgatctagactagaatggaattttgtctgtctatatcagtctgtcatggtgtgtttgactgtctctcggagctatgtgtatctccctctcacatgcctgtcagtaggacaccattgtctaaattgtgtgtgtctagtctgtctgacagtgtgtgagtttgtgactaaggatcagcctgagggtctgagtgtgactgtgggtgcttgactgagttgattcttagtgactagctttatccatatgccacttctctccgtctgtcccacagcgtaactctgtggttgtctgtccctgtctgccttgtctgtcacagtgtgtccatcctggttagtcatatatctcttgtggtctgtccatccaaccatgtgctagatgtcatcttctatcatttgtcactgccttacctattcctctgtccctgcctgatttctcctgttctttttttgcagacctccagagtgaagatgggtgactagatgatatgtgtgggtggggccgtgcctcacttttatttattgctggttttcctgggacagctggagctgtgtcccttagcctttcagaggcttggtgttcagggccctccctgcactcccctcttgctgcgtgttgatttggaggcactgcagtccaggccgagtcctcagtgcggggagcaggctgctgctgctgactctgtgcagctgcgcacctgtgtcccccacctccaccctcaacccatcttcctagtgtttgtgaaataaacttggtatttgtctgggtcagtgcagcttctgttgccctcttgcgtcaccgttcacagaggaagggtaaagaggcctgtacgcctcagcctcatgccaatcccttgtcagctttctgactgcacacttctgatctgcacagagcttgctcctaggtggggaggcacgggtgctgggtggactctaacccccaaacagacttgtttggggatgagggagtgtgcagataggggcccctgggtgtgtttgtgcctgtagtccttctaggcccgtttgctcagggctctgactgaccaccatgcccgaattgtctgacagcatctacttacctggttgtacagtcgggcaccatcatctccgtccttgtgaggcctggagcctaggcagtggtctctgcctccagtgatggtcctgtccttctagcagcagcccctcccagaaacctctactctgatccttgttcccagggcccagggcagctcctcccaccccatccaatctcgttttctccttccctgaccctgtttcctgttaccccagaagccccagccacctccagcccacgcctttaagggtcctgccccctctctgctggccgaccttgaatcttggtccaattaaagagttgacaaatccctagccccgcagcctgagtccgcccaacctccaggtccccttcctggggagttcgcgctccaatgcaatccccactccccgctaagggactccacggtctgcacccgctcgccggtccgacctctaagcccaccctttggacgagcctgacccatttcctcccgcgctcccaggtccgtgcctcctgggtgcccgggttcggccgccggcagggcgggctcgcagcggcgcgcggcgggtgcgggcgtgctggaggcgggggccgcgggggcgcgcgcgcgggcgcgcgggccgggcctgcccctccgaggcgccgtagcgcgggagggaggcggcggcgctgtggtccgtgggtccgccggtccgtgggtctgcccggccgcccggccccgccctgccccccggggcggctcggctccatggcccgcggcggcggcggcggcggcggcggcgggaggcgacccgggggccgcggtggccgctgaccgggcggcgggaggcggcggggccgggccatgggggacggaaccgtccgcagccgccggagccgggagccctgcccaagtcggagcggcgtcccctgctgagccccgagcgccgggtgagaggagggcgcgcgcggcccccacccagggccccgagattccagacccagccccgcgaggggcaccccgagcgcggccccgagatcccaacccaggagccggtgagagaggcgccggcggccagaccccggcctggctgcccccaccccgcccccactccggcgcccctcctgggcttctccgcccgcgtccagccggcctccctcattgtcctcgctcgccccggcctcgtggcgcggggaggcgttccatacacgtttccccttggcctttgcctcatccgctgccctccacccactccccctgcccccaggctccacacccacccggtctgtgcggcctgcccgtccgcgggtgccacgtgttcagcctgccagccccgcccaaacgcacccctcagcctggccgccagcctgacccagaacccctgcgccggagggagggtgggaatgtctgcacgtgggtctgggtgtgagctgtctgagagtctggatgtatggctgtggaagtccaggagcagtggccttgtttgtgagtgtgggacttagtgtgttactgtcacccgggtgtgtctgtgactgtagttctctgtgtgtctgagtgtgggtgaccagctgggaccagggtgtccctgtgattctgtgtgcctgtgagactcaccctgctccctgaagcactgccagaagtggctgccgctctcttggaaccacagctggagccatcgcccaggcaagacccccttcctgccatgcccagtgctgtgcccatctccaggcccaagcatcccgttccgggaatcagaaccagctgtgctgggcaggacccagagtcttggtcccagtcccaaggggctggctttgaggtcttaagtgaggggtgtcccctgccttgccccgtattttgacgttttgctccagtgggaagggattctgtaaacatccagtctgtatttgggccccccggatgctgagggcaacttcccagcctggtcccagttggcctggcctgcttgtcgctgggatctgaatgaccaaaccacttcccaccatggctcctggaaggactaaatgaagtcatgagtataaagtgctcctgcatggtaggtgcacagtattccgtctcttccctcttccccaagccatgagttctgggttaaggatgctgccatgtgaggtgtctgttctcaggggcacaggggcacatgggggtctataggtaaacatgtctccatgcttaggtacaaaccagtgtggttagagttcacgtgtctgtgttcctgggaatgcgtgagtgtgtgtgtagagttgtgcaataagggtgagtgcctgagtgtgtgtgtcagtgaggtggaggaaggtaaatgtatgtggcttagtagtggggtgtgcttgaggatgtgagtactgagttgccgggaact

SEQ ID NO: 4332 - DNA, 6000 bp, Homo sapiens
caattttgtaacttataattgacatattcaaaatttcaatgtcttcctggttcaatcttgggattttgtgtttccaggagttttcccacttccactaggctttctagtttgtgtgtattgagatgtttatagtagtcgctgaggatcttttttatttctgtgttatcagttgtaatgttacctttgttatttctgattgttcttatttcaatctcctctctttttttctttgttcatctacctagtggtctatcaactttgtttatggtttcaaataaccaacttttcacattggtcctttgtatgattttttggtctcgattttatttagttctgctctgatctttgttatttcttttcttctagttgctttgggtttgttattgtttttatagttccttaggtgtggcattaggttgttaatttgagatctttttatatttttgatgtaggcatttagagctgaatactatgaatacattctgcaatttgtgggctgtcttttaactctttttcttttttttttttaacttgtacatggtataggaaagggtccatcttcaatcacatatggatatccagttttaccccctccttgtccaccatccctatctctttggtgacaagggacttgccttgtctcagatgagaatttggagctggacttttgagttaatgctagaatgagttaagactttgtgggatgattgggaaggcatgattggttttgaaatgtgagaaggacatgagatttgagaggggccggggtggaatgatgtggtttggctctgtacccctactcaaatctcatcttgaattgtaatccccatgtgtcaaggagggacctggtgggaggtgatcggatcatggaggtggtttcctccatgctgttctcatgataatgaggggagttctcacaagatctgatgattttagaggtgtttggcaattccctttcatgctctgtccctcacctactaccatgtaaggtgcgctttgactctcctttgccttccaccatgattttatgtttcctgaggcctccctagtcatgcagaactgtgagtcaatgaaaccttcttttgttataaacaactcagtgtcaggtagtatctttttagcagtgtgaaaacagataaatacaagcggccagtaatgcaagaaaggcagctctagaggtgaaaggcctatgggatggactctcctctatgctttctggggggtttggcccggcccacaacttgttttcactcatagaaacccatttccaactttgacctccagaactataagagaataaaaagatattattttaaatcactgaggttgtggtagtttattatagtggcaataagaaacctctacggatacagacaagcaggcagaagaaagaagacagatataggggcagacaagctggagggcaggcagaaattgggagttgggtggggattcagggatgcagttgggtaggagacaggtagagaagcaggtagggagcctggagaaaggtgagggagagaattgcagacagactggggtacagaaggcaggacaacatacaggtgggaagaaggcaggtgggtggatagaaagaaggatataggcaaacaagcagggaacagaaagaaaggatggcatgtagaggacttcagatctggttcttgtcctcacaagtattagggagcctcttaacatgcaggtgtatcccattgttgaatttcaacaccatttgtggtaagaggatagggatactggcaggatcagaaaacagcttaaagttgagtagggtcagggccaccttaagctcgttcatggcaaattgtttcccgatgcagttcctgagccaggcagagacaatgaattgagatgtggtttcaggccccattttgtactggacaggctctggcctgtaagctccagtctgaagctgagtattcagggtccaccttcatttatccaagccttggttcacactttcccctgaccttggacagaacctaccagtcttgctcttaattcctacctctgctctcagcaggcctgaaccactctgtcaggacagggcctgggctctaaggcacagagtctaatcacatggatggataaagagttaatcaatggtttgttcactcttccacaaacatttctggttccctagtgtggaggccagttcaggtcactgtagggtgaggatgggccataatcaggcgttccctttatagggagaccgacaggcacccagatcctcagagctgggccaaggcgggtatgggcagcggagtcagaagggctttggggaggcttcctagaggggcagtgggtgggtggtcctcagctgttgccccacctgcctcccactccagggtctaagctcctgccttgcccttacgcctcggtccaatagcacctgtagctttctaattctacttcagaagtttttcttctttgtcatccctcagtcttcttgcctggactttctggatccctgcttctccttcctccacactgaagccacagtccagctcagaccctcccacgctcttcatcacagcggggacagcgtcccaatacctcatctggcagccaaaccctccatggcctgttgcctcacccacttcttacctgtccaacccatgtcctaaccctcttcatgtggagatggctgagaacatcctccctccacctctgccttctgcatcgtcaaggctaaggccagggcccagcttcctctcgccctctattggctgtgcctctccctctctaaacatccaggcagcgttcgtgatttatccactgacagttataattgagtgcctaggacagtgccagggacagggacactcaatgagccattcatttagtgaccgagtgagtgaaagaacggataagggagcaatgtgtctggagcataggatgtatttctgtacaacacatttttgtccttgactatgaactcttcaaggcagggtcagtacctgttatctctcttttcccatcacactgcacaggacttgacccacagaggtaggcttaataaacacttttatatttgaatgaagttgcttaggttttgaaaaatgaataaaatcgaatggaatacagtgagaataattcttagttctgagctagaaattgagcttagggatgctctcctgtcctctagtggcagtgacatgattggcagccaatgcttaggaggaagttctcatcctgggataaaccaatgcctaaaaattactgtctgtaagaacaatttgcttgaagcctgtcctgtgaaattggagtcatcattagggaatttacagaattacttatttagaaaaaccttgtttctactgtttacatccttttttgcatttgtacttcaaaggaccattcctgcagcctttgagaatttctaaagcatccattttggagtgtatgtgtccagctgaatagctcattcaaatgtgttttatgttttacacaacaggatccttcaaatgctatgtgttatatgctaaaaagggagttttcctcaaacacggtttattgtcctcattttggtgtttctgccaatattgtgatatgtggactattggactatgctatagagatcccactgcatctaaacaattttgtcaaattaaaaagtagttataaatatgtgaatattataatgcagtggacatttgtttggcaagacagatccagaggcatgtacacaagagggaagagctgctacagctggagtgtggtttctctctcacttgatctccctagaatcacctccatcttgtcagggtcatataataggaagtgaactttgcgccccccacagcaagtgagaacaggatcacagaaatctctctttgggtagattcagaaatctacccatttctgaaattgttttagctcctggtctgttggtttctctgtcaccaagagaaacacagatcaatgaaaactttcatttagttctcatcattggattggagtaaagggcaattgatcacagggagatcattctgaatcaatcagcagaagttagaaatttggaactgtttctgtggacctggaaagtgatccaggctcctgctgtctcccggcacttaacttgagccagaaattgtccccatattgggtgaactgtatggctcagaggagctaccggtgtcagaaaccacaggtccctgcaatttccatctcctcttaattgttggattaggccattcttgaattaccataaatacctgaggctaagagtaatttatttttaaaaaatatttaattggctcatgattctgcaggctgtacaagcatgatgccggcaactgctcagcttctggaaagacctaagggggtttttactcatgtcataaggcaaagtgggagcaggcacatcacagggcaaagccaggagcaagagagagagtagggtggggaggtgccacactttacaacaaccaggtctcacaagaacttactcactattgtgaggacagcaccaagccgtgaaggatctgcccccataacccaaacacctcccgccaggacccacctccaacaataggatatttcaacatgagatttgagcagagataaatatccaaactatatcattctacccttccctctccaccgtccccgccaaaaaatctcagatccttctcacgttacaaaatacaatcatgccttcacaacaggtagctaacagtctcaacttgagccaagaaaatggggtctggagacagagaacataaggctaattcatgctggcttcctagaactaaatcaaatggaaacacttcagctatgctaggaaatatcttctccatttacatagggtgtacacctagtaaatgtctttgtaactttatcctcttcatttacatagggtgtataccaagcaaccaatggaaacctgtaaagggtatttaaaccccagaaaattctgtaacggggctcttgagcccctgtgctcggggccgctcccatcttgtggagcgtactttcattttcaatagagctttgcttttgttgcttcattctttccttgctttgtgtgttttgtccaattctttgttcaagacaccaagaacctagacaccctccaccagtaacatattctagtgagccagccaggaggtaagcccaaagtttgggatttatttttcaccttttcctttctgcttcatacaaaggaatctctccctctctctctcttttcctttccaactcaggacccttggtgggcagcacctaaacccagaggcaactgcagatgtctggccatggccagtgaaattaagaggtttccatgtggaggtgcctagctgcaactgcctgttagcttaaaggacctgagtctttttgccttttttttttaatttatttatttctttttctgtctttcagctgctgtttctagtagctccttggaaattgaggccacctggctgcagccactcttttgtgttgcctgaaagccaaggagtaaaggcagataattgccctggctggaaggaggaaggactcttttctatcttttccagttgtggtcccttatccctacatgtggtgcagctcagcgcaaatgtgcacatgtttcagattatttaaactttgttttcttatgctaaattcttcccttaccctacttgactggctaaggacaaaagaaacccacccagcctccagttcctatatcactagtggaatgggaagccacaaattataaggtggctagaagttgaggccttcatccagggacaaaaggaaagctcatggtaggccatcacctctggagggaaaacatgtaattggcaccagtgtccacctaaggtcagagacatctgatactctaagattggacctcaaagggggatgccctgaggaatcctctggacctcaacctctccaaaggggatgcactcagaagaggttctgaggtctagtactaagcagtccttagaattttctcttggagttgcaatactgtttggcctcaatattgct

SEQ ID NO: 4333 - DNA, 6000 bp, Homo sapiens
cctagactgagatgtcgaagcttcagagaaccttagagattacctagtcttacataacttaataggatagatgaggaaactgaggcttagggtggggggtggaggggcaaatgagtcacccaaggccacatagcaaggcagggacagagcctgggcagaacccagcctctagttctgtggtctaggatttcttatctgtgctggatgggagcctcatccaaccccttccctctctcatccccacccccagctcctgactctacagaatgctccagcagcctctgtagtcctggaagagccggccttaatgggccagccgttcacatgagcctcgtctctccccaggtctgcgggggctgatgattgccgtgatcatggccgctctcatgagctcactcacctccatcttcaacagcagcagcaccctgttcaccattgatgtgtggcagcgcttccgcaggaagtcaacagagcaggagctgatggtggtgggcaggtgcgccggcccctccttccctccttccgaagtgccctctcccctctgccctgccctgggttaccctgaacagaggtggctgggttggaccctggactggcagccagagcaccgggttcaagctccagctctccacatgatttcaagtaagtccttcgccaaccctggaccactcctcctttcagaataataggaaaaaacacctcttccctggtaactttatcttgaaattgatcaacagggttgtcgagagatgaaaaagtacttaagaaatgaaaggtaaactgtgtaagtgcatggaaagttagcaagcagctcacccaaggtattcccaaccaactccggatgttaagcccggttaaaaaaaaatgctattaatttgatccatcagattcactctgaacatctactgtgcatcacatcccacatgcaggggacccacggatgggtcatatggccctgccctcagcgtgctcacagtttattaaggaaggtagaaacacaggtaacacagcaaggtatttgcgtcaatggagattttcataggagggctctctccaaatgatgcagagccttggacaccaagctaaggaattcgaactttatcttgtgggtaacagttttatgcttttaaaagcataacttggtggctaaaatttttggttttccataggctggagatttgtagtttacataaggttaaggggcccttttttagatctttgcttcataatcgaaggttccctaacttggatttctggactaaagttctcccactttgtggataggtacttgaatttaggaagcttgctctttcacatctccctgcctttgcactcactgttctttccactaggatgccttctgcccagggctgcctaatggattcctactgcttgctcatctgtgcacccccagccctaggcaaggggactggccattgcaggatctgagtgcaggacagattgtgcaaagaggagggggatgagcagcagggaagctacttggggggctgatgctctagtggagtctgagagaggcaaaatgggaggaaaaggagaggagaagacaggtatgcagtgacatgtcaaaagaagcattccttatctgtgcatatgaactggttttgctaccatttcctcaatcagtgaggtttgtgctctatctactggtcatatgtgttattgcacccaacacatccaagaaaagtttttcatcaacaacttcacacatctgcaaaatcatacatgcagaatgctttggggacttaggtctgagccacagtttgttgagaaggagtcaggtgaataagtgggattctttcccaagatcaatgccacagtaagggagagaggatcagcgcgtggaggaaggagcagtccctggaagctgcagtcatcctgggaaagagctgccctacacagggcagggatggaaaagagaagacattctaagcagagaccagaggcctttgactggggtggggggtggggtggaatgtatgaattcctccttgaacagcaacaggtgggtgacatgaccttgaagccgtctaatatataagtgccacggaggcattagaattataaggttcttcagttccaaaattcctatattctgggattttaagactaagtttctgaatcttagtatttgagattctggctgccaaccttctctgatctagtgattgtacattccccttctttctcccttcctggttcctgtgcatcaccttcaccccacaccacaccatgcccacccgagtgtgcctcagtgccctgtgctctctctggcagagtgtttgtggtgttcctggttgtcatcagcatcctctggatccccatcatccaaagctccaacagtgggcagctcttcgactacatccaggctgtcaccagttacctggccccacccatcaccgctctcttcctgctggccatcttctgcaagagggtcacagagcccgtgagtgcagtgtacctgtctctcacatacagcagaggggctggagacctggtctgtcaatcacctggtctctgtgaccttgagaaaatccacttcccctctaggcttccattttcctgaccacagcatccagcctagattcattcattcactcaacaaacatttatcagccttataatggcagctccagggatgcagtagtttacgagattcacatagatgggccatcacttggctggcagagagataactgaataaacaatagttacaaagtatgctggctggtgggagagtaaagggcacaagcacctaacctatggggctcctgggaggagtcaggtaagacttcctggatgaagtgacatctgagctgaggcctgaaggattaatgagagggggaagaatgttccagacacaaggaacagtgtgtgtgaacgtgcaagagagactgtaagatctctagggtctgttccatgtctaacaatataaggttctatgtgtaagcaaaataacagcaatgacaatgatgatgacaaagtgtgaccttacaagggctcctgcacttgcattattcatgcagtgccactgaaacctgacagaatctgggaggaagctagcggtaccccagggctggagccttggttactccccaggatagcctagaagagacaggctggctgtaccttgagaagctgagggatatcatggacaccactccacaaaaataatgtgagagctcaaggtcattgaaaatgaggtcatggaaccccctcccttgatggtgcacctaagcaagtgtctactgtctgcacaggtctcatctcactgacaaccatgccgcacagcagtacctggctgaactctgggtgtttctgctcattccaaagtttttgaaatcaggatcagtatctcccatactcttacatgctgggaacaggtacaggttagggccaaatggagctataaagaagaaagacatgagaagtaccagagcttttcttaaaaacaacagcaactaaaggaaagtctctattctgatttctgatttatcatgacagaagtttgggaaggggatcctggtattccctgattattacaaaagtttattccattttagttgaatattaaccatctgttaattaacttagtactgatttaattttatgaatttttaaattactgcccccaataagaaaactctgagtcagcacggccgagtcattggttcagtcagttcacaatggagccaggattcaaatcttagtctacctgactctagagcccctattccactgtgcctttaagtcaagacgaagtctcagtattaatggagaactcattttcccattagtagatggatttgcccaacatggcaataaaccagtgggagagagatttggggagagagtagttttaccttcctagggtctcccacctggatctcacctcagctcttgtctgccctctctcacagggagctttctggggcctcgtgtttggcctgggagtggggcttctgcgtatgatcctggagttctcatacccagcgccagcctgtggggaggtggaccggaggccagcagtgctgaaggacttccactacctgtactttgcaatcctcctctgcgggctcactgccatcgtcattgtcattgtcagcctctgtacaactcccatccctgaggaacaggcaagtgttgtgctcatactgaggccctccagaaatgctctcccttcccccatagcctagaattccactgctgacttttactctgttgggttatggtctcccctgtggccacacagatgtccttgggagggaaagtgccttgggctatgaattccccattgaaaagtaattcattcaactcgaaaattactcagtgagtacttactatgtgctaggcactgtgctgggcttacaaagatgaatggtccctgccagagactatcctcagggagaaacagacgctgacacaagctatcactatacaaagagaaagtgcagaaggaccaagctcaaccagaggggccaagaacagagggagaggcagtcacctcctgggggcccagggagggcacactgatgaggacactttgaattagaccctgaagaatgaatagagaatttttgagtgggcaagaaacaaatacaagagaaaagaaacagagagcttactaggtgaagaactcaaattgaaatcctcccctgtcacaagcaacggcccttgaacacttacagcctagagctagggctgctgaaataaaagaccaccgattgggtgacttaagcaacagaatgtatgatttcacagttccagaagtgagaagtctgagatcaaggtgtctgcagcattggtttcttccaaggtttttctctgtggcttgtaaaagactgtcttctcctctttgtctttacacggtcttcccctatgcctgcctgtgactgaatctcctcttcttttaagtcataatggattggtgacctcatttaaccttaattttctgtaaagaccccatctccaaatatagtcacattctgaggtactggcggttaggacttcgacacagaaattttgggaggacacaattcagcccataacagagcccatgctggaagacagtccctgaaacactgagtggacatcatggataatactcttttgatggatggtgctttagagtttgcaagatgactttatacccttggtttcactgattcctacaaaaaagcagggcctttccagcctgacttctccagtggctcacaccagaaatgggccccttttcctgccgaatcctcaacctcttctccattgcctgtttcctcactcttcttcccgaagtcttccccagttgaaaatccttccctgaatcctgttatcctctagttcctgctgcctccctctcctcccttcaacagcagacttttgcaaagaatggtttcctttcccagcctccacttcccacctcttgtctgcttctcaacccgctgctgtctgactgttgtccccaacattctgctgaaatcgctctcactgaagtcactgataacatcttattgctaaaatcaaaggtcatgttcctgtctttaagtgaattcccaagagaactggacactactgaccacttcctgcaccccgaagacctctcttctgttcacttccatgaaatatttctcccctaggttttgtttttttgttgtttgttttgcctacccttccaatcactcttttgacttcttcacaggcttctctatctgctcctgaaatatcagtgttccttaggaacccatctgtggcctataacctgtctcaccctacaacacccctgggctataaattcaacaactttctatataaaggtgaccctcaattctctatctacagccaaaacccctctcccaagattcaaaccccaaaatccaactgtaccctggtgacataaagagacacagtccatatgctatttgtgacacccattagaagtattaggtaaggtttattgagagatacttacaagcaaggaagcttccc

SEQ ID NO: 4334 - DNA, 6000 bp, Homo sapiens
cccgagctcaagagttcaagaccagcctggccaacatggtaaatcctgtctctactaaaaatacaaaaaaaaaaaaaaaaattagctgggttggtggcacacacctgtagtcccagctactcgggaggctgaggcatgagaatcacttgaacctgggtggcagaggttgcagtgagccgagatcacaccactgcactccagcctgggtgacagaccaagactccgtcttaataaaaaataaataaataaataacaagtccatcatcagttaggccctgaccaaatgggctaggggacatgaggacagatggggacggggaaaaaaaggagcagataccttagctcaggtcctcatccccagctgggttcccttctcctccaaggaatcctttccaggagtggagaaagaggcatctcagtcagacagccagggtccctggaggccagactttttcatcccctttcacatgtgaagaggctgaataatcatcttatccccctgtattagctcattctcacattgctataaagaactacctgagactgggtaatttataaagaaaagagatagagccaggcatggtggctcatgcctgtaatcaaagcactttgggaggatgaggtgggcagatcacctgaggtcaggagttcgagaccagcctggccaacatggtgaaacccagtctctactaaaaatacaagaattagccagatgtggtggcctgcgcctgcaatcccagctactcagaaggcttaggcaggagaatcacttgaacctgggaggcagaggttgcagtgagccaagatcccaccactgcactccagcctgggcaagacagtgagaccatatcaaaaaaaaaaaaaaaaaaaagaaaaaaaagaaaaagaaaaagaaaaagaaaaaaagaaagaagaaaagaaaagaaaggaaaggaaaaaagaaaagaaaagaggtttaattgactcatggttccacaggctgtacaggaagcatggctggggaggcctcaggaaacttacaatcacggcagaagatgaaggggaagcaggcatgtcttacatggctggaggaggaaggagagagagtgaaggaggaggtgctacacactttaaacaaccagatctcatgagaactcactcactatcaagagaacagcaagggggaaatctgcccccatgatccaaaccgtgtcacctgcctgtattatctctgtgtgtgtgtgtgtgtgtgtgtgtgtgtgtgtgtgtgtgtgtgtgtgtgtgtgtgtgatggggtctcactctgtcacccaggctagaggagcatgatcatagctcactcactgcagcctcaaatttgagggatcctcctgggctcaagctatcctcctgccttagcctcccaagtagctaggactgtgcctagctaaaataccaaactcttgatttcagctccttttgtcatcatttgtccatttcttctacaatcttaaatttttttgactggggtttctatgttgctgaatttggtgacattttcactaacccagaacacacacacacacacacacacacacacacacacacacagccccattaaagttctttccttcaatgaaattggcaaaggggcataaagaaaactggaacctaaggacccagtgaggaagcaaagttccactttccactggaaactggtcttttacaataatcccattgcacctaggagctggaccaggctgttattttagagtttaaaagttgtcctcccttcttctacctggctactggcttggggctttaggtgggtgaggcctacctccacaagaaaaatccacagtgaaaatggtgacagttggagggtgctggagttgagcttagccttcctcacttcagaagagctaaatgcatacaggagtgcaacagaagtcaggaatctattgccagaggggccagagaggggcaagggccttcctgctctagggcccttccccagaagatgttagctatgggtcaagtctctacctcctccccaacccccattctccattgcatccttggaaccaggagcccagaaacctgccagcccagatgaccaggaccatgtttgagatgcataaatttggtcctctggatccttcaaaagtacactgtatttgtcactccccgtagaccctcatgcaataagttcttcatgctctgtacatcgattctttttctccagcagttctgagcaatgcttcaaaaacgaaacatcagattccttgtaaagttaaaaggaacagatttttttcccacataccatgaatttctcattgattggtttagttacaatatctaatgtgtccacaggtatgttttaaaagttcctttatggggcagagagagcatttttttaatactctggtttcacttttttgcatttaaatactttctcacatactcaatatttataaaagggttagagttcattttaacaaatcccattaaataggcagggcttttcaaggtcttgcctatgaatttcctcatttcaagcactgtttagtccaggtaagctccaatagaacctgagaacttgggactgccaggccaactctaggtactagttcctgacatttctttgaatatttgggtggtcacatttgttttctttggtcatacttacccaactggacctcttttttgttgaaatgtgaactctactgctagccagttaaagttcattgtttttcagaactttgattttgaagatgaatatgactttaacctggccatcatgtactgctttttcatagttaattcaaaacagagcagaactctggggattagttcaatagaaacaatgtattcttcaggatctttctctaagtagaggaactttcttgacccttacacagcaatatatggactttttggactaccagctcatggttattcttaatgtgatccagaccccagggccatccccaggaaaaggaagcaaagcacctccccacagtaggcctgtgctagacacagtggacacacagtggaaacaaggtccctgcccaaagacctcaaaatttattgtgagagatgaattggtaattaaatagctgattattttaaaagccctaatacagttgtgtttcatgtacataactgtaaatgaatgtaaaaagtgctgtaaaatcacagtgggagggattcattcttgcagtgaggaagaaggatgaggattgaggaagacttcaaagaggtgagttttgaaatagggtttgaaggacaagtaagagtttactaggcagagatgcatggaaagaacattccaggcagcagagacagctaaaataaataaataaataagtcgcagagtaaggaaaaggatgggaatgagaagtggttcagtgttactacagcatagagcaagcttgtccaacccacagctcaggatggctttgaatgaggccaacacaaattagtaaactttattaaaatatgagatatttttacaattttgttttgtttttgcttattagctatcattagtattagtgtattttatgtgtggcccaagacaattcttcttccagtgtggctcagggaagtcaaaagattggacacccctggcatagagtattttggggtgacatgatgggagctggagaagtaggtaggggtcagaattcagaaggccttggacaccagcctaaaggcttagagttgctcccattggccatgcactcaccaaaggtgttcacgtccctcttttggctgttagattggatgggctcaatcttttggccctctgtctctagaatagagccgctgcttttctactgggcccactatttcttcctggtcctctgatccccttagcactacacagatctcgatatttgcctcgggtatcaaggctctgaaaatgatcaggatttagaggagatggctcattttcagaaagagttttatattctccctctggccttatacactacaggcaaatggcaccgatgttttggagttgggccagttgggccttttctcccctcaagagaggaggattcgatattcagtgtttctgaatttcatgcttagttcttaagccatttcccatttgccctaagaaataagagctggcagcaagctgcgctgtttttttctaaacgggaaatgggttaagcatttgtgatcaccactgaatgagtgccagagctggttagtgatcttcctgttcaatccgaggtcacctaactagataacaaagagctgaaactaaaagtccggtctcctgactcccaatccagtactctttctggtgtgctccagcttctggctctgcttagccaattatggaacagacagaatgtacttggctgccccaaacggctaaagggcagttctgttcccaaaatggaattctgttgtgcctcaagctaggcagcataattgtgtgtcttttggtaactccctgtcttcttctgtaaaatgggagtagagcctacttaatcctgcagctacttctaagatcagggattggggcgtggtgggctgttctgcagctgttttgtgatggatgagggatgatagatctatgttcaagtagcggaatcttagagtcaggagttggaaggaatcttggaggtggtctgtggtgacaggaagcctcttccaatagactgaacacggaagacttcctagagccggaggacaagggtttctttcctcttagcagtgagcttcttgtttttggaaatgctcaagccaagaatggatgttcaggcagaggggattccgctcggaaggggctttctgcactgaagtggtggccagcgggaaactccaggtttccaactcctgcacaaatcctttctaatatccatccactcaggtgagctggcagggcagtagctgtgcagggttcagggtcattatatgtcaatgaccttcagcacggattactaacaacagtaacatccgttaccgtttactgctttcctattaagcaccatgcactgtgcataacatgttatctttatctcatatctagaattttgggaggtactttgaatcattacgatctatctacttcttaggtgaggaaatagaggtttaaaatttagtccacagtctcgcaaggatggagcctggatcaaattttgggttatcagattccaatcacgtttcttagcttttcttttttttttccaactccagtttctgtcttgctccaaaaaaggggaaggagcggctgcggcgctcggtttcccgcctcctagggaagggaagggagacgagcagcgcggaggctggggcccccttccgggcggggcctactagtgggcggggcctgtcagtgagcggcccctgcccggaaggagccagtccggggcggagccgatggccttacaggggccggaagtggcctgcgggcggagaagtgcctcaggagtcctgacgcagtgtcttgggcgctaacggcggcggcggccttgtgtttagactccagaactccccacttgccgcgttctcgccgccgcaggctcccgggacgatggtgccccgcctgctgctgcgcgcctggccccggggccccgcggttggtccgggagcccccagtcggcccctcagcgccggctccgggcccggccagtacctgcagcgcagcatcgtgcccaccatgcactaccaggacagcctgcccaggtgagcctggcctccgggtccccgccgcccgccgccgtcccaggatcggccccaacctgactgcagtcactcatgactcctctagtgaacccgtttccgcccccaagcccctaccatggaggctgccacagcccctaatctggaagtcttgggacttttcacaatctcctagcacaggaacctcagaaccctcaaattctcttccagaacccctcgatgctatctcagattctccatcttgaacgcttctcagattccctctcctttaacctaacttccagccagctatcctgagtcctcttctccctgaaaaatgccagacctgcatatttc

SEQ ID NO: 4335 - DNA, 6000 bp, Homo sapiens
gataagcattgtttctatagattatagattaactaaaagcatttcttatgggaaataaagggattggctgaagtaaagggatgggttgggctagttatctgcagcatgaatatgtccttaaggcacagatcgctcatgctattgcttgtggtttaagaacgcctttaagtggtttttggccctgggtgggccaggtgttccttgctctcattccggtaaacccacaaccttcagcatgggtgtcatggctatcacaaacatgtcacagtgctgcagagattttgcttatggccagttttggggccagtttatggccagatttgggggcctgttcccaacagttgttggccaaagattcatttgattaacctgatttttccgtaacagacgattccgatgattctggtgttagctctgtttagaaataactccaagaacagtttttatattttattttcacattgaaaatcagtcagatttgcttcagcctcaaagaatgtgtctaatgaaaattaaatgagcgctggcagtgagctgcacttttctttttctaaatggaaaaagggttaaggccttttgtctgatcgaaaacccttaaaacagccatctgactcaaaggcctgacagaaccaggcccaccatgattatctaggataatctcttgcatgtacagtcaactgattatggactttaatgacatctagcgactcctggattagtgtttgattatgtaattggggactgcagcctagccatactgatacatcaaaaagactgtcacggtgtcttctatcacttattccattaaccaaagctgccacctcacataacacaataatttattttcacttgaacatttaggttttaaagggacttattctcagagacatgttaggaatcaaaatagaaatagttccatatcattggctcattgaacacaatagttcttgaattagcagttacaacttacaagttgtaaattgtttttccatgaggacttaaaagtttcatgtacattaaatataaatttcttttggctggaaatggcattggtactatttaaatagtctattgctggctgggcacggtggctcacacctgtaatcccagcactttgggaggttgaggcgggcggatcaattgacgtcaggagtttgagaccagcctggtcaacattgtgaaaccccgtctctactaaaaatacaaaaattacgtgggtgtagtggtggacacctgtaatcccagctactcggaaggcttttatatgcatttttgaatgcaaatttttaagatctgtgtggtaattagacatataatcatagttataattattattttatactgaaaaactttccaaaagacatttagggtatcatggccaaagcgagtcactgttttatttaaaactacagtcagttcaaccacaagcttttctgagtgtctattgtagtggatatatgtgcttttctttgtcaacttccccatcagtaaaagcaccctaattttattttggggttccactttctccctgccctcagtaatttggttaggttaagactcaccctcctcatatcccccattttccaggtttacttggaaaatagtttccaggtttaccattttcccatttacttgggcagtcatcatattccaactctctggccacacgactggtgcggggatgggcctgtaacccatgtaagtcaatgaataagacccagcttggtagttattaagatataggttgattgcttaaaattgtaagagtggaagagtaagaaggaaagtcaaagagaaaacagttgagccggaaagaaaacggagtcattcaaatcattattcgtaaagagtttcaagaagtggcgtatcaatattctcaacttaatagttgggcaatatttatgtttttgaaactaacaactaaaatacttggataaaatatttctcctgatttaagtaactataatttcagtcatgattcattgttcccagcaggatctgtatctgtgtaagtgggcatagtattgattttttttcaaaagagaagataggtgatctcattaatttccttttcacatcaaagctttccttttagggttttttttttttccttctctcaaaaaaaatactgaatgagtcagggtgctaatctgctttgctctagtaaattctatcttctcattgtagagatgtttttcaccgtagtaataatttgcttagctgcttggtatttactcatgtattcattcacagttctttatcaggcttcaggtatgtacccaatattgtgccaggtgaaatgagattcaaaggtgtctcctagcctagaatgtaaattctataaggaccttctcactcggagcacagtattggcacattatcagaaatctatacagatgcatttaggatgcatttctgtaacaatggtcacttgtgaggtgccatgcttgaccttcaagtattgcctgaaactcaaacacaagttgagggtttgagcctttgtacttgtttcctacagggcagttattcttcaaaatgcccaggtttaatgatacttatttttattttttattatttatttacttttttgagacggagtctcactgtcaccaaggctggagtgcagtggtgtgatctcggttcaatgcaacctctgcctcctggattcaaccgattctcttgcctcaggcccccaagtagctgagattacaggtgtgcaccaccacacccagctaatttttgtatttttaatggagatggggtttcaccatgttggtcaggctggtcttgaactcctgggctcaagtagtctgcccacttcagtctcccaaagtgctgggattacaggcatgagccaccatgcccggcgatacttatttttagtagttcacaatgaaataattaattatatttagtgccaatacaatttcaaataatgatgctggaatgacacccgataccacagtaggcaatgattttgatctctattagtttactagttatagtgggttaaatagtgacttcccaccaaaaatgcccacatcctaattcctgtaacctgtgaatgtgaccttatttggaaaaagggtctttgcagatgtaactacgttaagaatctcgagatgagaccatcctgaattatctggttggtccctaaatccaaagacaaatgtcctttacaacaaaaagaagagaagagggcacagacacagaggagaaggcaagtgaagatgaaggcagagactggagttacgtggccacaagccaaagaattcctgaagccaccagaggcaaggaaggattttctcatagagccttgggagccagtacacacctgctgacaccttgattttggaattttagtctccagagcagtgagagaatacatctctgtttgagcattaagtttgtggtaatttgttacagcagacctaggaaactaatatgttagttcgtactgattatttaattaaaggctctttttgtattgttttgttttctaaatagtctgcagaaacctacctcaatttttgtctccatccaatagagacacctgtctgtctgttgagatttggtggaaatccaagggttagtgtttctgggttatttttcgcctaccacagatagtgctgaaagcccatttagtacacaaatatgacacttctgaataaagtggcttcaacaactggtctggagatccaagtgctattcaaaaaagtgacactcgttctgagaggcgattcctatgaaggagaagctccatttgcgaagttatagcaaggttccttccataatgcacagcagctgggccagggagccgggagtcgtcgcttctggcctacccatctctgggctacttcccgcaactcactttccctgtgtgcctggaatgcttcttcctatgaggccgttagtcaaattaagtagaggcctttaaaaattagccatccatccaatctagagaatgtccactacgcttcattctttctcccttaccctgttgatttcttccatatcacccagcgctgatggtaattgtatgaatacatgcttatctgtctgtcctcccacccctaactctaaattcaaggaactctataactgcacctagcatattgtctgacactcctcaataaagacgcatttaatacatagacaaataatgagtgaacattttgagtggagggccggaaaatgtctatttactttggagttggaatcagactgttcaagagtactttcaaaaaaaattttgctacgtcaaacatcattgaatttcaggattgaaagagtggtggtcatatagctcaatcccctccaaacacccccacccaccagatgcgcgaatgccctcttcagccttcctgataagcatgacgaagatgctggcggaagcatccctggtatcaggaaactcatgacctcactagttttgatcttttccatttagctttcttttcccactcctcccagttattgcaaccttaattgtagcattttacacaactgctgctgcagagttctggaagtctgggggtgggagggacgggggaaccccagtgcctatctcaagcctgcggtcaccgacgcgggtccggggtgggggggtactgccagggaactcgcggcaccgcgtgcttgctgagttcgcctgggctctcggcctccctgcgggcaggggtcctccctccccagcgccgggtctctcctcccgcaggcccgcggccacccgcagcggcattccccgccgccgcccccgccacctgcgcgaccgccctagccgctcgagtccgctcctcccgctcaggggcggctgcggagggcgcggggcgcacgcgggcggccacccgactcttccctcccttctccccaccccagcctgctcctgctcagccccacctccccacgcactcggctgccctcctcctctcctgagagttgccccgcaccttgggcgaggagttcggagcggccccatcgcagagcccacggccagccgagcgcgcgcgacgcaggtgcccgagccccggcgccgccgccatctctgccttcggtcgagttggacccccggatcaaggtgggacctgcttccctctccgacaccccctattgccacctcttcccgctctgggtaactcgagaatggggctttgggacgcgcgtggcagacgcggagccccgcgggccgcttagggactgggagtccggggcagcttagcgggaccaccagaggggccagcgcccggcgggcggcgggggtggggtgggtgcgacgccgggcgactctcggctcccgtggggcgaggaagatctggacacacggctgacagcagccggcagcgcctggagcgaacctgctcgggaccaccgagagagcatgccacccggccaacttcttttccaggcttcgtgcctactttggaaactgaagggactgccacctaaaacagtaaaccctggggtcctgaagagaatttgctggttcgaatgacaagagaaaaaataattgttctgtagggatggtttagacctcagcttttgtttcccacctccccccttccctgcaagcaaattaaacaacaacagtagcagcatcagcagcaaaaccccaaacccaatcctaaccaaaccacttactgaaagagatttgtagtggtgagaaaaagagacccaactgaggaatcatttgggaaccgcaggtatggtgccatttaaaaactggttctttctggtgttatttctagaacttgtgtttgcaaacagattagaattctgggctcttgtcagcctaatggagttctttatactgaagggtggcctggggtgtcctctgttaacatttatttctgtaagtattaaagtatattgaaacaaataccctttcacggctctggaattggaatcagaaaatctgagttttggtgtgatttccattttattacctatgacactgtggttcgtttaacctcagtgggcctcagtttcctcattttttcaagt

SEQ ID NO: 4336 - DNA, 6000 bp, Homo sapiens
gggtctcaaggtctcactctgttcaaagtgagagtgagaggcaggattgcaggagtacagtggctctcctgggcttaagcaatcctcccacctcggcctcccaagtagctgggactacaggacatggcaccacaactggctaacttttgtattttttgcaaaggtggtatttcaccatgttgcccagtctggtctcaaactcaagcagtcctcctgccttggcctctcaaagttctgggattgcaggtgtgagctactgcacctggcccaaagagactttcttaatctgataaaggtatctacaaaatatctctaggtaacagcatacttaatggtaaaatatagaattctttagaatgtttttctccctgagattgggaacaagaaaaaagatatccattattttcactattcaatattgtactcaaggtcctagctagtccaataagagaaggaaacaaaaatattggaaaggaagaatcaatatgtaattactcacaaatgacataattatatacatataaaatccagaagaatctacaaatactagaattaagtgaattaaacaagttcactaaatgtaaggtccatacataaaaatttattatatttttatataccagcaataagcaattagaaaatggaattttataaaaataccatttacaatagcaccaagaaaaacccctaagaataaacctaatgaaagatgcacaagatctctatcctgaaaactataaaccacagttgagaaaaattaaataaaacttaaaatgaagagccataccatctccatggtttgaaatacacaatataataaagacgtcaatttttccaaaattgatctgtaaacttaatgcacccctataaaacccagatatttgtatgtgaaattgacaagctgcttttaaattttatattgaaatgcacctaatgtagccaaaatagtcttgaataaaaacaaatctggactgtttacactaccagataatcaaggtaaggatagtcacacagaccaatggaacaaggaacagaacagagagttcagaagcagacctgcacatctgtagtcacctcatgcacaacaaaagcacaactgtaattcagtaggggaaattatggtcttttcaataaatactctcaacttactggctatcacagaggaaaacaaaacaaaacaaaaaccttgaacctttcctcacaccatacacaaaaatattttgagatcaatcagtatacctaaatgttaaaggtcaagcagcaaggcttctagaatcatatattgtataatatcttcatgaatttgggaaagctgtcttaaatatgacacaaaaacattatacataaaagattaaattggactgtactaaaattaaaaatctctattcatctaatgatactattaaggcaagctacaaactaggagaaaatattttcaatatatctttcaatacaaaagactcagtatccagaacatataaagaactcccataaatcaataagaaaagacaatttaattaaaaattgtgcaaaaaaaaaaacttgaagagatacttcacaaaagaccaatatgtatataaaaaggtctttaacaacattagccattagggaaaatgcaaatcaaaaccacagaacgatatgactacactcccaagaaaatggatagttagaaagactgacagtacaatgtactggtggaaatgtggaataacttgtacaaccacttgaaaagtatttgggagatcaacataatctagtatcaaagaaaaacttcatgcaaacacttgttaaagatggtaaggggtgggaggcatggtgataggtacaaggaccattgcaaggaggtcttgcagttggggagagaaagtagattaactccaactccaataaggacaagtgggaatttataaccaaggagaagggtggggtcagtggatgaaaaatgcctatgaggaaacatcaaggataaggaatgtctggctaaactgacttgatagggttattgctgaaggcaggccatggtggaaagatgctgagaatggtcagataccaaacgtggggattttccctaaactgacttagcaggattcttgctcaaactggattctgcaaggacagagagggaagcccaaggtcagacctagtcagagaagactcaggatcctgacttaagttttggtcaaaggagggagtctttgtcactagatagatgtataccctgtcacccagcaatgtcactctttgtatatttgcaactgaaatcaatgcttacatctatggcatcttcattcataatagtcccaaactggaaatagtccaaatgttcatcaagagtgggtggtaagtaaattgcagtattttttacagtggaatggaatggaaaaagaacatattactgctacattcaacaacttggctgaatctcatatagaaaatgttatgtcacaatagcgaaatgcaagagtacatacagcatatttctgtttatatgaagttcaaaaacaggcaaaattaacctatgtggcatagaagtcagaatagcaattatcttttggggggatttactggaagggaatgcaaaggaaacttctagaatgctggaaatattctttggtgaaaggttgtcccttagggtgctaactccctgcatctctggtttctgttatttggcccatttgggctgcctctgacaaagccagatcccagtaccatggtgcagtgatttatctgagccaaaagcctccacacatccattcaatccagacttgggaacgggagagaatggaggagctgcccccacaatctgcacagtgaaggccatgctaaactaggccctcttcctggggaaagctaagaagaaacactggtattaggagatgtgtgaattttagcagcagccaggactctccactgagcaagcagccaagacccagcttgcagggaatgccaagcaaatttggagagcacttaaactgagtctgtcacaccagatgacctctgtcatagggaaatgcagcagctgcagccaacaagggcaggacaactaaagaccccactcagggatgaagggtgggattaccccaacaagagaacaaacaatacagatcaaccaaaatgctgagtaaaagtgagggaaataggtgataaaggagggagattataaaagccttgagaccagctgtaacagcaggcattgcaatttatttcaataaccttcttgccttatgcacttgagcagattgcaattgaccaccactttgaaggagattctgtaaatgattaaacttgtaccttctctcaggggaaaagtgagacagctagtgctcacacacacagaaacacaaatcctacattataatattggagcttgatatgatgaaagtactagagtgaatctgagcagctcagagtgaactgtatcagactcttcttattgaacctcctcagatttgcttggttccatctgtctaccgggcactcagtcatttgctccacctcagtcactatccactccttgcaggtccaagcagttccactgcctgaggtcaagctgccacctcttgtaacccctggctcctcacataccacaaggcatgggggtctctctttctaagcgactgccgaaagggctggatgacacagccaggaagtctggggggagatgatcacctgtagaagatgagaaggagccaaacgcttttccttcctctctccaaagggctgctccaaggcgtggtttctttgcacagccccttaggagacaacccacacaggaaggcaagggcgcctgtgggctggcctgctgggtgtctccattgcagggcttagtaatgctcctcctttagttgcttcccagccttccctgactcatttccccattccctcattctcactgctctgggattaaactctcaaactcttagcacatatgcctgccttaggctctgttttttagggaacccaggcaaagacacatacatttggggtctgagatatcttggaatctacatttttaaattttgtatgaataataaatgtatatgtattttgatataaaagcatattttggatcatctggacaaccacattataattgagcatttccactctatttcagtgtttcccttttaactgcttaagattatgctagatataaagggtattcaattaggaaaagaggaagtcaaattgtccctgtttgcagatgacatgattgtatatctagaaaaccccattgtctcagcccaaaatctccttaagctgataagcaacttcagcaaagtctcaggatacaaaatcaatgtacaaaaatcacaagcattcttatacaccaacaacagacaaacagagagccaaatcatgagtgaactcccattcacaattgcttcaaagagaataaaatacctaggaatccaacttacaagggacgtgaaggacctcttcaaggagaactacaaaccactgctcaaggaaataaaagaggatacaaacaaatggaagaacatttcatgctcatggataggaagaatcaatatcgtgaaaatggccatactgcccaaggtaatttacagattcaatgccatctccatcaagctaccaatgcctttcttcacagaattggaaaaaactactttaaagttcatatggacaagatgaaattaatgcttatcaccatctgaagaccaaatgaatttatgaacgaagagatatttcaagtatttcaatacaagaaaatggggggccaatttgaggttccacctgaggtttggcaaattgaaagaatatacacagccactgacagcccataattcatgttcctagggacatttagtttcagcaaaataatttaatgatgttaattggaattttattgactggtaggagctatgcaatagagaaagcagaaatctgatgaggaacttggagtatgctttgcaaagtaagatatacattttatctttactctccattataaaatagtcaataatatctacatcacttgctaatgcttttggtacaaatggatgtggaatataattgaatattttcttgtttaaggggagcatgaagaggtgttgaggttatgtcaaggtaaacaaaaccaccattgtggtaaagaccaccatgagggataactgaatatatggcttacaaaatgtttactgaataagcagaacagtctggattttcctgggcaggagggggttgggggctttgggtgggttggtgtccatggcttggtaaacatttccaagaagtaaacaaacctatcagcggccaagctgcttgtcacctgtgagtgcttccaaggaaccggatgtgggctcccccacccttaccccagcatctggcacagctgaaggcagatggaaatatttacaagtacgcaatttgagactaagatattgttatcattctcctattgaagacaagagcaatagtaaaacacatcaggtcagggggttaaagacctgtgataaaccacttccgataagttggaaacgtgtgtctatattttcatatctgtatatatataatggtaaagaaagacaccttcgtaacccgcattttccaaagagagaaatcacagggagatgtacagcaatggggccatttaagagttctgtgttcatcttgattcttcaccttctagaaggggccctgagtaattcactcattcagctgaacaacaatggctatgaaggcattgtcgttgcaatcgaccccaatgtgccagaagatgaaacactcattcaacaaataaaggtaagttcatagtaattatccatacttttttaaaaatagcataatgttgtgatagagagaacatgagtgccctattccagctgcacgacactggcatgtatttttatgtctaagtctcagtttcttcatctgtaaaatggaaataataacaagttaaccattaggattcttgtgtcagataagataatgaatgcaatgcacataactcagagtgatatactgttggcaactgat

SEQ ID NO: 4337 - DNA, 6000 bp, Homo sapiens
tccaaggagctcagattcttcttttgtaggaaagtcaattattcattccctcattcaaaagtattattgagtgtcttggagcatgctatagtttaggtaagaacaaatcaagttagaatcatcatacttggtaagaggagatgcacaaataatgccctttatcttacatggtccttttaggcagtactgtgattaagtgcttggacctctagagccaggccacctgacctaaaaaggtagctctgtcagttaaaggctatgtggtattgagctagtcacagagcctctttaaagccttctgtttcccatctattagatgaggatagtatctcatagggctgctgtgaagacttaaggtatgtgtaaagtatttggaagaggacctacgtaagtattagttgttattgttgatacagatttaccatgtgctgaaacagttgccaattctcataacaagtagcaaaggatagtaagtgctctattttttgttgaatagaacttcctagaagccatgtgtttctctgtagatatgtctagagtagcctcagattccttttccatcatatttcttaattctgaacccaacatcaaatcagttattgtcctttgctgcctccgttctgtttttttgtggaaaaggggaaactgatgggctgatttttttgtttctgtttttacatcatagataatcagagttatttttcattacttatcattggtagacttcttactagtttgatccatgctatagtctgaatattgcgtcccccgcccctccattttatatgttgaaatcctaacccctaaactgatggtattaggaggtcattcctttgggaggcgattaggtcatgatggcagagccttcatgaatgggattagtggccttaaaaaggaggcctgagagagaccctcactccttccactatatgaagacacagcaagaagtcaccctctctgaactagaaagaagacacacacacacacagacgtggaatctgctgttgccttgaacttcctagcccccagactataggaaataaaaatttttttttttttttttttgagacagagcctcactctgtcacccaggctggagtgcactggcatgatcttggctgattgcaacctccacctcctgggttcaagtgattctcctgcctcagcctcccgagtagctgggattacaggtgcctgccaccactcatagctaatttttttatttttagtagagacagggttccaccatgttggccaggctggtctcgaactcctgacctcaggtgatcctccagcctaggtctcccaaagtgctgggattacaggcataagccaccatgcccagccaatttctgttgcttataagccacccagcttatggtattttgttataatagcctgaatatactctaaaacaatcctttaaatttttaaaattattattctgattatcagagtaatatgtgctcaatataaaaacaattcaaacatacagaacttgatgaaaggccctagtaatcccacacccagagataatcaccattaacagcttgttatatatgcttccagacttcttctgaagcatacatttaataacatgtatatcttaatgcaaaaaagtacaaaaaaatggaatcatactattcatattgttctgcagcctccttttttttcacttatagattttggacatccttccatgtaggtacaaatagatctagcttatttttgttaatggctgcttatggtttccttctacagatctagcaaaatttgcttaaacagtttcctactgggactttattatttgatttttacaccattacatgttcccactattacaaacaatgttgcaataagacacgtatatatatatttttgtacatgtgtaaatatttctgacataatttttgcacaaatatgcttaaagcacaaactcttagacatggacttacctattcaaagggaacacacctatttatcaaaaatttccaaattgtcctccaaaggggtttgtccaatttcctcttacttttacagtgtgtgagtgtctatttctccacatttgactgttttctgaatatcacttttttcttttctcgatttataccaatcttaaaatcatgtttttcaagtctagaatcacaatttaaaacccagggaagatcaaaagaacaaagtacagaagattggtttttttggttttttggttttgagatggagtctcactctgtcgcccaggctggagtgtggtggcaccatctcagctcactgcaacctccgcctcccaggttcaagcgattctcctgcctcaggctcctgagtagcttggattacaggtgcgtgccaacatgcccagataatttttgtgtctttagtagagacgggttttcaccatgttggtcaggctggtctctaactcctgacctcgtgatcctcttgcctcggcctcccaaggtaccgggactacaggcgtgagccactgcacccggcctataatttttttttttttttacaaacagcaaaacattccatattcattataatagtgggctgttttcaataaaaatatcacaccactagttgttaagttttaaaagacctctcatctcttagatcagcaaatctgacactgattagatcacttacacacactccctgcccatacacctccttcttggcagtgtgtggaacaggagtggctgctggcaaggagggtcggggaaggaaagtgagagcaaaagggccgagggctcagaatctggtggcatcttgtaacgggtctcgggcagtcccttgagtgtattctggacctctctgttcatgttcctgtttgggctgctcttcttcacgtccaatgcctgagggccaagtgctcaccatccaagggtcaattctatcagctcctctctgaatccttttctgaaaccctggacaatcattctctttaatgtctcactgtctctgaaccgacaccttcctgagtacctgtaacatttgtgcagcatgcttattaagaatatttagatgctgggtaaacgttgattgaacatttgctgacatggagagatattggtagaagacagattagacttccgatggtttacagaaacacatggattcagataaaagaagatatgaaagcactgggttgaaccacatattttattacaaccaaataactccaaatatcccgccttaatttatttattggcccctgcctctgctcacccacaaaaaagactgcaaatgaaccccgatcctacaacaacaacaacaaaaaacggtgacattatcgggctgcaaaaccctcttagcatagaataatcttttcatctgcctctttcagatgtaacatatttttgacgaaaagaatgggatgaaaacggcgggctcagataaaaacaagaaccgactttccaatacagcttcaataacagacggaacacatgaagctgagaaactctccatgccaagtagtagttgtgtgtgccccaaagctcagataagtacttctccttagagttggaaggcacttaagtgactttttaacgtaattcaactccccacccccagcgccaagtcttaatatcagagttttagtcgacgggacagcctccttcgcccaggacgggtgaaggctcctgaccatgcctcgcagctaactggcagctgcgcctgcccggcaccgagccctgcccaggtggacgcttgcgagagcattacggcgatggttatgtaggctgccgttcttcccctcccaagcacctgctccgcatctagcagtcgctcgccgccagtctccaaccccgggtcccctccctcgccacacagaccccgtccggtcaggcgctgcagggccaccggagaaagcgctcgcaatcacatggaggcccgggcccgccccattggctgcggccgggccagtcgcggcactcgccggctgcggttggtcccagagctgcagcgcctgcacgggcccggagtccatgttacgctttgtctaattcccctcgttacagagtcatgtgctgctgctcccgtcgccgctgctgccgctgccgctgccgccgcccgtggtgccccggctcctccgccgcgcttcgaggtggcagccgcgggcggggccgcgggagcagggtccagggtgcagcgcgccttcgccgccccggcgcgtcccggtgcagccgccgcccgccgcgggtgatgccgccacctccggcctcagcataagccgtggcttggcggccgagctgcaccccaaggttggtgcgcacctctcccggcaggggccgggggctgcgagggaaggcgacgcgcaggtggagccgcgccgagccggagcgcgcaaccctggcgcaggcgccgcggcccgagctgcggttgcggccgggaactcattcggggacgtccgggggtcgggaggaggtggcggcgagcggagtgggctcccgtttgctgccgccagggcctgggagattgttccgctttctgcagtctgagcgtcggccgcttcggccccgggcggccggccctgcgggaggggagtgcggcttcctggctcctgaacccctcgcgcgcgctcccttctctcacctccctccgccctatcggaaaggcggggagagccggtttcggctctgctggttcctcccggaggtgggtgtttggtgtctggccttgctggcccggcgtccaaaggtgagccctttaacttctccagaatcgcctcccctccgcttccttcctgtgcagggtgggctgcgctgggagcccggcgggcgggggcggggaggtgaaggcccgcgccccgccccccgcgcctgtgggagggagctgggggcccgcaggtgcacccagccgtccgcgggccgtctccgggttgggtaccggtataatccgcttctagcttgtttggaggcgtgggctcttgggagcgggacttctgctcaaatcctgtccaggggcttgaaaaggaggagaattgggggtggttgccgggaggaccagcacctccagttactggagggttgataggggccttctcctttccgtcaccctttactagggggtatcccttgcagataaatgagattttttgatttcttaaaaagccagctgcagtgaagaagaactgctgcaggtcgaggggaagagaggtaggtccttgctggagagggagaggtgggctgtgaggttccaggagcacgcacttggggtgtgtgtggccgaaagtatggaggtagggttgtgggaaggaaacagccgagatgagagggagggcgcactcaggatgtaggcggagagatggggaataggtactggggagtcctagcggaatgtggggcccagctggagccgcttggcttatatttggctcctcgttgcctcgcagatttcctgctcttggatcttcaaaaatatttttttgttggacaaagaaaactctgaggacatattttggaagagctgatttctggaaactttccttggcagctttgatagtaaaattccgtacaggcagcgtttattgagcacctattacgtggtttgtaccggactttggaagagtctggacaggcagggaatccccgtttgcagtaatgatgagggctgtctaccttataaacaaataaggggcccctcccagtgccaagaatgagagtgatcagaccttcctcgccatagcatctgggacctctgcttcttacagacctgtgggaagaaccctgcaccatatcctgtaaatggggtcctcaggcagcatttatttttgcagtccaaaaatagtgaccaaacacctactgtcagctaggcgagagttggggttcttgcttcatctgtcttgacaccaactaactaaatccctgttaaaatccaagtgcaagatggggaggaatctgagatgaaaattaggtggttaaaacaggggtcacgaaaagttgatttggggtgtttggtctctgtaggttacttatggagccccccataaaatgatta

SEQ ID NO: 4338 - DNA, 6000 bp, Homo sapiens
atagtacaggtaagagtacaagttttagaatcatagtcctaagttcaaattcagcccatgctacttttcagctgtgtgatcttgggcagagtacttaacctctcaaagcctagttttcatctctctaaactagttattatacctacctcacaaggttgttttaaggattcatgagacactgcatgagctaaagtataataaacgttaattgctgctattattctccataatgaatcagaatcatgttaccaatcgtatatgtttgaaccctacatcatccacacattgtttctacgtggaaatacccgaatgccacctggaacactggggacctgtgtcccacccctgccccagctatggcactgtggtgttgcattcttccccctactcccttaccccacctcccacagggaaacagaaaggggagagaagagatgggaattccctagaggggagagaaatccctgaccatgaacttctaagatggagactgccttgtaagaatttttaagattttagctcttgcttcacatgacagaacaaaaaaatgatgttttatttttattttttatttttttgagacagactctcattctgtcacacaggctggagtgcagtggggagatctcagctcactgcaagctctgcctcccgggttcaagagattctcttgcctcagcttcccaagtagctgggactgcaggcgcccgccaccaggcctggctaatttttgtatttttagtagagacggggtttcactgtgttagccaggatggcctccatctcctgaccttgtgatctgtcacctcagcctcccaaagtgctgggattacagccgtgagccaccacacccagccaaaaacggatttttaggactcaataataaaagtagctcctagaagagaaatcctaaggatctaaataaatcctgaatataagtttggagtcaccaaatacaaatctcagactaagcctcttatcctcctgagtgttgctcctaagggggctcttgctctttctgggcatggactaattacggagcattttctcctgcactcatagagccacttacaaagaagacaggaggaggaagggcgacttagatgcccatgtgctcccatttcacattgtgttcataatgcagtgtcaacaaacagtcattcctggttgaagtgagtatacattccattattctcaaaagccaaaaggtagaagcaactcaagtgtccatcaatggttgaatggataatcaaaatgtgatatgtatattacaatgaaatattaaaaaggaaggaaattctgacacatactacaacagggatgaaccctgaggatgtcatgccaagtgaaataaaccagtcacaaaaatacaaacattgtatgattccacttacatgagatatgtaaagtagtcagattcctagaaacagaaagtaaaatggcgattgcaaagggctggaggaaaggagggtgggaacctattgtttaatgggtacagatttcagtttgggaagatgagttctgtgaatggatggtggtgatgatagcccaacaacgtgaatgtactaatgtcactgtacacttagaaagattcagatggggctggtgcagtggctcatgcctgtaatcccaacagtttggaaggccaaggcgggcagatccacagggtcaggagttcaagaccagcctggccaacatggtgaaaccctgtctctactagaaatacaaaaattagccaggtgtggtggcaggcaccagtagtcccagctactcaggaggctgatgcaggagaatcacttgaacctgggaggcagaggtggcagtgtcattgcactccagcctgggtgacagagcgagactctgtctcaaaaaaaaaaaaaaagaaagattcagatggtaaattttatgtatattttaacacaatttttaaacttcttcaaaaatatgtatatcacacacccaggaaatctgttcctcatctcctgttgcaccacctttctcccatccccaacaggagggaaaaaaaccttctgggaccccttctcaaggtctctcccataaagggcagcctacggggtcttcctctgccattcctggggtcttggagcctggataagtggtaggcaagggtttggaagctgtagctgctagcgcataacctgctgatggcaacaccagtttcattcttgtcccccctctgccctgcccctggggagctgcaggagggttctcctgagtgtcctggctctcaacctgggagaagggggaaaagacaagcctttggttcccagccttggccccctcctttccacttctcacttccctgtgttcagttattctctgaagcatatttgaacactcttgggtacaaatgtgttctccgtggagtccattgaatagtttgtgcattggcctgatctagcaatcaatggacagtttaaccaattgcttcttttcctcagattttctcaggtaactccctagtgctatcccctagacaacactaaatctggagaaataaagctttgttaatgtttttggatagtttccaagctgcacagcttcatggatgaccaccagtaggcatcataaatgttcaattatgctgaaacaattatgaaagtgtgcctgggtgatccctgcatttgatagcatgtggatattttttaaggcccacaattaagaccagtgagaagcaatgctctaacacattcttctgtttcatctatttcctagacacgtgttctttatgaattcctgcaacctggaagtcaaaggtacgcagctcaaccgcatggccctctgtgtatccaactgccctgaagagcagcttgactccctggaagaggtccagttctttgcaaacaccagtggtaggcactaaggcctggtttgttcttttccccatgatggggtaagctgtggggacctagatgagatcatttaccctgactctgctttctctggaaagctggaagttttacttccttgtgggtgcctctttttgtgtggaaaaggccgtaagcattttctcttgagcttgttcaggttattttttttctatctggatttatctgaagccctagctattccgtgtatgctccctgccactgcagggaatggtcatccacagagagagagaggagacagcccacatttaagacccaaaggcggtgtcagaaggaaggcagagagctccatgcacgtgggcacatccggtcctagagatgtacgtgcaggctgcgcgtagaattgctgacaaattggtcttttcatgagatttttggggccaatagatacttccactgagcagtgggatgtcacaagttgtaccagaagcacttgtataactaaaataccttgtactgggtccactgtttagaattttatctgtctgagaaatggtttgccagatttttaaaaattatttgcaaagccaggtttaaactatcaagcttctacaagaaattgttttcaaatatgcttcagattattttaggaccaatcatataacttttagttttgaatttggggttttgaagagaaagtaaggaagagaggccctcactagacctcagattgtatgcctattacttttgtgtttctgtcacccatagaccttgtagttgattctttctcctttctggtttggtaacatggctgtggtttccttactgactcacctggaaagaaggtataatgtctgtgtgttctgcttccagggtccttcctgtgtgtttatagtttgaattccttcaactatacccacagtccaaaagcagactcactgtgtcccaggctaccagttcctccaaggtaaaagcttccatactttttccttaactctaaacaaaagttactgggtacttggtgtgcatctgttactcttctaggcattgtgggaaggagatatcagaagagcccctgcctgcagggagcttacagtctacggaggccagcgataaaaacatggagggactatttgcagtatgcctatggacagtggattagaaatcaggctaaataaggagaaaactcagcaagcaataaaaatacacgtagtcttcaaagaacactagagctagcaagaagtaacttatgaattattactaacggggtgattttataaattagtgtgtatttttttctactccaattatttattgcaaagtagaaatcatttactttggccgggcatggtggctcacacctgcaatcccagcattttgggagactgagccaggcggatcacgaggtcaggagatggagaccatcctggccaacgtggtgaatccccatctctaaatatacaaaaatatatactatttttttgtatactaaaaatatactaaaaatacaaaaattagccgggtgtggtggtgcatgcctgtagtcccagctacttgggaggccgaggcagaagaatcacttgaacccagaaggtggaggttgcagtgagccgagatcgcgacactgcactccagcctggtgacagagcgggaatctgtctcaaaaaaaaaaagaaaatcgtttacttttggctttttatcataattagactctgttagtttttattgctctagatatcttcataagaaacagaccagatggacaaggccaagtgatcaccacacctttcttaatgaaaacagaaagcacaggtccttatcaagagtacacttggtgggctccttgcaaggtcttattcacccctgtaaattagtgtactacctggcacatggtaggcaccttacaaatatttgtagaataaagttgtaatgatggaacggtggttgcattgccatggcgaatggctcatgtttacacctttgagaaggctaaggggaaaaatacaatgagtgtttattgccaccattatgatgctgagatgtactaaaggaaaacttgtattgattttgaattgtcattcttttgaaaaatgtgagtatgtttacaatgtaggagacctctctgaaaaatccctgagaaataatgattatttaattaaaacaaagcattattccaatcctctagggtggtgtttattgaactcttgtttgggacttacagtaagaaatttattacatcccaactcctgtatgcacataccttcatatgtccttacatatataaaacaaaactagaaatctcacaaaacaacatttacccttattacatatgattcacactcttagttactactctgttgcctttttaaaaataatgtatttcatagtcttataactggttgcaagtgaagcttgaaaaatgctgaactagcaggtgctcacaaacacaaagagacttgagaaggtttaaatcacatcggaggcagaaaatagccattttgtgatattcttttctaaaataaatactccatgttgtaagtaattgaaggaggagagaactatttgctgaggagaatacccatttcatttttctataatattcttttttttgagacagagtcttgctcttgtcacccaggctggagtgcagtggtgcgatctcagctcactgcaacctccatctcccaggttcaagcaattctcctgcctcagcctcccaagtagctgggaccacaggcgcatgccaccatacccagctaatgtttttatttttagtagagatggggtttctccatgttggccaggatggtcttgatctcgtgacctcgtgatccgcctgcctcggcctcccaaagtgctgggattacaggcatgatccaccacgcctggcctataatatcttatttttaaaattctggtaattgtaaatgtgtttatgatattttacattctggtaaaatgtaaggtatcataaacacatcttaatgaaacatactgaacccaatttaaaaaaaaactagaatgttttagtaataggtggaaggaaaattctctagcacttggagaggaggacttttttaagaacacaatttgtaactgtagatgtaactacggatggaattgaaagagaatggaatttttaaggttgtaa

SEQ ID NO: 4339 - DNA, 6000 bp, Homo sapiens
aacttctaccataattattctctaataacatctgtattttcaagtccaaagaatattgcctttttaaaaaatatattattatttttttctttccacaataagacatctgaaagcaagaatatttccttttcttatctttcttgtcttctcttagccaactgaaaaaaaccttttttatgaaattattttcttctgttgacttttttcttttcttttagacaagcatgttgacattgacataatataccattttctttgattctcctcataccactattgttctatctttatattcttcttaggtctctctttttctatctactttcctaaaaattacaaaaacaaaacaaaactgttggctgagcacagtagctcacacctgtaatcccaacactttgggaggcagaggcaggaggattgctgaaggccaggagtttgagaccagtctgggcaacatagtgagaccccatctctacaataaaattttaaaaaaattatagctaggcatggtggcacatccctgtagtcctagctactcaggaggctgaggtgggaggatcacttgagcccaggagttcaaggctgcggtgagctatggtggttccactgtactctagcctgggtgacagaggcacaccctgtctcttaaaaaaataaataaataaaacttttatttataaaatatattcagaaaagtacttgaaatcataaaacggaaacgtgggtacccaccagctagattttgctgtatgtttttttcaggctctcactttcttttcgtctaagaagcttatttatccccttttggtctttgcatttctaaggattcttagctatggatatctttcctttttactttttgtggcagattaatagttgtccccagaaaactgttctccccttcttgctggtcacgtgttcactcagctggcaactacatttcttatcctcctctgcagtgaggagtggttttgtcagtaagtgcttgccaattaaatataactaggagcaatgaatacaacttttgccttactttgttaaaggaagatggcttgccttggactgctttctttctctttcatggacatgtctgtgaccagctgtgatgatgaagatggggaagacatcctagaagagggtggaacaacaagatggaaggaacctggatcctctatgacctgaattttagaaaggcaaacctagaacagagctgctcttttattctaggcctggctgttaggtgagaggaagagaaacatctattttctttatgtcactggattctgggatctcttagcctttactctaactaatacagaaattgatacttggaaatggaaaacttctaaaatccaaaaacatagtactgcctaagcagtcagaaaattggcagtgaggaaacagacctctcaggctgggaaactgttgatccttgttaggatgtgataaaacatttggtaaaaatgttacctatttaacttggaaggctgatcatgttccttctgtagttgaattctaggggaagcatttggaagagaccagaatatagatatataatggtttctctttgctgcatttagcaaggtttttcaagaaagcaatgagctcacataagaaatgatgggtttgcacgcaggatggaagaaagtaaagaatgtacactctatggccacaccaccctgaatgcgcctgatcttgtctggttttggaagaatttacagaatattggggcctcccagtattggaaagttcaattatttctatagtccaaacagggtattggaatgttgctcagagactttctccaagtcctcccattaagattcttcagccaaagaaagagatctagccttgcagcaaagatcagattaagggagttgccctcacttattttttaagattatcttaaaatagccaccattaaaacaatgaaaagatgaatgagtagatgataggaactagtgaataagcaaatttaagaggtagattgaaaaaataacttgcattgtagttcctggtgaagcaggaaattttccctgactgcttcatgagtaggacccagagtgtgggcactggggctacccagccatttctccactagcaggggtaaactccactcacttgaacccattatgctcagcccctcatgggaaggagcatgcaggtgagcaggtgcaggagctggggtgagtgcttttgggtgccggcaggagcaaaactctgtgcaggccccgtggcagtgtctaatggggagtacctgtgacccctaaaaccccagagagtgtgtgttacagtgcgcttttagctgtgctgtccgtggatggcttaagtgttaaacagctcagtgggccctctgctgttttgcatgaggcagttgctcttcaccagcaagggcagagggtcagtgtgacagcctttggagggatgcctcttatttggcatgcaggaaaaatcaggtttcatgaacgaattgaagggtggtgaatgtggagaattttattaccaatgaaagtggctctcagagggaaggggagctggaaaagggatggaatgggaaggtgatcttcccctggagtccagccatcccctgtcagactcctctccaaagccacaccatcaagctgtccctttgaagtcaagctgcttctctctgacatccagctccttctccttttctcttctctctgctggtggagcctggggtttttatgggtacaggatgacggtggggcaggccatgggtagtttttgaaaaggcaacatttgagtgggaaaacaggaatgcacgttccctctttgggccatggttccaggcttggaggtgggaccctcaccggggacctgccctcttctgcccagaattttcctgcctcctgtccctatcactggcacatgtaatggatgggtgacaaacagcatagaagcctacaagtccccacatggtttcatttttcatgatttccaaaaatattaaatgaaaagttacaggaatagacaattcataagtttttaattgtacacccttataactagcatgatgaaatcttatgctatcccagccatccctcctggaaggtgaatcctgcctttgtacagcatgtccatattgtatatgctacccaactatttgtcatttagtagccctcccagttatgatccactgttgtggtatggcagtgcttgtgttcaagtaacacttattttacttaataatagccccaaagcacaagattagtgatgctggctattcagatagcacagagaagccataaagtgcttccttttaataaaaagacaaaatttctcaatttaataaggcaagaaaaaaattgtatgctgagactattaagaaagatctacagtaagaacgaatcttctgtccatgagattgtgaagaaggaaaaaaattcatgttagttttgttatggcacctcaaattgcaaaagttacagccacagtgtgtgattaatgtcttgttataatgaaaaaggcattaaatttgtgggtggcagacatctaaacatgttctgattgatggcaatggggttcagtaccattgtggtttcaggaatccattgtcttgagacatatcctctgccaataaggggggactactgtactacatttttgtttgtttgtttttgagatggagtcttgcactgtcgcccaggctagactgcaatggcgctactgaacggtgacagcatgctggaagtcctcacagccctcgctcgctctcggcgcctcgtctgcctgggctcctactttggcggcacttgaggagcttttcagcctaccacggcactgtgggaccctttttctgggctggccaaggccagagccgtctctttcagcttgcagggaggtgtggagggagaggcgcgagcgggaaccggggctgcgcggggcgcttgcgggccagctggagttccgggtgggcgtaggcttggcggacccctgccggccccgggcaatgaagggcttagcacctgggccagcggctgcggagggtgtactgggtcccctagcagtgccagcccgccggcgctgcgctcgatttctcaccgggccttagctgccttcctgcggggcagggcttgggacctgcagcccgccatgcctgagcctcctacctcctccgtgggctcctgtgcggcctgtgcctcccggatgagcgccgcctcttgctccacggcgcctagtcctatcgaccacctaagggctgaggagtgcaggtgcacggcacaggactggcaggcagctccacctgcagcctcggtgcaggatctactaggtgaagccagctgggctcctgagtctagtggagacgtggagaacctttatgtctagctcagagattgtaaatacaccaattagcaccctgtgtctagctcagggtctgtgaatgcaccaatggacactctgtatctagctactctggtggggccttggagaacgtttatgtctagctcagggattgtaaatacaccaatcggcactctgtatctagctcaaggtttgtaaacacaccagtcagcaccttgtgtctagctcagggtttgtgaatgcaccaatcgacactctgtatctggctactctggtaaggccttggagaacctttgtgtggacactctgtatctagttaatctagtggagaggtggagaacctttatgtctagctcagggattgtaaatacaccaatcagcaccctgtgtctagctcaaggtttgtgaatgcaccaatcgacactctgtatctagctactctggtggggacttggagaacctttgtgtccacactctgtatctagctaatctagtaaggacgtaaagaacctttgtgtctagctcagggattgtaaacgcaccaatcagcgccttgtcaaaacagaccactgggctctaccaatcagcaggatgtgggtgaggccagataagagaataaaagcaggctgcccgagccagcagtggcaacccgctcgggtccccttccacactgtggaagctttgttctttcgttctttgcaataaatcttgctactgctcactctttaggtctacactgcttttatgagctgtaacactcaccgcgaaggtctgcagcttcactcctgaagccagcaagaccacgaacctaccagaaggaagaaactctgaacacatccgaacatcagaaggaacaaactccagacgcgccaccttaagagctgtaacactcaccgcgaaggtccgcggcttcattcttcaagtcagtaagaccaagaacccaccaattccagacacactaccttggctcacggcaacttctgtctcctgggttcaagtgagtcttgtgcctcagcctcccaagtagctgggattacaagtgagtgccaccatgcccagctactttttgtatttttagtagagacagggtttccccatgttggacaggctggtcttgaactcctgacctcaggtgatctgcccacctcagcctcccagagtgctgggattacaggtgtgagtcaccacacttggccttgtactaagtttttgaagaaattctattgctaaagaaaccacaaatctgacttggaaatgccagtcattgttcatatcctaaggcagtctctaggaaaacatattctccaacatccacttcaatttttaacctgaagaataatgcacaaggaagaacctcccagagggtgaacccaggggcccagatgaggctaatcaaggaatttctttcatggccagtggagagatttctgcttggaaagaaaacaaacgaacaagcaattaaggactactgattgtgtcaggtttccattcttttatttttcaaatggaagtttttattgtggttaattctgtttctgttctaaccttgcatattgggttgaaagtggggattgagtatctttcttttatgttatgggtcatcggactgtaagcagtcatatctggatgtatcagagtaggctgtacttcccccagaggtactgaccttgagct

SEQ ID NO: 4340 - DNA, 6000 bp, Homo sapiens
aaagggcctcatctccctgaaatctcctcctgggcccctgactcgaagaataagtctactataggaaaaaaccagaagccactgaaatactcttcctcagaaatgaaaagtaagttttatttcaaacctatcagatccatgttctagagaatgttaaactctacagatccatctcagaatcaaaggaccatattcatattgacagttaagctcttataatggaagtaacctcattcaactcttcttagaagtaaatgatggacaagtagataatctttggcaatcctttccagttttgtttacacataggtttctttttccccctgaagaactaacaagaaaaagccagattcaattactatgatttggcagcttgaaacaacaaactggtttttcctgctcctgagctgaaatttcaattaaatagttttaaaagctatgatggcataggaacaaaatatttgtcaagtgacacctggaaacctgcagcttaattctctaagcactgaaatttttttcaatattttaaccattttgagcagaaattccttaaaaatgtctatcaacatagtccctgccctctttctttcttgtttgttgtcttttcattattttctcctgggttttctaacaacgtctgacctttatccattaaagtctaccagcttggcactgtctgaagatattgatctagagaatgtcattttgtgtgcataatgtttgcagcgtcaactgcactaaacataatttgatctggccttaatttctctggggcatcatagggaatcccagttattgtacaatatcataatgcactcatgccttcaatagggttgccacatttagcaaataaaattacaggacatccagttaaattagaatttctgataatcaatgaattttttaaagtatatccgaaatattccatacttcgttgcttatttgaaatttaaatttaacaaggcttctgtttttttttttttttttttttttttttttgagacagagtttaccctcttgttgcccaggctagagtgcaatggtgcaatccttggctcaccgcaacctctgcctcccgggtttaagcaattctcctgcctcagcctcctgagtagctgggattacaggcatgtgccaccacgccccgctaattttttgtatttttaggagagacggggtttctccatgttggttaggctggtctcgaactcccaaactcaggtgatctgcctgcctcggcctcccaaagtgctgggattacaggcgtgagccactgcgccaggcgaaggcctctattttatccgacaattctaattaggtaccactgagacacatagtcctatttggccctggctgcctttagactattatctttttctcatttgaaagagctgcagaccttgggtactgatttgaattgttggatgtccagacttgcagttcaggctcagctgacattcttgccctggtgagcttctgtaccttcctcttcgccctctgaaggttggctgaataatcaactgacaaaagtcagattaataagagaagaggcaggctgggcacggtggttcatgcctgtaatcccaatacaatgggaggctgaggcaagaagatcactggagctcaggagtttgagaccagcctgcataaaatagtgggaacccatctctattaaaagtaaaaaaaaattagccaggtatggtggcatgtgcctatagtcccagctactcaggaggctgaggcaggagggttgcttaagtgggaggctgaggcaggaggaccttggaggtcaaggctacagtgagccatgatcatgcgactgcactccttctagagagagaccctaactaaaaaaaaaataaataaaaaaaaaagaaagaaaagaaaaaaggcatagaaatttattagtgtacatgaggagaaatcacagggtgattactcttatcccccatgtagtacagaagggtataccatctttacaaagaatgagagctccaagcatggccaaaaatagattatggtggtaaatcaggttatagtggcaaaacaagttacgggagggacagaagcagaggcctgactaacaaaggtgggtagcagccctcagagagaatagatggtggaagtttctttcagacctttaaaagtgtcagaatctcagtaaatctttcctagatctggacaaggaagggcctcagagaaagcctggctacattaatgcagattctccacagatgcaaatctgccctacaagagacagttttgcagggctactgggctactttttttttttttttttttttgagacagggtcttgctctatcagccaggctggagtacagtagcatgatcatggcttaatgtggccttgaactcctgggatcaagtgatcgtcccacctcagcctccctcatgagtagctaggactaaaggcatgtaccattatgactggtacatgtttaaatttttattttttgtagtgatgggatctcaatatgttgctcaggctggtcgcgatctcctgggctcaagcaatccgctggcctcagcctcccaaagtcttgggattacaagcgtgagccaccacatctggcctgcaaaggctacttctgattgcaggccctctaaacagtcatctcaaaatatgtcaaagtagtatattttggggtaaaatattttgatttccttcaaagccattgtagggttaataattggcctaatttcaatattgctgtttattgggaaatagggaggcccaagggggagaagtgtggggaaatgggcagttggtggagtagtcagaacacacataacatttattaattaagtttgcctttctatatgagtgcagtacatggcacctgtattagtccattttcatggtgctgataaagacatacccgagactgggaagaaaaagaagtttaattggacctacagttccacatggcgggggaggcctcagaatcatggcgggaggtgaaaggtacttgcttacatggctgcagcaagagaaaaatgaggaagaagcaaaatcagaaaccccagataaacccatcggatttcatgagacttattcactatcatgagaatagcacaggaaagactggcccccatgattcaattatctccccctaggtctctccctcaacacgtgggaattctgggagatacagttcaagttgagatttgggtggggacacagccaaaccatatcagcaccccaaaacaattaccatagtaacatcaaagatcattgatcacaaagcactataccagatataataatgatgaacaaatttaaatattgcaaaaattattgaatattatgtgacacagagacacaaagtgagcacatgctgttggaaaaatggcaccaatagatgtgcttgaggcaaggttgccacaaaccttcaatttgtaaaaaaaaaaaacaaaaaaacaaaagcaatgtctgtgaagagcaataaagcaaatcacaataaaacgaggcatgctgttatcatcatctaacaggcacattttggtttcaaaaaaaactgggcatgtattaagatctaatatgtattttaccatccaggaattttctcaagactgtattgcagaaaattttaaaaccagttattctactctaatacagttacttatttttcttcaatatcactttttttctaagtatgtctctcttggacatggttttaatcatttgcaatataaagagacataggcttaatttatagcagccctgagttaacaaaaagagataatcctattcgcttatttgataatccagctgaacctgaagtactgatttcagcctgttcatcacctgaatgggctgccgtggttagagggtttccaacacagctactggaacacttttaaaaggtaatgctgtgatccatgcagccaggaaggggttggtccctcataactctgcaatcctctgggcccagttttctttttcctctcccggttgatgacactaggcccattggtggtacggctttgggtttccttcagtctcaagatctcagtcagggtgggtgaagtggaagaacaagccttcttgcagaccactggttggttggcagcctttgccatagctaatctggttgttttcaggtcagtgacagtcacttttaggagagggttcgtttgctttcaaaatccatctccccgttcctctcagggttctttgccccaaaggactttgcccttccttacgcagtggacaccttggcaccctctgcaaacagacagtcccgcagaggccctcgacgagtgtcactccatctgtttcgcgctcctaggagaggtgtagcagaaagcagtgccccaggcctccacgcgacggtgaagcaggaaccaggggctgccagcagagcagcccaggtgcgtcgccttagggacagagctgccaagtgccgagctggggctgccagagccgagccgggaacggcatttgccagagccgaggcggaagccggagcatttgggggacgggaccgcgggaacccggaaacgcctgggctgcaccgagctggcggtggctacggcgacgggagccggcggcgctgcgggtcagcggtcgcgtaggacccagcggactcggcagcctggggcgcccggcggagctgaaccgcggcccccggtggtgggctcagccggtcgagctgcgcgggaggtgagtcctcagcgcacctggggaggggcgggaaccaggaggctagcggctgcggggcggcccgggaagctcctggaggaggaggaagaggaggcatgcgagggggctgatgtgaagtctgtaggggtgaaggggacggtatcgaagacctgaaatacagtgctagctaagtaggggtgggagcagatgaggtgacacgttgtaactccgacggacgacgtgcggaatgtactgggtggaggaggaaaaaaggcccgaggagaggggtgtgtcaagcgaatgaagacggcagtgtgtgcctcagcgcctggtgcgtgcggagctagtgacgggtgggcccggctggggcccgtcattccttcagtgaacatcccatgagctctcgctcggtgttgagccctgtggtaggcacagatgcacccgaccagcacctggagctcaagaagccgcaggaacttaaagaaatggaaaggctgcccttggtaaggctagtaagaacacaaggactgtttgaagtggggtgagattctcatcagaacaggtgtgtgggtgcattgctttatagtaaaagacgatcttttattatgttctcttaaatgcagtatttgaaaattaagtcttttcgtttttgaaatcaacattcgactttagtagttaaagatgaaatttggtgcagtttcttacttggtgttcttattcactttcactggtaaactcagggtgtttcaagggaatgacttgtaaacttatatttctgaggctaactttcctcccaactgttgattctatctcttcagcatctcaaatttagttctcccctttttcattcccactacctgtctgctaaatatgctcgtctttcctcttcttacttgcactatagcaataacttccaaactggacttgtcctcagcctggcacccttccagtcacttgcctccatattacttttaaagccaaagatcttatgactttctttttttggttattccttcctcagaaatacgcagtgactctcgatcggcttcagaataaaatgtaaattatttagggaggcatttaataaattttatattatttagggaggcttcagatttttccttcagaatttgagtctgacggtggctccagtaaaatcaatatgattctttttttttttttttagacggagtctcgctctgtcgcccaggctggagtgcagtggcgcaatctcagctcactgcaagctccgcctcccgggttcatgccgttctcctgcctcagcctcctgagtagctgggactacaggcgcccgccgccacgcccggctaatt

SEQ ID NO: 4341 - DNA, 6000 bp, Homo sapiens
aggatgccgtgtataaaatatgaatattggaaagcatagaatatttcagaaacagtgaagcgaacagattgattggaatggaatacagcttggcaaagtgaatcattagtgataagatctagcatagtataaaacttcttatagacattcataatgtttttcattctttctaacaccaaacctgttcttcatacctagaaagatttggcttgcagtaggccctatgtgattattgaaagaaaagcataatacatttgagtcccgtaaaaagttttgagatactagtttaaggagtttaaatcttatcctttagcacaaggactgggaaaatatggctagaggactagatcttttttgcaattttttttttttttttgtagttgcttctggcaactttctctttgtgtgtgtgtttatattccttttcacaagtatgttgaattgaactttttcctaattatcacttagctacttagttaatgcatgcagtagaactctaaaaagaacttctaggagtttctcaaagacctcccagtaattcttttcaattagagagggcatgccatttttccttttttatttttaaataatattttattttttatttttgtgggtacataggtgtatatatttatgggggtacatgagatattttgatacaggcatacagtatgtaataattacgtcagggtaaatggggtatccatcatttcaagcatttatcctttctttgtgttataaacaatccaattttaggttttgttttgttttgttttttgtttttttgagacggagtcttgctctgtcaccaggctggagtgcagtggcgcgatctcagcttactgcaatctctgcttcctggattcaagcaattctcctgcctcagcctcccaagtagctgggactacaggcacctgccaccatacccagctaatttttgtatttttagtagagatggggtttcaccgtattggccaggatggtctcaatctcttgaccttgtgctctgcccgcctcagcctcccaaggtgctgggattacaggcgtgagccaccacgcctggccaaattttagttattttcaaatgtagaataaatgttggctgtagtcaacctgttgtgcctatcaagtactagatcttatttattctatttttttgtgcccactaaccatcctctctcccactacccttcccggcctctggtaaccatcattctgctctgtctccatgagttcagttgttgtaatttttagctctcacaaataattgagaacatgtgaagtttctccttttgtgcctggcttatttcacttaacataatgacctccagttccatccatgttgttgcaaatgacaggatctcattctttttctgtgtgtataaatacattttctttatcctttcattcatctgttgatggacatttaggttgcttccaaatcttagctattaagaatagtgctgcatacaaaaattagccaggcatggtggtgcacaccgtaatcccagctactcaggaggctgaggcaggagaattgcttgaacctgggaggcggaggttgcagtgagccaagattgcaccatcgcactccagcctgggcgacaagagcccaactccgtctcaaacaaacaaaaaaaggaatagtgctgcagtaaatgtaggagtacagctatctcttcaatatactgatttcctttttttggaggggtatatacctagtagtgggattgctggatcatatggtagctccatttttaggttttttgaggagccttccaactgttttccttagtgattgtactaatttacattcccaccaacagtgtatgagtgttcccttttctccacatccttgcctatcttttggataaaagctgtttttaactggggtgagatgatatttcactgtagttttgatttgcatttccccgatgatcagtgatggttgagcattttttcatatacctattggtcactttgagaaatgtctattcagatcttttgcccgttttttaaaaatcagattatgagattcttttcttacagaattgtttgagccccttatacatttttgttattaatcccttgtcagatggatagtttgcagatattttctcctattctgtgggttgtctcttcactttgttgtttgctttgctgtgcagctttaaacttgatgtgatctcatttgtccattctcactttggctttggctgcctgtgcttgtggagtattatcaagaaatctttgcccagtccagtgtcctggagatcacatactatttttataaataaaattttattggaacacagtcaaacccattcatttacatacagtctgcgactgtttttttttttcctttttctttctttttttttttttttaagacaggctattactctgttgctgaggatggagtgtggtggcacgatctcagctcactgcaacctctgccctccgggtttaagcgattcttctgcctcagcctcctgagtagcttggattgcaggcgcctgccaccacgcctggctaatttttgtatttttagtagagatgaggtttcgacatgttggccaggctggtcttgaactcccacctcaggtgatccatccgcctcttccttccaaagtgttgggattacaggtgtgagccaccacacctggcctctaaattgatttttacttacaatgagcacatttttgttaaatttctcgctattggcaggagaagaataactgaagaaaggggagcaattctgatccttctaaaggttcttcttgcaacatgtcagaaagtatatttagcataatgtttcttcttaaagggaagaccttccctaccttccttattacccacattcccattctctgttgttattactgagcgatagcattggataatagaagcattagtttctaagtcaaacaggaactcagttgcctcatatgtaaagtgataatattatctaattcacagtgttgggattaaacaggagtacatataggctgtaaaaatggtagctgctgtttatttttccagttgcctggaattgccttttcatttgatgcattccagcggttctcttgctgcccactgcaaaaaattgataccacatgatttgagaacaagccttggaaaggatagaataacttgttatacattttcataggttgggattttttttctttatagaatctttctagatctacttcgtggcaattaaaaattacttattaattttcccaatctcctatcctagataatatatccatctgaaagagaattataagtcagttattttggggaagcagcatagcatagtgagtaaaaacataggctttcaagtctgatctcttaggttcagcttcagctttgccatttacttactgactgtaatcttagacaagatgtttaacctctgcatatcagttttctgatagggctgttatgagggattaaatgagataatatatgtaaagtgcccaatgtagtgccctgtgacatattaagtaccatataaatatttggttattaatggtcatatgcatgtcatacaaatctgaatatgtaaaataaatcagattgtagtatgaatggatgttcaaaaaggtaaatgtagaaattttattaagactgaaatatagcatgtgatttttattttggtttttattctttaggtattacatgaaacctttcctaaacatacatttctgatgaacggcttaattcaaggagtaaaggtaggatcagtcatacatatatatgtgtatatatacatacatacacatacacgcacacggatgaacatacataaatacatatatataactatgcgaatatatgtttgtttactgattaataacttaatttttataattagatggagtatattttgagagataacttaatactttctagacttgagttttaaatatgatctaactacaatatagccaatcatgcataataataaaccacatcataacagattccctgtttttatgttggcattttaattccagagatctcaatgattttgtaagactacagattgaagaggaaaaaactatactaaaaaacccccatcaatataaaactgtatcagtagggtaaagagttggttattatatgaattctttgctctttctttttcgtgtttttttttttttttttttttttttttgagacagagtcttgcactgtcacccaggctggagtgcaagtggcatgatctcagctcactgctgagaacctctgcctcccaggttcaagcgattcttctgcctcagcctcctaagtagctgggaccacagacatgtgccaccacacccggctaattttttgtatttttagtagagacagggttttgccatgttggccaggctggtctcgaactcctgacctaagtgatctgccctcgacctcccaaagtgttgagattattggtgcaagtactgtgcccagctcaaattctttactcttgattcagtttgacaaacaagttttcgaaataggtaattagcctgttttatatatatataaatatatgttttatgttttatatatatatatacacacacacatacatatacacacacatacacaaacaggtaattagcatatggaattgctattgtggatttattgtgattgagaatttattagagcagttcatatttaatacctacctggagccccacagatgattctaaactatcttgggaaattttaaatttatatatagataagcaattgtttatttaaaagtttgtgatatatttactttagaaacaaagttgttgaaaatttttctataggagtaaaatgatttatttttggttcatgctcatagatgtgtggtattcatttttttcatttaatttttttagggtttgttgtcattccttagtgccccgcttattggtgctctttctgatgtttggggccgaaaatccttcttgctgctaacggtgtttttcacatgtgccccaattcctttaatgaagatcagcccatggtatgtgcacatttagattatagcaactaaatatcactttcagctattgttttcttaatgttcctttatttctttcacttgtgccatcttggttatgaggttttaattttatttttctaatacatttattctttcacacagataagaaggcctctaaaaatacagtaggtaatagttcataaagattttagaaatagttgacactgttggaggcatctagacttctggctaacttaattttggattccagaacccaaatttcaaaacaatattttggggactggataggattgctaactttttttcttgtatagaatgttaaaaacagacacaaaatttgtcattatctatattagttaggaataggttttgctatatatcaaaacccaaaataagagttgcttaaaaatcaaatttctcttttcatgtgaaaaagggtctgcaagttgagcagtctggagctggtatggcagttccagtggagcagactttttctatcttgctgttcttccatcctcatctctcacctcactgaacaaagtggcttcttgagctctagccatcaagtcatactactgatagcaaggtggaaggagttgctaagaagagcacatcaccttcttttaaggaaactttacagaattcccatcccacctctgcttgcatttctttggtcagatttcagggatatgctgctcctagttacaagagtctggactcaaggccaccttgattaaaatcagtattttttttttttccactcaggaggcaagggaaggaaagctaacaaaaagggaataattgtcctaaagtcagagcccaatttggttgtagatttatagatttattctgactaatgttctttttactccactgagtattaatgttagttctacatcacggatgggctttatttccatggtgttatctacaaaggcccaaaggtttatatggggcaggatcttcttcttgtagatgag

SEQ ID NO: 4342 - DNA, 6000 bp, Homo sapiens
actctcccccactcccgcacttaatgtctgcacctgcggggagtcacggttagttctcgactttggccagttgaggccttctgactctcaaagaggcttcactctctctcagctctttgctattttcgccttcgggtcctgtggctcctacagcggggagacaggagcaatggttcgctgcaacaacgaagccaaggacgtgagctccatcatcgttgcatttggctatcccttcaggtgagcaagaattggttccaacccagcacatcatctctcacttgactggcaggacctgcttggtctcttcctcctccagaaacctaaaaaccattcattgcgtgccactccagattcaaatagaatgacaaaacttagatcctttctgctttttagcaatttcagacacattgaccagagcaaaacgtaagggaaatacagattgatcactgttataataatgttccagtccatggacaacccatggcaggtcacaccagctcatacagaaagagccaatgcagtttgggatggaggcttacaggaacctggacaagctggacaggtctctctgaccctcagtagcctcctctctgccttgaaggtagggaagcttattagtacttacatcctaaagagttgatgtgggatcctcagccagtacgaccaggatacaagtgggcacaccttgacagggaggtagaagtgatctcttttctgggtatttgagagcttaggaagtagggagcccaggtgttcaggggaaaatggggatgaggctcaccttttcagaaatttctagtatcagcacccaagttatattaactgtctcatatataataggctgtgtttttctctttaatttgtccactgtctcattggaaagcccaataaagcctgagaatgggtgattccaaccttatcttggccactctgggcctgcactttccagaggcagaatgaagctgatctgcctagtggtttggctaccagaaagagaagaactacatatattgcagttgtgacctaaagggccctggagacacttgggaatacatggtcaccatgtctgggcagggtagatgagtggggtgggttggggagcagctgaggggaaggtagagttttactggaaatttcgggggagttcccatcttaactgcaaggttccttccagaaacttgcctccttacatgacccctttcttggctctgtaagagtcccctgctgagaactagcacaggactacttctgggccagggagagagaggattgcctgagctcaggatggcctcccctgccacctgcaggttgcaccggatccaatatgagatgcccctctgcgatgaagagtccagctccaagaccatgcacctcatgggggacttctctgcacccgccgagttcttcgtgacccttggcatcttttccttcttctataccatggctgccctagttatctacctgcgcttccacaacctctacacagagaacaaacgcttcccgctggtggtgagtcagcacaggccagaaggaatggggtggagaaacagatgtttgtgagggggttgaggtcagaactggagcagaggacaagcatggcggcttccacccccatggtggaacctctgcctccatcaacctcccgttgcttgctcctgttcacaggaggcacaatagcaccatacacaagcaggctctggagttagactgcctgggttcagatcccagcatggccccttacttgctgtgtgatctcggacaagttaaataacctctctaaatcgcagtttccttaactataaaatggggataaaataatacctgcttcatagttttgtgtgtgtatgtgaaaaaatgagaatgcatgtatctagtacatagttagtctcaataagcattagcgattattaatattattcctctttactctcttcctatcccaggcatgcaaggcggaaggggtgccttaagggaccccatttgcgtcctgcagtctgccacttgtatctgagcaatggtgatcaaagaaaaagctgggagggaagagtggggaatttaggctccacttgggatgagtgggttttggggtgaggctgaccaacgatgccttggtacactgttgccagatcttagatctgagggcattagcagggctagcctgagtggcaggactcctttgggggcagtgaacagatgcctcaggaccacctgggttctaggtgttgggtaggatgggaagaggcaactgtcctggcaccctgggattgccagtatcatggcaagtggaaaagaagcaagggaatcatggggcctttctgagtgtatttcccatccctctgctcctcccaggacttctgtgtgactgtctccttcaccttcttctggctggtagctgcagctgcctggggcaagggcctgaccgatgtcaagggggccacacgaccatccagcttgacagcagccatgtcagtgtgccatggagaggaagcagtgtgcagtgccggggccacgccctctatgggcctggccaacatctccgtggtgagacctgtggccactgcaggaagcagcaccagccctgctgcccaggcctgtcccagctagcaggtcctgaaaggaaagagagggtgtcccagagctggtgtcccctgcacctggagctggtgccctcactgcgcttcatgctggctgctggctcctggctgaccctgagaggacattttgggatgaggggaacccaaaagccacttagccttctgttccttcctccttctgcactctgcctccaattcccttctcatttccccacctctaggcacgctctctgtgatgtctcccctcctcctgcctgttctacacaatgtgtgtgaacacataaaggggagcctggggctgtggctgagcttgaagctgcgagcagacccagcatgagtgggaaggggcttactgtcactcagccctccagcctggaaaggggctttggagcagtagtgggtctgctggatgcatatggatttggccatcccagttgttagaatgttgaaatatgtccatatccattggtaaagagctgaggtcttgagcttctcaaatgctgcccgtcatcccagccacctcagccctgctctgaaaatgacttgttcccacatctgaaatgtttaatggctggcacaccaggaacacacgtctggaacttgctggaaccctgcttatggttcccccccaaaaaaattttattgtagaaatgttcacaggtacaacaaagttgaaagaattttacagtgaatacccatgcactcaccacctagactgtgccattaactttttactagacttgctttatcacatatttattcacttcttcatccatcaatccgtcttgtttttagtgcatttcaaagataatttgggacatcagtacacttccctctaagtacttcctgctgtgaggtttttaaaatatgttgaataactatttgaacatagccctggctaggtgcctgatcacagggaaggagcaccttggacagctcctgccacacctacctggcggaaggtgctccgaacagggcctcacgcgtgctgtgggaggcgccccagggctgacttttgcttggctccttgctatgctttgcacgatgctcctctaaagggtcagattctgctagtgaccaagctacagcttgggtgcatggtgtggacagaattagacactttcacctgggattcccctaaacagttgatggtcctgagccctgcctctataccgagctctctgtcttagtctttctagtcctctgtgcttcttccctgcacaagccccaaccccaactgcaataggaactccccctccctgttcccacaatgaccccctgactattctcacaaattcccctgatgtctttgcagctctttggctttatcaacttcttcctgtgggccgggaactgttggtttgtgttcaaggagaccccgtggcatggacagggccagggccaggaccaggaccaggaccaggaccagggccagggtcccagccaggagagtgcagctgagcagggagcagtggagaagcagtaagcagccccccacctggctattcccgaactggacagcacctcttcaaccacctccggcttccaggacctttctcttcctcctcctccaattcccctcccccatcattctggtctttgagctttgagacgatgggcaggcatcagctgttggaaacctgggcagccctctcagtggcttcctatcctccttcttgctggagccatgaatggcaggagctcagtgcttcttgtgcagtgcctggacccaggtatcttacttggggtcttacttgtacccttacagtctctgagaaccagcctctgctgcaggtgagggttgggggcaggaaaccagtgctctgagactggttcctagcagccacctttctgtcaacctgtccggcttcaacaatattagggggaagggaaatcagctagtagccttcccctctggtcccttgtgtggaggccccaatagtggtttggcgacccctcctcagtggctgtcatctagtccctgcgtctgatctccagtcatcccatgactcagtgtgccttccactgtcttctctggcctctgcctgcccacagaatccaccatgtgtgaaccagagaggtccaccagcctagaaaacagcccttcagagggtcctgatgaggccttcctggactcagctgggagcaagataaattgcaactgagttgcagcttcaagaaagtaaagccagtaagcttgctggcagaatcaatttcttctatcccctcaatcctcccacccaccaggctggggcactttccaccaacactctaaactctactttagaaacgccctatcttcctccctgtcctccttcttggtctcacacttgggactcaaaaatgtggagtcaggacctgcctcctaatccccttacttctctgtccatctcccttccccagcatcgtgcatctgaggcatttgagatcctttttgaagtctgtccaggccttccttttattcctgtggggccagacaggggcttaggaagggccaaaggaccatcatgaggctaagttgccccagagccccaggatggatgggcccattttttccttattccctgctcagttttttcccctgctccttctctagtccttctttcatatttctccttctcatcttgaaaacaggatgttccctcttcccttgctgtcccatttctcccctgtgtccttatttctcccagtctctatcccctctcaagtccagggcaggccgatgctattggtgcttcttcactttgggacccagttccatatttgtctttagtgtatatcctcttcctgatacctccttcagtccctctctgggccccaaggctgagaatcagtgttaactgggtaaggatcatttgcttcctacccagctcaatctgccctggccatagggcttcccagggaaggaagaagagggaagaatccgaccactttccaatccagtgccaattggcccactaagcatcctaaaggtgaatgtgccctgtgccaatctctcctcaggactgagtcaacccccttcaacctcctcacctctctaaacaccatccatagtaacatgtgcattactggggtacctaggagtcaggacttttgacttcaggccagtcatttcctcccgatggggaaagggtgagatttacatccccaaatgcttgagtccctcagtgaaagaattagtttttgtttgtttgtttaagattttggggaagagatttgaggaggaaagaaaggagatggggtgagagggtttttaagtctgaaactctctgtcatgagctgtccccatggttactcaaggacaaggggggacagttttgcctacagctccagagacacagagaacaaaggggtgaccttcatttttcttcaagccggcctctgtgggggtctgtgagcagcttct

SEQ ID NO: 4343 - DNA, 6000 bp, Homo sapiens
ccatgagctaacactcaggtcccctccaaccctatgactccaggtccatagtgtatgaggccctgagccctgcccaggcccgagcttctgatctcttctctttaagagctgggccttcaaaggccacctttgagccccagatacaacttcactgggattaccacagcaacccaaccctgctttcagtcctgaggcagagccattctactgatcttcacaagacctgaattactagggctaggttctccccagagcccctcccccaccaacccccctccccccaaagaaggctctcacatttgatttggagcctgcaagtctctgcaggctgcttggggttgggggaggcaggatgaagtgagctgagacgcagacaggaggctgccagcctgctcttgccttcccttctcttgttcccccatgagcggggaggccctatcaccctctaatgagtctgataaagcaattcaattttccaggctgggagagagtgaggcatgctgggaaaggatgctggctccttggcctggacctgaaggagggtcagtccctggcaggagctagaataccaaaaagggaaagtgtgagcaccaatggatagaaccttgccttggcctggagcccctcaccacaaacaggtttcaaagaaggaagatggagaggagattggatggctccagtcatcctaaagaggctgagcccatacaaagctcccagtggggaaaggggaagggtaaacggctttgatttcaggctttcagcttcctacggacagggtcagcgtcggcactcagagggtgaggaccttattatgcgggtggagggggggcctggaaagggtgcaggtgcttgacagcctccatcggtgcccctttagaatctcccatggccctctcttcctattctttcaccacaccctcacccctgatgagggaaacccgctgtggctgacaccttctgtgaactggctttcagacaggtgctcttccctgacagcctgaagaagccagggcactaaggagaggacaaaagagaaaaggtgaaaatgagggaaagaagcttggggaactaggaatttccaatagtggctgctttgtggtcttgcttaagcctgtcaggtatcaaggtcttggaggaatgaagaagggagggagtaggcagagtcccaatggcagagttaggctagaagatgtacctgaggtcctggaatcaacaggaagcccagaatcagctgccaccccatctgcccacatcacagcccccagagctcagggcgaggtctggagccaggatgttctagcaccaccagagggcagcaccctcacatccatggtaggctgtgtcacagtagcctgggcagggggctctcctatccttccccggctctgtgttttgagggaacaccaagacctcacacaaagaaatgatggggacaagtcccatagtgctaactgcagcatatcgactccctcagagaggtacacgtaacaggtgagcccagagttctagaataaaccttcagcaagggtgaggcattctctggaggcctcaggactgaggctgagctcccctctcccgagctggtcagtgcacagagctgggagtcctggccccatgcacctttacccagctgcctctctcaggctgggccctctgtttttgtcagctcttcctaggttcctatgcctgtgtcccaactttctgatcttcctcccttccctcttggcctcctttttccctggcagctttctccctttacccatctccccaggtgctcatcactatccacaagcaccgcagagtggaagcaccagttgggcagatttactaggatgagtggctgttttattcactgatgtatttccagtacccggaactgcttctggcatatcgtaggtattcaataagtgttcattgagttaataagtcaatcaggggtgggatactatgggttttgtccccttgcctactacactccctttgttacaattactgagctcagtcatcctgatgaacggaaagcaggggagagaccccaagggactttgccaggacacggaccagataggacttgaaagttattcattacattaatattctgtggttctttcttcctcactccagtttctggcctgtcccgggtcttctcttcccagtcacacttgggatatttcttttcactgcagcaaactcaaagacagctaaactctgaaatacaaacatcagtttcgaggagcagggactgggcacaaagggggtgccagtaaatgtgtgtttctgattaactcacctcccctgcgtgtcagtacagatcatcaaagatcattgtcattttggttttctggcctcattaataatgagacttttgcttgtaaaaatcccttgcattggcactgagcttttaacctttcctgagacacacataggcccttgtcttgtttttctcagttgagctaggtactgcctgatctggaactgggaaggtgcacaggtgtccagggcaggtgtgtcattcacctttcatttctgcctcaagatctctttacatcatccagacaggcatggaggctgcctgaagctgtaaaaaagaaaaaaaaacccaatggggattaatatgaagatgtaaaataggttctggacttaacaaaaacaaatgaatctggaaattgctcttgggatagggccagtaaagtcctgttggtgcctacgttttgggtatggcagcttctcaatcacttagcaaacaggttctcagaggcaggcactgtgggagctatcaagatgaaaaagcacaatgccgcctgcaggagctcagggttagggaggggagaggagacatatacacaggcaaagtcaaattgtaatgggtagaataagagtagaaacaggaaggggtcatgaggcaggacacgggcatttcctatgtggaccccagagcaatgacgagcaaaggctttaactaatgacttttcagggccacccacccactccacatccataaaacatttcgcgatgaacacagccagagctacggtttccttccatccggcacaagaagcgcttctctgcccaaggccaccccgtcctccattccatcgcggggactttggtggctgggacagaggcggagagcatcaagaccatgggtgtcttgggctacgttgggcctccgaggcgcaggatgcggggcggggtggtcagaaggccccaacacggtccctgggaaaggagagggcagcctgatcctcgcgacagcgtctctaccctctttcttccttggccttccgtcagccgcagtgaaacggcaacagtgcgaccagcttggcggggagggggcgagggacgaagcaagaagagccgggcggaggttagaggtcaggggtcgagagcgcttcggtgtcagcgggctgcggtgggaggagctgcgggcccgggggaggcgcggagcagggctgaggggggcgggaggggttgccggcggaagcgcgcaggggcggcgcgctgggctgggcactggcggcgaggaggtgacgcgcttggttggggctcggctccggggaggaagactgcgctcggtcgccagggcctgcagtgagtcggatcggccccgcgctgcgccgcgccccgcccaccccgccccgcgaagggcgcgtctgggcgaggcggggccccggaggaaaaggcgccactggggcgtggcggccgctgccagcgccggagggagaccatgagcccctagggccccagcccaccggcgccgaggcgccccctcccctatgccacctcgcgcccgccccctgccgcgcgcgagccaaggccggcgccccgcccggagatgggcagacgcgtagatggcgtggctcccagcgccgccagatcgcaggaaccaggcgccggggcgttgcgctgaggctccctctccgcgcggcccgggaagcctgcaggtgtccttggccgctcggccgccgcccccggtacaccttcgccagtgcccagagcccggctccccagagcggccccgccccccaggctcggcgccgcgcaggacgccccgtctgaggcacccccgccccagcgcggcccccgcagcgctgcgcccggtccggcgcagctcccagccgcggacgcaggacccgaggctcgctcctgcgggcgcgcttgttttccagctgccgcctcgccctgcgcagcccccgcccgcccggccgccgctctctgctctgccccgcctgccttcctcgcccggcgctggatttatgaatggggggaagaggccacatgccgccgccgccgcctcgtgttgaccgcaagcagcccgggcccacggagctccggctgccgtgagagtgtcggcctggccccggcagccgctcggaggacttgttgctgctgcgctgccgccgctgcggggaagccggctattccggggcttggtgcggtcttggagccggagggtggcccgtgtgagcgcgagcgccccggaccttcgcggtgcgcgtggactgtgcgcttcctcgtctttggtcggggtgaaggcgggggcgtgtccccggcccagagcgtttgtgtgtcccgtcgtagcgggggaccgcgtgtgtgcttgcttctacttccccgggtcctccctctctgcgcctccctctctccggagcttcctgccctaaccccaaccacctgtgtaccggagaaatccaactcctcccgctccgcgtcctagggggataggcaggggcaagcccaagccgcagagggggccgccaccgcctcctgcctcctcttcgtctcctccccctcccccgtctgacgctgcctcctcgggaagggtgtttggagggcagcggccgccccaagccggagccccgcagcgcttcttatgatcagctcggtgtgtgtctcctcctaccgcgggcgcaagtcggggaacaagcctccgtccaaaacatgtctgaaggaggagatggccaagggcgaggcgtcggagaagatcatcatcaacgtgggcggcacgcgacatgagacctaccgcagcaccctgcgcaccctaccgggaacccgcctcgcctggctggccgaccccgacggcgggggccggcccgagaccgatggcggcggtgtgggtagcagcggcagcagcggcggcgggggctgcgagttcttcttcgacaggcacccgggcgtcttcgcctacgtgctcaactactaccgcaccggcaagctgcactgccccgcggacgtgtgcgggccgctcttcgaagaggagctcaccttctggggcatcgacgagaccgacgtggaaccctgctgctggatgacctaccggcagcaccgcgacgccgaggaggcgctcgacatcttcgagagcccggacggaggcggcagcggcgcggggcccagcgacgaggccggcgacgatgagcgggagctggccctgcagcgactgggcccccacgagggaggcgcgggccatggcgccgggtctgggggctgccgcggctggcagccccgcatgtgggcgctcttcgaggatccctactcctcccgggccgctagggtgagtggcaggagcccgtgtctccccatcttgggtctgcaaggggtccgtggtgggtggtgggtaggggccgggaggagcagggaccgagcctgacttaccttaccaccgcagattgttcccgccttcctctcaacccccctccgtggctcgcaggggaattacacactcccaccctctcccctgcacgctccatcaggagattgcacacacttgacttactacttggacccagtcccagctgcctgctttgccgcatcccctccagtgagtggggtgcccagctcagctcctccacccccttctttggtctgcacaggctgccctatcttcagctgccctccactccacacaggactacggtcctggaagagctggaatttggtcttctgatgggggcaggcagggttgagaggaaggaaactagggtgggttttgttagatgcttc

SEQ ID NO: 4344 - DNA, 6000 bp, Homo sapiens
ctaaacaacatctacagaactctccacacaaaaccaaaagaatatacatttgtctcatctgcacatggcacatactctaaaattaaccacacagttggccataaaacaaccctcagcaaatttaaaaaagacccaaatcatgccaaacacacactcagaccacagtgcaataaaaattgaaatcagtatgaagaaaatcattcaaaaccacacaactacatggaaattaaacaacctgccgccaaatgacttttgggtaaattatgaaattaaagcataagtcaagtaatattttgaaacgaatgagaacaaagatacactgtactagaatctctaggaaacagctaaagcagtattaagagaaaagcttatagcactaaatgtccacatccaaaaggtagaaagatcacaattaacaacctaacatcatacttgaaggaattagaaaaacaagagtgaagtaaccccaaagctagcagaagacaaggaataaccaaaatcagatttgaactgaaggaaattaagatgcaaaaaccatacaaaagatcaacaaatcaaagggctggttatttgaaaggataaataagattgacagactgctagctagactgataaataaaaaaagagagaagttccaaataaacacaatcagaaatgacaaaagggacattaccaatgactccacagaaatacacaaactctcagagactactatgaacacttctatgcacacaaactagaaaacctagaagaaatggataaattcttggaaacatacaacctcctatgtttgaaccaggaggcaattgaatgcctgaacagaccaataacagtttccaaaattaaatcagtaataaaaatcctaccaaccagaaaaagcacaagaccagaagaatttacggccaaattctaccagatgtataaagaagagctgctaccattcctactgaaccattccaaaaaattcaggaggagggtctccactctaactacttgtatgagaccagcatcatcctaatactgaaacctggcagaaaaaaaaaaaacaaaaaagaaaatttcaagccaatacccctaattaacatagacacaaaaatctcctacaaaatgccagcaaattgaatgcagcagaacatcaaagagctaatccaccatgattaaataggctttaacccttggatggaaagttggttcaacatacacaaatcaataaatgtaattcaccgcataaacagaactgaaaacaaataccacatgattacctcaatagatgcagagaaggcttttgataaaattcaacatcccttcatgttacaaaccctcaacaagctaggcattgaagggacctacctcaaaataataagagccatctatgacaaacccacagccaacatcataccgaacgggcaaaagctggaagcattccccttgtgaactgcaacaagacaaggatgcccactctcaccactcctattcaaatagtactggaagtcctagccagagcaattaggcaagagaaataaataaaacccatccaaataggaagagaggaagtcaaattatccttgttcgccaacaatatgattctatatctagaaaaccccatagtctctgctcaaaagctcctagatctgataaacaacttcagcaaagtgtcaacatatataaaaccaatgtacaaaaatcactatcatttatatacatcaacagcttccaagctgagaaccaaatcaagaatgcaaccctattcacgaacaccacaaaatgaataaaatacctaggaatacagttcaccagggaggtgaaagatctctacaataagaattacaaaacattgctcaaagaaattagagatgacagaaacaaatgggaaacattccatgctcataaattggaagagtcaatattgttaaaatgcccatactgcccaaagcaatttgcagatactatgctaatcctatcaaactaccaacactattcttcacaggactagaaaaaaactattttaaaattcatatggagctaaaaacaaatagccaagataatcctaagcaaaaagaacaaagctggaagcatcatgttacctgactttgaactatactacaaggctatcataaccaaaacagcatggtactgatacagaaacagatgcatagaccaatggaacagaatagagagcccagaaataatgctgcacacctacaaccatctgatcttcaacaaagctgacaaaaacaagcaatatggaaaggactccatactcaataaatggtactgggctaactggctatccatatgcagaagattgaaactggaccccttccttataccatataccaaaatcaactcaagatggattaaattttaaatctgaaacctaaaactttaaaaaccctgggaaataacctaggaaataccattctggacaaaggccctggtaaagacttgatgatgaagatgccaaaagcaattgtgacaaaaacaagaattgataaataaggcctaattaaaccaaagagcttctgaacagaaagggaaactatcaacagagtaaatagacagcctggagcatgggaggaaatatctgcaaactatgtatctgacaaaggtctaatatccaaatctataagaaggttaaactaattaacaagcaaaaaccaaacaactccattaaaaagtgagcaaaggacatgaatagacatttgtcaaaggaagtcacacatgtagccaacaggcatatgaaaaaatactcagcatcgctaattattagaaaaatgcaaatcaaaaccacaatgagataccatctcacaccagtcaaaatgcctattattaaaaagccaaaaaataacaggtgttggcgaggtttcagagtaaagagaatgcttatacgctgttggtgggaatgtaaattagattagccagtgtggaaaacagtttggaaatttctcaaagaacataaaacagaactgccttttgacccagcaatcccattactgggtacatatctaaaggaatacaaattgttctatcataaagacacacgcatgtgtatgttcatcatagcactctttacaataacaaagacacggaatcaatctaaatgcccatcaatgatagactggataaagaaaatgtggtacatatacaccatggaatactatgcagtcataagaaagaatgagatgatgttctttgcagcaacatggatgcaggtggagggccttatcctaagcaatttaatgcaggaagagaaaaccaaatattgcatattctcacttataagtgggaactcaacactgagtacacatggacgcaaagaagggaaaaacagacactagggcctacttgagggtggagcggggaaggagggagaggattaaaaaactacctgttggtcactatacttaccccctgggtgatgaaataatctgtacaccaaaaccctgtcacatgcaatttacctatataataagcctgcatatgtacgtttgaacctaaaatgaaagttaagaatgatgttctacagcattttcttcaaaactttactcttagagcccataagcaaaatccaatgtactactagttaactttaatctcccatttgaagtttccaatcttataattctcacaaaatctatgcctcttaaactctaatatccttatatacttaaataactctgaaataaacttggaagttctatctgtattctcatatttcaacagtgattatcttccaataataaaacagaactactcacttagaaggcttttgaaaaaggcctaaatgggggctaaatacaaaatgtctatgtgagtatttgtctattcagaatgtattttggcaaatacgactgcacagtagtagagtactcataatttgtattcccgctattcgtctggccaagttcaagtttcctaaactctcagattctattatcatctatgatggtgatcaatataccccgtattgagaagaccaagccatgagtctgagcttctgctaaatgccttttctaatttagttttttcaaagtttttgagcgttcttttgggttattcaataacatggggtttcctgatattgtcttattctctatttgtttttgttcttgtccctccaaatgaattctaaatatctgatggtcagaaacagaattaattctcaataaaattttataggtatgggtataagtgggcacgttgttctctaccaaacccctaaacccaggaaacagccacctctagttgtccggcacttggaacaacccttcccagtgaaatgatggaaagaggcacattcaaggaaaaatgttctgcattaaaatggtcacctattttgctgtgaacaatttgtcttgagatagtcttcccgatattcctaagattcccccttatttatcacttctctctctgcagatgttcagtctacctatctctttcttctccttactctctctgcctgtcccaaatttctggttcccctaacttgcaggcctcacattacctgaaactattcaaatatttatagaacacctcttatgtgccagacccaataccaggcactaaaaatacagtcatgagcaagatcacccaacatacacagagtaacacagaacctacagagctttcagtctagtggggaaaacaatgaaaaacaaggaatgacagagggtggaggaatgcctgtgggcaatgggagcagagagcaggagtaactgttcctgcctggagggctttctggtgctatgatgggggatgagtaaggaattaagtgaacaggtgagaggatattctagagagagctcgtgagacagaactagattgatttgtttaagcaactaaaaggaattccatatccagtgttacccagtgtgaggagatcttgggggtggggccggggaagaaatagccggctgagagttttaagctggggagtcatgtgattaaatttgcattttagaaggctctcctcccttcttcctgaggacagactgaagaaacatccaaggtggtcttgaaggacactgggatcctgtaacacaggtaaaagataaagactaatgtaatttctatggggttggagagaggtggtctggtttgagaaatatttaggcaaaagcataactgacaggacttggtggctgataataggtggtggtgtgggagagagagtagcttaagaggacacctggtttctcatgaacgtggctgaaaggccagtcaggcctttcctggatggtggacatggtgggaggagcaggcttgagtgtggggatgccaagttaatcaaactgaagttggatattggatttgaggtgcctgggagagagtggagctcaaaggagagatcatggcatctatatagatttgtgaatctttggaacagacagatagtaattagagccatcagaatgggtgagataattaggaaaatatgagttcagccagaagcctctcctcagccccaccacttcagggacctgtaagcatggcagcagctctgagtgagggtcagtgattccagccgaggtgcagagactttttaatagcattccctaaagtgtagttacactgaaaaattgttccccaagagaaactacacacacacacacacacacacacacacacacaccacacagttccatgctcagataagtttggagaaatctatatattatttcccctgcttagagaatattaaggactgacaagttctgcagtaaagacctttttaccttcatttaattcagttttccccacaagacagccctggctggagattactctggatctgaatgtctcagggtgaaggaagcgggagacagctagctttcccagaggcatgcccgcaagtcagcaccgcagagtgcatctatctgttcatttataagatgaaaacattggggcccagtgattgcttccaagtttcatagttagctagtgatacatttgggttgtcacatactcctttgacccaatctaagaaaattccagtgatgc

SEQ ID NO: 4345 - DNA, 6000 bp, Homo sapiens
ccatggggcatctttaattgctcttgagcaatgaaactgtattgatattactctctgtcagccattgtaagttcaaggtcccagaggaaggcttgggtcacccagaaatcccattaatctgaaatcagatttataagccatataccctgcatcttgaaaccctcctgctcttttcaggaccctgtttataatttttaatatgctaacataatgaagggctctttgcttggaagagtaatacttttagcaggttgctttatttaccaaggccagcttaattgttagcttataagaatcagttcttacgtgtttattacagatatttcttacgtgtttattacagatatttcttaagaagcagagttgagccttcatcataaataactgttaaagtaaggatcagaattagcatgtgtaccttgacatcaccataccaggatactgctcaatgttgtgatggttgtattgactaatagcacctgtctttctctgacatttttgtagagacttaagaaacaatgaaatttcatgggccatagaagatgctagtgaagcctttgctggactcacaagtctcactaaactgtatgtattataatatttatgtatgtctacataggcatgttttcaagaaccggctgtaaatatgattgaattatgtttatttcatatggctacaaagtctgagctttctgacactctgggagctctgtggggtttctttgtttgtttgtttgttcgtttttttgagactgagtctcactctgtatcccaggctgggatgcagtggcacgatctcggctcactacaacctctgcctcctaggtcctggttcaagcaattctcctgcctcagcctcctgagtagcttggattacaagcgcatgccaccatgcccagctaatttttgtatttttagtagagacagggtttcaccatcttggccaggctggtcttgaactcctgacctcgtgatctgcctgcttcagcctcccaaagtgcccggattataggtatgagccactgaacttggctggtttttttctttttttttttgagacagggtcttgctctgtcacccaggctggagtgctgtggtgcaatcacagctcacagcagcttcaacctcctaggctcaagtgatctcccaccttggcctcctaaggagctaggactaaaggtgtgtatcaccatgcctagctaattaaaatttttttttttgtagagacagagtctcactatattgcccaggctggtgttgaactcctgggctcaagtgatcctcccaccttggcctcccaaagtgctgggattataggcatgagcccccatgcccagctagtttttttgtttttgtgtttttttgttgttgttgtcggggcactttttattgaaaaagcattcctgtggacacttaaagagaagttatttatggaagtagaatttctattcaagtaaaaggaatgcattgagaaagtagagtaatgtgttggtaatctgtttaatttgtagtttgtttaattgtaggagatttgtgagtaatttatctagcagaagtagagcattctctcacataagattttagatcttttcccatgagaagaatttctccaaaggttcacacttgtctgaatttctttcatctgacaatcttttgctctgaatggagacatgaggaatataatgaatttaacatctgaaaattaccagtttatcagtggtcaagatggttgttcacctcattgagctttaacatcttgatagacacttttatgctatgttttgcattgattaataattaaatttcataactttcttaaaaatgcacgttctcatcaaattgtacacattaaatatgtgtagtttttagtatatcaattgtacctcagtaaagctgttaagtatataaaaaagtacgctacgcttattttcactttttataggtaaatgtttaatgaatttaattttgtttagtggagagctttcttagaaagatctgtttatatttcagaatcttacaaggaaaccagattaagtcaattacaaagaaagcattcattggtcttgaatcccttgagcatctgtaagtattttgcatacattttgcttactctataaataatctttgctattagcagaggttttcatgaccatgtaaagtgtttatgtaacttgatatagaaatggtgactgataatgtttcatttctctttatttcagagatttgaacaataatgctataatgtctatccaagaaaatgctttttctcagactcatttaaaagaactgtaagtaacttgtctttttaaaatcaccagttggatcattgttcctgcttgttgtgcttaaagtgtgatgggagtgacccaagttatttccaaaagcacacagttcaggcaggaaaaaagaaagtattaatactcagttatttaagcggctagaggtaattttaaaatagccaacattgaaaagcccagagtgtgtggcaccaagaccttctgttttgcctgttctaccaatgcttataattaggagacctcagcactgctccttatgctttatgtataccctactgttcctttttggattatcagaaacatgtgttaccagttcttaacaccttgtgtgggttacaataaaggtattatgtgattttgttttatagtttccgaggtgatttaacagttagtataattgtcagagacggttctctaacctgttcaaactactaaaatgtcaaaatagacaagtgtgtgtatgtatcattttataccctttttcattgatgagttttaaaaattgttcttactggtttcgagatttccctaggggattggaggttagttgggcattggtattatttatatttatatatttttatatatttttggagacagtcttactctatcccctaggctggagtgcagtggtgcgatctcggcccactgcaacctctgcctcctgggttcaagcggttctcacctcagcctcctgagtagctgggattacaggcgcctgccaccacacccggctaatgtttgtatttttagtagagacagggtttcgccatgttggccagctggtctcgaactcctgacctcaggtgatctgtctgcttcagcctcccaaagtgttgggattacaggcgtgagccaccggtcccgcctggtattatttttaaactctattgattcaaatatgcagtcaggggtaagaaccactagattatagaaattattttgccttgcctgggaagctactcaaaggatactctgtggagcagaactggttgatgagaagataaggatagaaatgcagaataagcctttagaaacttttagaacaattttacattactgtgacacttttgttgtagtttataaaagtattagtctgcagtggattggaaatttaaaagactggtccttaccatggataatttgagatgcactggaaatgtgtgagttttcaaactgcctaggttcaaatccttactccattccttacaactgtgtgataatgggcaaactgttagcctatgactcagtttcttttcccagaatgggaatagcacctccctcagggttatgtgaagataaagtgagataacttgtttactcaaatatttattcatcatctgctatgtaggatactgttctggatgatgaaaacattagtgcacaagacagagtctctgtactcatagcatattacagtaaatcctagtgaggaagataaataatagaccagtagatatataatatctcatcaggtaacaactgaagaaaaaaaaaactaagtcaaaggtatgaagagtggtggggattgctattttagataaagcagtgaggggaaactcttttgaagatacagcatttgaaccaggaccttaatgaaatggcaaaccatgtgaacactgggtgaatggctttccaggcacaaggagtaggaagtaaaatgagtttagagagttaagcagagtagaataattaaatatctacaatttttttgatattaatcatcttatttctcattagtcgttctcttcatttgttccagtatttttttttttaatttattttttttttgagatgcaatctcgctcttgcccaggcaggagtccagtggtgccatctcagctcactgcaacctctgcctcccgggttcaagtgattctcctgcctcagccccctgagtagctgggactacaggtgccccccaaccacgcccggttaatttttttgtatttttagttgagatgaggtttcactgtgttagccaggatggtctcaatctcctgacctcatgatccgcccgcctcggcctcccaaagtgctgggattacaggcatgagccaccgcgcctggcctgtcaagatattttttttttttaccccaaactgctttgttctaacttaccttttttgttgttcttgaaaagcatatcgaatttacagttttaataggtccaacaataaaattatgttcatatttttctttttaaagagagagttaggaggcagatcataatagaccatgaggaattaggatttttgctttcttgtatgcattaggaaactggagggttttgagaaaatgctcagcacagagcttggcacagagtagaagctgagtaatgttaacaataaaaactaaaattaaaatgttatgaaaatcatcatagttattttctgccagatttttaaagtagatattttgatctgttgagatattttgagttatttctcataggcttagtttaattataagttgtgacttactacaaattagtatactccgcccccctcctttttttttgccagtgataacctgagagctggcaagaaagttttaactgttacaagaactcagtttaacataaaatttaaacagtaggtcaaagcaaatattgcagtctcaatcttcagagagtcatttagtaatttgagagttgtcacaaagattctttgcttgaccaacccgtaggcaagcccttaaaccttctcctaggcctagctgtgtaaaatccaattttagcacaaaccctgtaaaaccagtttagcaagaactcttcctcattgtagaccattcccaggtgatgtctgatcaccctggcctgtcttcagcaagaatcctgttagggtttagccagagtcttccttactctggatgttattttttagtaatttcacatccactgagtgggatgaaagcaaacccaccttgctccttggctatacttgcccttgctgtttccctactgtctctccctcactgagtcgaacccagtctctctccccagctgcaacatcacattgccgtggtccctatatctattgagatgatcctgaataacgtctaccttaccatgctttaacaagtatcactgagtaattttttatttaacagttacggtgctgtgactccgataggatcagattcatcattggacccccagacctctcacccaggaccccaagtgtgcacctttgaagccattgtcttcactcctgactgatagatcggggatccaatggtgagtcagactaacgaaccattgctccggacaaacatctgttgaagctggtaaggaaagatttcgattctcaagattgtgaatatattctctggagttgggctagaggccagacttcttttgaaaggtacctcctgggcttgaaggtcttcttcctggctctctttcctgagtggggtttattccctgactccctggactaaaagtccttggaactctgtgaggctactctgttgtctctaatggatcctacttctcccatggcaatttctctggcatctgaatcccctctgtttgagcccctgctaactatattgctccaccactggttctgtccacctcctccttgttggacctttattggcctgtttggaatacttaagatctccccagactgcatcctgtaagctgtctttcttcccattgctactgctccttattcctcctcttaccacctttaatgtt

SEQ ID NO: 4346 - DNA, 6000 bp, Homo sapiens
tctgcactttgtttaataagcttaatgatagtaatgaataatgctattttttctgtcatttttttatactacactgtttaactattttctttgtttctgttttcccttaggatgatcataaacttagccttgatgaacttcatcgtaaatatggaacagacttgagccgggtatgttctagtttgaaagctgttgtacaaaatcctagttttccgtattatattttcccctgtattacatacaggtctaacctcaggggctctagtaagaaaatgacagacaccatctgcgtatctaccatgtgacatgcacagaatttgggcatttatatgctaccgtttcttttccctgaaactttttgaaagtagatgttattttcttttccctattttatagcagttgagagccagtaagtgggaacaccaggacttgcagttggcttcaaagccatgcttatgccttgaccttttgatgataaattttccctttatttttctacatttgttaaatagagttgaatctttcacctagttgaatcttcaacaattcccatttttgcacttttcccagctagcccattgcagtgtgttatggttatactatcatttgtttagttattctatcatttagttggaaattgttttgtacaaaaattaaagaaaccttttcataaaataggcgttatgtatccttgttatgtagaggattttgatattaaatgtgtaacaaatgttataaaagtaaatagtctagggatgtcttatttccagataatcactgaaatgtctgggaataacttgaatagcaagccaatatgtagcattttttcagtaaggcatcaagagacatgggtactgtggtattctgatatatattggtttttgtccacagttcctggttcataactcccatagcccttattacagtcgtttgttataatgttgggtgtgttagacctcagtggcaggcttcaagaaacaggatctctctcctgccctccttttcacctgtcgcaaggcaggactctaatcttgttccacttttctgattttccaggtagatagtgttggaattgaattggaggaaaccttggtggtggggagaaaccgccacacctttgctcacagaagtcatcttctgtgttgattgttggggtgtaagagtagagaagaggccgggtgcggtggctcatgcctgtaatctcagcactttgggaggctgagactggtggatcacctgaggtcaggagttcgacaccagcctgaccaacatggagaaaccccgtctctactaaaaatacaaaattagcctggcatggtggtgcatgcctgtaatcccagctactcgggaggctgaggcaggagaactgcttaaacctgggaggtggaggttgcagtgagccaaggttgtgccattgcactccagcctggacaacaagagtgaaactccatctcaaaaaaaaaaaaaaaaaaaaaaaaaaaaaaaggagagaagaacaaggttgagagcgtttttcttgacacaagcactttaagctccaagaggaggcctcgagtcagctcagaacaacatgccaacagtgactctgtgcttactttgtgccaggcagtctctagccacttcacatctcacttaagtttttattagagtcttaatgaagtgtgctctctccgacctatgcccattactcaaatgctgcgggtctatttctttacttataaaatgaggttaataatgcctaaaaaaggattgtcatgagaattaaacaagttaattaaagcactgaattcagttcctggcatgtagatagcactcaaatgtttggtaacatgagcacaaaacacagataaatagatactttagacaaaaatattttattttttttttgacttgttattttgagagtataaaagtgatcatattttcctctcttaatgagagcttatatgtaattgcctgctgtcagtgaatcttgggtttaaggcccattagaaaaatagcaggctttagtagagtggttttttccagtgagtacttttcagtcaacaggtttattgggaggtggctaaaatgcacatggaggtgagcccttccctgccagacaagcaaagaatcaagctgtatatttaaaacttggctgttaacccaaaggatttctacaggaagtttttttctcctttgatgtttgtagaggggttttttttcccctcccgacaaaatcaatacacagaaaacccaaagctcttaatttgcaaaactgaatggatttgtgaaaatagatacctttttggcagaaatgcaatttggcattaatcccttgatctaaaacttagaagaaaccaggctgaattcaaatttattgatggatcaatttaaagagttttaatctgggtgttatgagttccttgggcctattgtttgcctgaaccctgtggggactggctcatcagcagaattattcatggaggaatttgctaggttttaccttggctctctagcttgggacattttgtttcttccttaaatccttattgcaaccgtccagctaccaggtaggtatattgccttgtaagtgctggtacagtttgccttatttatattccactgcttctcagggattaacatctgctcgtgcagctgagatcctggcgcgagatggtcccaacgccctcactccccctcccactactcctgaatggatcaagttttgtcggcagctctttggggggttctcaatgttactgtggattggagcgattctttgtttcttggcttatagcatccaagctgctacagaagaggaacctcaaaacgataatgtgagttctgtaattcagcatatggatttgtagtacacatcagatatcttctccgtctttgtctcccacttcttctcaattaccactcattacttaatggttatgaactcattacttaatggttatgaacagctgttgccttcaaggctcatccattcttccttcgtttccatttcctctctctaccacccacgttgtagatgctcttacaagtgggatgcccacctgcatgtgctgctgtgagcaggcagctctgctcaggccccggccgccacccactggatggcagagcacagcgattcatgttggcacatccacctgtccagaaatgcttggtggccattcttcaaaatccacaagttggttgaaaaacaatctttgttttataaagcaggagaaactgatgcatctagaacctttccaaacgtccagttagtgatcaagtgttggtgtgcctgactccatttctgacccttcctgtgtggtctttagaaggataaataagaaaacatgagttctatatttctgaaatcttggtttctctattaaaaatctgttttttattcagtcaaaaaattaattgaatgtccctaattattgtgtagagccacgggccctaacttgtcttttcccttccagctgtacctgggtgtggtgctatcagccgttgtaatcataactggttgcttctcctactatcaagaagctaaaagttcaaagatcatggaatccttcaaaaacatggtccctcaggtaccagacgctttgtccttccccagtggatgacttgacagccccaagcatgtcagcctgtgaattagtgtgaagttaaggttttccaagtattacatgactcatcagagagatggatgtcttctaccccacccaaaaccaacctattttccttctatccaaaaagtggtagcctttcttttgaatgtaaactctgaatacaggcacaccatgtaacagcaatatctcttaaactggcgagcaagcttttgtaacttgtgtaaataaaaaagtgaataatatctttgttttgtattcaggtaattaggattatgactatttttattttcttgttttggacactaccttctctttgttggtatactaacggtgtaaattgtttcttttccaaagcaagcccttgtgattcgaaatggtgagaaaatgagcataaatgcggaggaagttgtggttggggatctggtggaagtaaaaggaggagaccgaattcctgctgacctcagaatcatatctgcaaatggctgcaaggtagctcttttattttaacaaacctcatagctagctctgctgttcgggcagcttgatttgaggggtacagtagcccatgataaggctggtgtattcacatgacatttttcttcttttcctcacatataggtggataactcctcgctcactggtgaatcagaaccccagactaggtctccagatttcacaaatgaaaaccccctggagacgaggaacattgccttcttttcaaccaattgtgttgaaggtaggccatttttgggcactttgagcatggcgtggtatttctcttgggcattaacaaaatcaaaaccataggcacaatctcttgttttattggctccatttctgagaacttgtgtcaagcacagagcagaggtgttttcctagctggcaggaaaccttgtggcagtttcccttccctccacctccaccctgcctcttctgtcaacaacaccagtctggcatgggtgttggagctgctgtcctgctactggagagaagtccctttgccaaacagcatgtacagccaaagagctggcccttaaaaagtgcttttatcaactctttttgtttttttagtcatcctatgtaattgtgtaaaatccgtggcttccttcaggttagatacaattaggtacagttctccctccccttctttttaaggcaccgcacgtggtattgttgtctacactggggatcgcactgtgatgggaagaattgccacacttgcttctgggctggaaggaggccagacccccattgctgcagaaattgaacattttatccacatcatcacgggtgtggctgtgttcctgggtgtgtctttcttcatcctttctctcatccttgagtacacctggcttgaggctgtcatcttcctcatcggtatcatcgtagccaatgtgccggaaggtttgctggccactgtcacggtaagaggcaggtgatggtcaccctgactcagatcagcttgcacgaatgttacactcttccgctatcctattctaaggtattgccaacttatgttttattctggatgtttgatatagttcttcttgagagccacatcacgtggtgaattttgacagtgagaaaacctcagcatttgtttatacgtaagataaccccaaagcatacattttgcttttaaattatcacgtggtcctgaacagtgcagtggagaaaggagaagaacttgggatcaagtagggggatagaatatggtagaatcctgttattatttttcttaatagattgcttttctggaaggaaggggaagcctcatgtatgggttccccttattatttcttcaaacttcagaagaaggttggagagatttaattttagacaaatttcttccacattaggatatagcaagaatctgtatagaattccagcctggttgagtgaagtaataatcttcctaatattttttaggtctgtctgacacttactgccaaacgcatggcaaggaaaaactgcttagtgaagaacttagaagctgtggagaccttggggtccacgtccaccatctgctctgataaaactggaactctgactcagaaccggatgacagtggcccacatgtggtttgacaatcaaatccatgaagctgatacgacagagaatcagagtggtaaggccagggttaccacacacctcagccacctgctgacttcgcttggttttttttcttttaagaaattgcatgaaatttcttttttttttttaagctcatggcagctttttctttcttttttgttttttttttttttatcatttagtgaagagtcaagggtatgggatattgattttttgcatgtcagtagaaactttaaattgccctacaaacgtgactgaagaatgcctaaaatgtgattggtttcattaattggga

SEQ ID NO: 4347 - DNA, 6000 bp, Homo sapiens
ttctgactgaaaaagaaatttatagacttatacaaccgagaaattcaaaagatgaaatagccttagatatacctggattcagagaagtagatttacaatgagcccaatgaagtttaaatttctgggttactaattgctcggtcctgtcttaggctctgggagaggtcctagcaacatgtatacataatcatgtttttctaaatcttgtaaaaataaaatatttcaatcacgattggttaagattgtggtttcttttctactctgatttcctatccgtcacactgctccattggtcgcgtgggtcgggtggtggtggtgtggtctcagcattactaagacatactcacttgtaatggaattcagtttagcaaaatccttttttttttttcctgaaatggagtctcactgtgtcaccaggctggagtgcagtggcgcgatcttggctcactgcaatctttgcctcccgggttcaagcgattcttctgcctcagcctcctgagtagctgggattacaggcgctcgccaccacacccagctaatttttgtatttttagtagagacgggttttcaccaggctggccatgatggtcttaatctcctgacctcatgatccacctgcctcggcctcccaaagtgttgggattacaggtgtgagccaccacacccgccctaaaatccactttaataattcattttgtattatttttcttaaagaggactcctcaaattaggtatgcttccagccccacaagacccagatccacccttaccaagggctcaagtgataccatgtagatactttctctctcactgtttcagctcttttcttctctgtttgcttcattagtagcaaacttcctcacatggtggcaagaaggccactggcagctctaaggttatagcacgctcagggctgggaattctaaggtaaagagataccacttttgctgatgacatcaggaaatgacctaaggagggtttggattagcttggtttgtgtcacttgcccttttccaaaccaatcattatggccagggaaatgtggaacacaggttagtcaaatctgggtaacattcctggatctagttaatggtgggagcaagtgctatagtgggtggttgagaggtcatcccaatctagaccaatagactaagaccggggaaaagatagttttctaaaggaatgctagacaaactggaatttcatgtttccaagtcacacaaacacaaccatcagcaacctattattctgaatagaacaaacaagtctttagagcattttagaaacaatagctcatttgatccttaaacagtcctataaaataggtaaggactattatgttttataaataaggaaactcagtaaggagtagagctaggtttgaaatccatgtcttttgactcctagttcagtacctcatatacatttaaagggcttcactttattaatggatttaaagaggtgaaacattgcctgaaacaagagggtactgcctgtgaaagcacgaataccatctatgtcttttcattacagaaacatgttggcaatacccattagtcattctgaacccattttatttgcaatgcaatagcactgccccaccattttcactttcccagctcaagagtgttgtgagattagggccaggcaagctatttactggacgagtagagcaggaagtgttctgcgtaaatggcaggaaaaaccagctatgggtgcctgcgcatgctctgctccctaggctggagcacgacccttctcttatggttcaaggctcagctcaggtgacactggattggggaactttccctaactttcccaatccacctcctctcactctgtggcaccttcagtgttcccataaagcccgtgacactttgctccaacagcattcttcccactgtcttgtaatcgtcagtgttcatctactcctccacactagactgcaagctcactgagcataaggattctgacttatttctccaaatctccagcacctagtacaggatttgtcaaatagtagtcctccaacaaatgagtcttttataagcaaatgagcctcacgtactttggctcagagaagcagccaagattttttggctttgccgactttcacggatcttacttgagggcttcacagcactgaacttcagtttatccctgacctctgaggaaaatgcctcatagaggaaagcaagattggaaggagcaaggctgaagcctgttatttccctacacattcagtggtcacgtcgagtaatttctcctccaatatcttccttgtacattttgggcaccagttggaacaggttacataagtaaatcaaaagcctctttttgcataccagcttttatttttttcctgtagcacttcagtttcacttaaaacagagctaggggtgtatgtgtgtgtgtgtgtgtgtgtgtgtgcatgcgtgtgtgtataacaggtgtgaaatggtttcaataatagaaaagtcaacacatggttgaacaaatacaagtaacttccacattgcaatacgagtggatcttaggagtggtcctgtaaatctgcaggagtaaattttgttagtaatttattaattctaatttctaaaatattaatttatatggatttgtaaaagggaaatcatcactttggaatctctgatcaaagggtaactactctttgaaaatgaaatattctttttagactctctggaatgaaatccttccctgttgtacgtgtacacacacatacacacatacatagaacaggctgcatactgtttctgccgattgccttcagatgggccggtctgtgtgttcatcttgatactaccgagtctacctatttgaaatttgaccttaactttttcaggcaccagttcctttataatttttatttaattgtaaatataatgcaacagaatacaatggagaaaatcatacgtaaaaccagtatcttaacagaatagttgcaatctttttcaaatattctttttctatgtttttaagtgcatataattataattaatggatacatttgcaacttttttttttttaaacaacatgattctttaaaaactcagacttgcctttagaagagtggatatatgtaatactatgtatacagtattttcattgctggtgtaggagtgtgataactgacggtatcatcaatgactttaaaattgctggctgcatttggacatctgcaataacccctaaattgtttttactctcatgaaggaaaaatgaattttgcaaaacagacaagcaaaggaaaaggggtcttctccatcagcaatgaggtcttacttgcttaagctatacttgtcaactaggttatgtcaggtttcatgattgaaatctcttgtggttaagtctagtgttaacctaggtaatatttatttttcaagatttatataacttgctatttcattcagagttcagtatttatttcccctgaacttttcatggaaactaatgatctcaacagtaggaaaacagtgtgttcttccccgcctccccaccgccccccccactttggcttacggagtctcaacattagagacttattcttaaatttggcacattttataaagacatattgggaaggctaaaagtttcttatatctactcttcacaaatgttcaacataaatctcactagggaccgggcactccttgcttaccagtctccctgggtgaactggtgagaggtggccctcaatatttttactttttatttggtgaagcaggatcaatgacaatgacttttgtcatgtggtaggcagttagatatgcagagcttctagaaataatgcagactgggagactggaatgtagttacaagtgtgccaatgaacatgagacttttctgcttgatttttaagctaaggctgacttactctcctgacatttaagggcctcctctccaattcccagtcatcagtaaaggatgtgtacagggaatgacaatattagaacaaaaacaacctgcaagtaaatcggatgcaagagtctatgtatcttgcaaggaaatcttttgcacttaatcacaacatggctctcctcaatactacggagaacagaattgattcagattgtttttaagcctgaacgtaaacaatattgtcgcctttttgggtttcagcacctccttattcatccattttctcttttatgggaagggggttgatgaggtgtgtgaagatgatagaacgtgccccagaaactgaacaatgaagagacgcctgtcatatcgggggtacctagattcctctgaaaggaagcccagctgaaggagcagggtcaccactttattttaaaaacgtaacatggcacatgttggtgctctattaatcgagcctcgggggcccaataacgtgagcatgggctgctgcgtggaagtttgagaccctgttgctgaatcctcgggcctgacggtctatcgctgaagacaagacttccaaagaatcacagtaaacgttaacctaagccatcagaagccattaactccggtgacactacatttcagcgaaaccttcgcgacccaacccctcgctccctctcgcccaaacgctgggtcaaccccacgaactggcggtggcaaggccctgggcaccggtgaagttctcgtggcagcgcagatcggcgaccttctcttctttcgcgctcagacggcggcggcagcagtacgctttcgggctgctggagccggcagcggcgcgaggccggagcccgggcagccaggctgggtgggggaggggcggcggcagcggagccgggagcgtgcgcgcgcacctcacactccgccgcccggggacgcccactcgcgagccggggccggtaggccggcccgggtcccatcgcccccgccctccggttcctctccggcgtgagcccaacgggtgtcggcccagcagctgctgcgctcaccaggcctggggaggcagggtacggggaccgggccgcagccccgagcggcgtgggcgcgctgcctctctggcagccgccgccagagccagcagctgcgagccaccggaggcggcgcggaggaggcccccgcggccgggcaggaaggagacgcggccgacctctgcccgcccgaggcgcggctgctcccgcgcgcccaggccctcccgccgctccagggctgagtgaggaatgagccggcgcctaccccgggctctcggagcgtgggccccggctcggcttcttaggcgcgagggctcggccactgcggccggcggcctagctcggggagcaggcgccggggttcactgaaccggccgcggagaggaggaggaggaggaggaagaggaggaggaggaggaggaggagctcggcgggggcggccgccgcgcctcccctcccccaggacacgccggggcttctcagtggccgccggaggaggaagttccgctccctgacagacccgtgcggtagcaacagcggcggcggccgcggcggctggccggactcaggtgtttcggacgctattgcccttcgcgccagccgtcgagtgggcagcagcgggactcagccgggcgccaggttcctgccaggcagcgccgggaagcgcgggcggccgagaactccttcctgctacttcgcccagcgccgctgcttcggcttcccagcgaagtgggagaccttcctccctgtttgcagacgtccgtgggagacccttattttttccaccgctaaggttaagagattctggaatagaagcgtcgaaggagatcaagtgaaccttctacaactcctcggatgtcgccagtctccctttcggggcggaagactacgtttgagcatctcactgaggtgcaggaatggaagaacccaccttgcagcttttctgcagtgtggcttgcctgatctacccctaggaatgaagaggaggcttgtaataatccgatgaagtacagatgttgaagaggatatcgcaggacctaaacttgtgatcgtttgggggaggtcacacacgtttctgagtgggaatggatgggcg

SEQ ID NO: 4348 - DNA, 6000 bp, Homo sapiens
gtgcagctttttcatttccatttcttggatccatgagctctagccaccttggtctctccagactcagctctgtctcctcaattctgggactccactgggacctgcctgagttcccctgtaccacagcctggagaccctctcaatgcagtagatgaggcaattgcagggctcatcttttttcttccctatctctcaggggtgactgtcttttgttgcctgatgtccacagtttcaaaaaaacattgtttcatgtattttgttcttttgtttaattttgtttagtttaattttgtttcaggtgagaggataaatccagtctctgctactccatctgggctggaaatctggtatatcattaataatattcttgttgttaatttgggttgtgggtttataaatgttcattttcttattttgcatcattaaccatatacacatatatattacacattttttcatttgcgtaaaatattagtcaacttttttaagttctaaaagaaagtgaagagccctggggcggaacaagggcaaagaagtaggaagagtctgtggccaacctcttaactcacgtacctttctgacccctctacctcttctacctagagccctccatctcagccagctccccctgtccttgtcaccatgactctgaaggtgcctttctgacacaccaagatggtcaaggaaaaatggtgctgggttaggtgacagggaagatcatgagctttcatactttatgatctgacaagccactgtagcctctcacatttatatactaagtgagggtctttcagaatagcgcttcagtgtctgcacctgactcacactattaggcagttaaaagctggggaatgagctcatgtgaagagtttttccatttcagatcatagctatttttaggaacacaagctacataaatgttttaacccttttcccatccttttcctcttgctgctgtgatacaggaaggaaatcaaaatggagtgaccttgctatctggggaaagatgaaaactgcatatgcaaaagcaaacagactgagatttataacgagttgatcccttaaaagcttaggaaagaatctcaagggcacataggaaaataagcaaagggcttgatagacataatcatgacaacacaagaaggtgaagtcgggaagaggaaatggacaaggtcatcccaaattgaaataacttataaaagataaattataatatctccagaaattaactgtaaacattcctataaaatcatagatgataattttttaaaataaaagattgagtagtaagaataactaagaataaaaaattaatgagttcctagtggaaacttaaaattgaaccactgggggactttctataatgaatggcagttgaagaaaaaaatcgggtaaactttatatgaatatttgagaaacacctcaagcattagcaactacataaaagttatacatttcacctgtccaagagctgttacaacagtatacaaaacatattaagcaaaattgtactatagacaattacttatatgcaattctttacttaaaatttagcagatacatttgaatagtttctaaaacacatgatcatcaaagaaggaattgagtaggaaataaagcattactgttttttactcataaagagatgaaaataaaataaattattggtcaattctttatgagatttaaattatcttagcatttatttgtttgtttttgagacagggtcttgctctgtcactcaggctacagtgcagtgacacaatcacagcgcactgcagccttaacctcccagactcaagcaatcctcctgcctcagcctcccaagtagctgggaccacaggcatgaactaccatgcccagctaattctttttatttttagtagagacaggatctcactatattacccaggtcagtttcaaattcctgggctcaagcaatccacacaccttggcctcccaaagtgttgggattacaggcatgagccactgcacccagcctatctcatcttttaaaaaaaacatatcaaataattgttcataaatcattttctatagtagagagcaatttttcttaaaattggcaaataagattttgcatctacctttgagaaaattgtatttgtaaagtgattttaaaagaatgaagcctatgagtatgatggcattataaaagtatcagtggccaggtgcagtggctcatgcctgtaatcccagcactttgggaggctgaggcaggcggatcacaaggtcaagagattgagaccatcttggccaacatggtaaaaccccgtctctactagagatacaaaaattaactgggcatggtggtgtgcacctgtgatcccagctactgggcaggctgaggcaggagaattgcttgaacctgggaggtggaggttgcagtgagccaagatcgtgccactgcactccagcctgggtgacagagcgagactccatctcaaaaaaaaaaaaaagtattaatgtatggaaatacaaatgtcatatatagatgtaaattctcctaattgttcttctgagcatcatgttttttttccatgaatttttattttaagttccagggtacatgtgcgggatgtgcagtttgattacataggtaaacgtgtgccatagtgatttgctgcacagatcaacccatcacctaggtattaagcaaagcatttattagctcttctacctgacattctccctcccccaaccccacccgactggccacagtatgtgttgttcccccaccatgtgtccgtgtcttctcatcgttcagctcccacttataagtgagaacagagcatcatgattttcattgtccatcaaatgctagaagactactctgcttttgttactatgtttgccccatttttctagctcttcttacatgaatttaaacctacatcaatggctatttcctcaacatttggaaacaacaatacttattagaaagaaagtattttatccttccaggctatagatcttacattcctcttacacaacaatcctaattccctcatgttatcctgatcaatgaaatgatttcacttatttttcaaagaagtagctattttactacaaagcaggaatcgcaaggcttggggtgggcactgttatactccatcagtgagtatgtaaaggaaatcaaactgtctgattttgaatcctgcttctattttttacaaccttggacaaattactgatttcctctttcactaggtttatcatttgtaaaatggagatactagtgtctactcatggattattgtgaggcttaaataagaaaacatgtatcaagcatatttgtctggcatgtaataagcactctaaaatttatgcagcgatgaggataatgatcctagacaatctgatagcatcttatccaaaggaaaaaatgcgcatttcctttgagtaagcactactgattctaggaatgtgtcctaaggaaaaaataagtcaaatgtttaaaggtagtcacaagactattttggtagtaagcagtcttttttactggtcacacagtaaaaaattagaaataacctacatgttcatgaagagaagttggtgaaataaattatggtacatgcatacagtagaaaactttggagacaaaatagtaaaatagttacagatataggctttgaatataaattttaacaagctgaggcttctctcgtctcttcagaacaccctgagttcttcccggcctttcttccttgcttttcatttgtgtcagtcagctcttgcttgtacagcaatcttcaaatctcagtagcatataaaggtaagcatttagttctcacttacaagtttgcagggcaggtgaggcagctctgcctcaagccacaatgtctaggacagctctgtttcgcacggtggctgactagctaaaaaatgttcttgtctcagcaatcacaggagaacaagagggtgagagataatgtgtgaagcttcctaagtgctaagtttgaaattagcaccatgtcatttccattcacatttcgctggccaatgaaagtctcatgatgagccacagtcaagagtcagagacgtaccctcatgaggctgtggagagagtgtagattcagggagcggtgagaaactggggccagtacaccaatctacagcatgatttgtcatcatttttcattctctgctagtaagattgccaaagtctctctgcactcattgaattcatcctagtttccatttagctctctttctctcttaccacaatacctaaaaatctttttatggggttacaactctgtctcaggagccacctcagtttggtggcacagagctccccacttgtactctgaaactcttttcttgaagatattgttatccatgtgcatgagttatttttcttctccatagcatccacattaaacaattaattaccttggatttagccaaaataaacactccaaattcatgatgtctttcaggaagagagtttgttttcttttttaaccaaaatgggagattgatcctgtctgtgtcccctagaggagcagaggctggtttgtattagggcagctcttgtagatgagtaacttttcccatggcctcatagaggctgatatagatacttctggattcaaatgattgtttggaggcattagccaggcattgaaccaattataaagagtgaggttttgccatattctaaccgtaagaaacagaaacggtagagggtaaaaatagaatagaatgtcaacacaactttagccttttccctggattctgagagttcataacctgaaaatcagagattcaaactgggagagatgggctaacaggtatgagcatgggaaaagcatgtttcaaggatttgagatgtatttcccagaaaaggaacatgatgaaaatggtcagaaaaggcaatttccttcctcttttctaatttggctctggagccaccagcagaacctcttcaatatcttgcatgttacagatttcactgctcccaccagcttggagacaacatgtggttcttgacaactctgctcctttggggtaagttggactcagaggggacagttagaagggtacaggctgtggctgttgtgagtcaagagttttgtcttcctgtggtaactctgggtagaactcatgagtatgaagcaacttgtatctgtgcttccacggtttattagagcttattttatgaaaaggatgggaagggcaaccctgaggtagcattaagcctggacgcaccgcagtgaagtttccttgataaccacctgtagcttgttcagttctgttagtactggattttgagaaagagaaatagaaactcaagagatctgagttgatccctcagagtctacattaattctgtctccccaattctctcttcctcattattttccttggaccaactgatatctttattctctgatctcttgcagttccagttgatgggcaagtgggtgagtgatctctaactcagcttctccttctatgccactttcctacttccaaaggatgggtcctattaacctgcagaagagcatatagggaaagcagagaaagaagaaagatttataaattatgtaaaatctcccatattcagagcatgattttcataaaaactatgatttgtaagctttctttctaaagttttctgaatgagctctttcctctgagcgaaatgcctgaatgtatatataacagcaggaaagggccagaattgcacaaacactaaagtagtctgctgacactgaagtagtctgctgggtttcccaacatcccctaaaccagtcccctttacaagaaagcagagtgggttttttctcctcagaaagagccaggcaaatactgaaggcttcaaagagaggagtttgaacctccgtttccaatgtacaagctgctgaagccctgcaatgtactctcagagacagtatagctcagaggataaggaaaacagctccgcttggcttgcccaagtctaaaaccctgcttcattgctcccaacagaaaaac

SEQ ID NO: 4349 - DNA, 6000 bp, Homo sapiens
ttagattaccattgagcatctcttcgaatgtttactagtcatttatttcattttcagcgaattcccttttctaatcttttgccaagaaattatgtcttactctgagcaactgttcttttctacctgtgttagctaggaatctctcttaaacaaaagcacattctattttatatatcagagcaacttacaaaactaccatagtgcacagtctacattttgaaagctgctaatatataaaatggtctagaactgattaaaaagtgaagggggaaacctgacatacatttgttttctttttcttcttctttcttttttttttttttttttttttgagacggagtttcactcttgttgcccaggctggactgcaatggcgcgcgatctcggctcactgcaacctccacctcccgggtttaagcgattctcctgcctcagcctcctgagtacctgggattacaggcatgcaccaccacgcccggctaattgtgtatttttagtagaatcagagtttcaccatgttgatcaggctggtctcaaactcctgacctcaagtgatccacccatctccgcctcccaaagtgctgggattacaggcgtgacccaccaaggctggccctgacttatacttataacaagctcaaatcaccaaaaatttcactcagactagatcatttcatccttgggaatgcaaagatcttatttaactaaattttcagttactcaggtctctgagtatattacctgtagtttctgcagatagaaatggttctaggctaggcatggtggctcatgcctataatcccagcactttgggaggccaaggcaggcagatcacttgaggccaggagttcgagaccagcctggccaacatggtgaaaccctgcctgtactaaaaatacaaaaattagccagtttgatggcgggcacctgtagtgccagttattgaggaggctgaggcatgataatcactagaacccagaggcagaggttgcagtgaaccaagatggcaccactgcactccagcctgggtgacagagcaagaccgtctcaaagaaaaaaaaagaaatgtttcttgctgtggagtggttgcaatacagaaatccagtttctttggccatctcaaaatgctacaaatggtgaacttatttgtaataaaaagtatgaattcaggatcgttattttaaaggagtctgcacaggatttgatagctggttggtagtcatgctacaagccaactcagctataatattctcactgtggctattatcaatttacctactcagaaaggtggaatcactgaaattattgaatgtgcagacagaactcttcatgcagataatttttactcaatgatttaaagctattaaatgcttttgctaccataaagctcagcacatcacagttggtgaactgtgatgaaaatttaacaaattctgtttgatttgaggctgcgtagacactaagcctctgaaatcacttgaagcatatttttcctaagttttttcttcataaaaattgcatgttttacaaattatgatggagcaggtcaaatcttcccattagtatttctattattgtatagtaatacaagatcaagtcttaatggaaattatatttagaagctatggatgacattttctgaaattgattctatgtttaaattttcttgtcaatgggaaatacatataaccataagtgaaaaataagctaaaacatgtttaccttttgatttctaataatcgaagctgatatttattgagcatttactatgcaccaggcactgtgtaaaatacttttttgcacattatttcatttaattctcacaaattcatgaggtaggttacgttattaccatttatctgatgaagaaatggttagagaaattaagaacactgcacaaatactagttgtatgacacaagtaatcctttctttctttctctttctttcttcttttctctcttctcttctcttctcttttttcttttcttttctttctggcagagtctcactctgttgcctggagtgcagtggcatgaacatggctcactgcagcctcgatttccagggctcaagcaatcctaccgcacgcttctcaagtagctgggaccacagatgtacccgctacacctagctaatttttaaattttgtgtagagacaaggtttagctatgttgcccaggttggtctcaaattcctgggctcaagcaatcctcctgacttagcctcccaaagtgctaggattacaggcatgaaccactgtgcctggccaatactgccattctttatgcaaatatttttttcaattgttatcaagtaggaaatctaattaacttcagtttcattgaatttcatctttacttccttcctatccatggcttatgagagaagtgttaacatgaagcaacaaggattatagtaaatagagaattaataatctaaaataactgagttggccatattgttattataattatgctgaagcttatttacatattctttgttttgtgttgaagccttgagctctggtgggggaaaatcatgattttgattaaacacaaaatgggcagttaaacctctaaatagtatacatggagaaagctgaagtacatttaattatttagataatcattcctgattatttaacttacatatttacaagcctaaataaaatgtacaaatgtaaatagtgctttttttttttggagacaggtctcactctgtcacccaggctgcagtgcagtggcacactgtaacctcaacctcctgggctcaggtgatcctcccatctcagcctcccaagtagctgggactggaggcgctggccaccatgcccaactaattttttgtatttttttgtacagacagagtttcatcatattgtctaagctggtcttgaacttctggactcaaacgattggcctcgccttggccttccaaagtgttgggattacaggagtaagccacgtgcctgaccaatactgcattttttgacttcctgttttctatccttaaagcactgatttcttggacccagtgaaaacaaatttttcaagttgaagattttaagttaatgtagtcattcatatttgaaggatgtcatgatttattttttaaatttaatgtctttactattgaaaatatttcttgttattatagtttatttataccctaaattaaaaataagtaggcacttcatattctggatttgctgtcacttgcctgcaacaaaacaagtaactgggtttatcctggatgagtcacaaagcaagagcttggattttatcattggtttcagttctatttttagaggtatggggatacaaaagaagttcttaatttggagacatttaaaatggcttgtgtggttttcttcaggaaggaaggatgctgtctaacttcaggaccatcacagcaccctttaaatatgtaataattattttgttcaaaatgtttttttttttttttttttttttttttgagacggagtctcgctctgtcgcaaaatgtttatgttccatatcttatcgctcaatgtataaaatatcactgccactgacatcaatgaaattttatgtgaaatggaatgagttagtaagtgtcaagtaggtattttcctcgtccctcaaaaagttatgtgcccaagtataaatcatcaaaaggataaagattctttccatctattgcttacagactgactattgtttaaaaaggcacgaatttcatagacaagtctttatctccttctttcttaaaaaagcacagaaaatggggaaaaatcttctatactgcaatctaaattataggtaagaaaaataaaaaccaagtgacataggagattggcagtgaattttcaaatatcagtaatttacaggatttacaggattttcattagcgttgtttccatgttttctgtaagatacgaacatttaaattgataagaatggaatgttcatataacatttcttgtatccatttaaagattcacattttcactttaatatataacttaagacttttctttcaaaacacatctaaaaattagtaaaatgcctaaagggaagctttatttacttggtagaaaagctgaaagaaaaaaaaacatattcttcacaatttcagaggtgacaaaaatctcttatatttcagtagtttctgatctcccttaagggatttgagaattatatataatattgcataatcttaagctgattaatgttaaagtgctattggtctattttaactgtgtacttcttaaaatataatgaaagaatttatttggtaatcctgaatctattgacctcacaaacactggtcattattttggtggaaatattcataagcatttttagttactgatttctaacaattgtttcttattatcttcctgattttacaattccccaaagtaaaggtgcgaaaaacaaacatctaccctccttttcgacaaatgccatgatagaggggagacctgtgtggtgtaaagacaaatgcagacatttggaagttgatggttttaagattcagtaaaaacttgagagttttggcttcaaatccccacgctagttttagttctaccggatacgtgtcccctacccatttcaaaggacccagtcacctcggctcttgcctgagtttcagagtcccgccggagttagagctggcagagtccaattgctcagagcgccgaggcgggggcggggcagggggacgcttgcaggtccggtggtcccgcgggctgcgagcccccacggccgaccctagctgcagaccctcctggagaacctcaggcctttcccccagaaacatccctaaaaggcgttccctttgttcattcattcaacaaatatttgttcaatctcatatgcccttctgtcttgggaaaaccaattagggcctctgcagcctcaacacaggggcactgttcccgcctattaatgacgcaatgaacccgggaagacgaatctcgaccactgtttcgcaaataccgcgtgtgatttattaaatgccgtctctccgagtcccaagcggccgggagcattatgccacctcccttgccctcatctctcactgccatgcaagaaagcgttaatggcaaatagggcacgtagccacactccgtcgttcctgcttccaagcaaaccttgtgccaggttcctcatttcgcgaggctccactctcttgggcttcaggctgccgctgggcctccagcaccaaagggcaataggggtctgagagtccgggcctcaggcatcttcaggccgcaggtgggtggagaatagcgcccgcgcgtggcagcggcccaggccgtctcagccggatttttccatccccggggtaggcttggtcccctgtacactccagcggaactacaactcccagcaccgtggctgcccggactcccggaagccgaatcccggctgggaggaagcagctgagacccggccaacagactgggggttaatttagccagaaaagggggcgggaagggctgtagggtacttgtcaattcgccgccatgaacgtggtttttgctgtgaagcagtacatttccaaaatgatagaggacagcgggcctggtatgaaagtacttctcatggataaagagacggtgagtttgcttttgctcagcatttgtgaaggaaccctctcaaccttacaattgctcgtcccattccactgtaggacttagcatttaattaaacatacgaaaatgagggtcggtttgtgtggaattgaaaagttgtttatataaagcttgcccggtgggttttcagtctacatggctccagccactgcctagagactacttctacccggaacaatttattggaatcagaaatccttttctaaatgtccccgccaagaaatcattaatatgtcagagcacttggaaggctttgggatgggcctactgtttccactcaacattgtgtttttaaagtaaagctgttggagctcaagctgaaatgacagattatttgttggccacagaccagaa

SEQ ID NO: 4350 - DNA, 6000 bp, Homo sapiens
ccttctgaggcctgcactgggatcccatttctcctcctctccacttagttctcattcataaaagaggaagcttagcacccaagaatcctccttcctttgtctttaccctgcccaacctacatccagagcccagcctctcagggtcctttcctcctcaggcttagaccaaggctgtaactatttttgcccaaaatagtcctaaggttcccactcaggccttactttatcagccccttcatccttcagagatggcagcattcgttgtgtgccatctccttcccattcctttaaactgggccttcacttcctctaatttttttttttcccttacgagccctcctgcgtccccctccatactagcttcctggcccctttcagagctgatgggttctgcctccttcctccacctccttagctccaggagctggtctgccacgtgatgatgggtaacctggttatgtttcgaaaagactcagttctcaacatactcagtaagtgatcaaatctttaggtgcctgggagaggagaggagggcagggtgtcagtcctgtgtattttacactatcaggaaagctggttctggggctgggaagttaaggggagagaattgtactccaccctggtgcggtctggggcagtatctttctggatctgtcctacctctgtaacatccctgcttggggtgctggtagtcagtggattggggtgtgtgtgtgtgtgtgtgtgtgtgtgtgtgtgtgtgtgtgtgtgctggtagtcagtggatgggggggtggggggggtgtgtgtgtgtgtgtgttcgtttgttcattcttgagagagatgtttcttttgtctcttccagttcagagcctagactgggagacctttgagcagtattgtgcctggcagctctttctggcccacaatattcccctggagaccataatccccatcctgcagcacctcaaatacaagggtgagtaggcttttgggtagggagcacatcagatatgacacttcctatacagttagggcaaggctgaggcctctaggcttctaggatgagcccagatccattgtcctccttcccaccaaagtgcacaagggcaggctctctgtcagccacttttgttctttaggtgagtcctgtgggcccaccatgagccaggctctgggctggggctcaggtggctcagggactgataggagtggggtaggggattcttcctggctcctcatcaaagactgtccttattccctccagtggctgttgggggatgagagaggtccccagattccatcctggaatcataccttccccctgaacagcctctgcccttccctcacagagcacccagaggccctgtcctgcctactgcttcaactccgaagagaaaagtgagttccacttctggggctctttagccctcaattttaacatcccaagagctgctgtggtctaaagggcttctgtcctcctccttattgccatattttttcctgtcgttaacatctgcttattctgcccttcccccaacgtgacttacaaatgagcagctcccctgggatctgggcttcctctcgactttacccccctgcccaccaggagctgccctcggaggtggggaggtggggaccggacatccctgtttcctgctgccacagcagttctaatccctggtggctcctgctccccgccgcgccccccccaccgccccatgctcctgctggccaccgcacagctaatccaagaggagggagggtcagggtagaggggtcacgcaccatcctctccctcaccctgtgcagagcagagccagctggacctactgtgccttgacagggtggggcagagagggagagggtggcagccccctcttcccgcaaagccctttagcaacatcccccgataaatggggcagcagctgtgtatcttatccttcctacctttctgccttccttccaccctttctgctctcttgcctgagagactataaatggtacagagtgtcctagaggaagtgggaagcttggaggctgtatggggctgtgacttcacaaccctctcctgcccccttcctccagctggaagccaggttggcccacagctttagcagggtaggggtaggggagcatctgcatgccacatgcttgtgcttctgcctcccaggcccactccctgactgttctaggggaggaggaggagaactgagggtcctccttcccaacacacacacgcacacgccttctcctaccacagcaagtgaagaatctcacttcttctctcctggcttccacagaggatgaaaccaggcattccttggcctaaggagaagagggagagggatgtgagagtagtgggtgggtggggaggccagggcttgggaaataagtgggagagacccagcatgccctgcggccactgtgcaagcagcacccagtgcccccttcctcccccaggcccagcgaggagatggtgaagatggtgctgagccggccctgccatcctgacgaccagttcaccaccagcatcctgcggcactggtgcatgaaacatgacgagctgctggccgagcacatcaagtccctgctcatcaagaacaacagcctgcctcgcaagagacagaggtgggacacggtccctgtctaccctccaggccatggcggtctgcagtgattgctgtcggtggtggtggtggtggtggtggtggtggtgatgggggtcagtgctgtcccagcctggtttgtgggcgacatctagtggtccgaagccacatggcatgcgagaccaccgtggccctttctccccatcttccagtgcccctgtggccaggatcccctgttctaggcacacctttctcacccaaccccagccctcccaggctgcctatcctgttccccatgtaggctgcctctgtcttaagggggccctggcgggtggagggtgtctcgcactctggaaccctcccacactcagactctggctctggtgattcctgcacagcctgaggagctctagcagcaagctggcccagctgactctggagcagatcctggagcacttggacaatctgcggctcaacctgaccaacaccaagcagaactgtatgccttccaccctcggcgtccagtgtagacggtgctgccctggcccagactatgcctggagccaggctgggggcaggggcaggacacccggggccacaacccacactcgggataaaacaacctgtgcgtgctgtttaataagctcccagacatctgattgtttttccttccctgctctcccttttcttcctctagtttttagccagacgccaattctccaggcgctgcagcatgtccaagcgagctgtgacgaagcccacaagatgaagtgaggctcctgccactttgggccttggaaagtagtaggggaaaagcctaagggagaggaagcctgctagggacataaacgtaatggccagcaagaccttagggtccagggttgaagaaaaagaaggcctaggcctgggggcagagaagaggatgggaggtgccgtaggagcagcaggctcccactcaaagagctaccgctccttttccttagattcagtgatctcttctccctggcggaggaatatgaggactcttccaccaagccacccaagagccggcgaaaagcagctctgtccagccctcgaagtcgaaagaatgccacacagccccccaatgccgaagaagagtcgggctccagcagtgcttcagtgagaacccagccagtgcacagggggaaaaggagcactgggtgcaggtggagtcggcgccagcagctgcccaggctgttaacttcccatttcccctcccatctcttccaggaagaggaagacacgaaaccgaagcctaccaagcggaaacgaaaagggtcctctgcagtgggctctgacagtgactgaggccctgcattccccatcccacccccggctggactgccctctccttcttggtgattcaaaggttaatagaggctgaggagattgcaggggaaacacccttgctgcatccccaagctcccccggtggaaggaggagctttctcctctggctgagtttgagaagctgccatgcagcccctagccccttccctcctcctggggcctccagcccctcacactgctgttcccagtgatatttgggatctgactgaagccagaggctctgtaaaatcagaccatagtggaagtcctcagccccctggccccttccgcaatctcctcccccagtctcccaaagagccatttcaacagagaagggaaatgacaaaggggcagctggccagataagctaggatgagagcagagactcagtgtgtgggtgtcccttcctgcttccccttcaggtcttggtttgttctgaagggacgttttatagtcactatccacatgccagtgtgaaatgggcatctatgacgtggtcagggtgtccattcctaatcatggggcagatgccacaagcattcagaaaggagtctgaaagggtggccacagccccacgtggtgtgccctggaggcttaggttggtctgaggttggcacctcaatctacaccagagcccagggagtcccagaggcaagtttcacagaattgtcaaatgatcccatttccttgagtctgtttttttttttgtttttttttgttttttttttggcagagataatcgtgtcttaaaagttgtttttaaatgacaataaaacaagccagaatgtcttttgtgctggagtgtctgctggcatttgccccgtgcatgtatagcttggtcttgatttgattggcacccctacttgtaaccgcagaacatccccctttcccttcctgttctgcccccacttttgtctagagcagaagggacttggctttggccactacccatccttcctgctgccactggaggtgggagccaggcactgatctgtctatgcagaaccatcccccgtaggatgaggcctgtccttactcatttctcaagaaacaagatgcttccaaaaggtctgtcatcctccagttgaagtctgtgtgcctaccaagaatggccggaggactcgctgcttgacgggagggatgctccagcttggtctccagggacaactgtacctggagataaagtctggataccagggagggacagagatgctcttccttccacagtgtggccacttgctgggccatgtgaaccagcagaggagagttccttggctatgctgttgttcccccgctgtccagggagaatggaggtggactgaggagtgaagtttgggcgaactgcacagagctgctcctcttcaccccgaaaatttgtctttttacagaatccaggttctcccctccctcatcactgctgttgcttcctttgaaagtctaaaccactggaggcttctttttccttcctctctccttccccagtttcctctgtcccaattaaaaccaggatggagagcatttgctggctggccccaattattgtacccttgcccaaagggaggggcctctgtcgtgacccctcagaaatctggcagtctgggtttccacctttcccctatttaactctcagcccccacccatcccctggggttgcggctggcaggccgggacttgcagaaccaaatgggccaggggccaagttcattcttttgggagagagcaatggtaccttcccttaacgggaaaacgagaaatattgaggggaagatggactgcgatccaaacgccctggctctcaggcctggactctagggcttagccagatgcctaaaccgcccaagccgagaaacaacttagaagacagacataaccctgggattcagggaaggcgcgagcaccgcccaggacctggtagggtgcgagccgcgagcagtccgggagggagcgcgcctagggcggagcgtaggctgtggggggagggctgggagtccggggccgccccacacccgcactcctcccgggtttctgctctccgcccgtgtggagtggtgggggcctgggtg

SEQ ID NO: 4351 - DNA, 6000 bp, Homo sapiens
ctggtgctggcctccactcaccttcctctgctaagggctctgtccctgggtccacagcactctgcctttaaaatagctctcttggcttcttaggacagtgttctttctccaagtcatattctccccctttctcccttgcttccctcccaacttttcactgaaacagtaagatttagaggttgtgttcttaggcatgccacattacttccatgcacattagtgacttcatcagcaaaattaatatattcagataattccctaaggcaagaggctggaccaagctctcctggggttccctcttctaaatactatgctttggtgacaaggcaatcctcttcctggtgtctaccaccctgggaacaactttagggcactctcttgttactgccccccgtccttggagaggggaaggctaagggagtcactcctgataccttcccactgtccttcttttgcagtgctggtaatggctggtggtgggtgcctgtggtggcccctctggtgggggccaccgttggcacagccacttaccagctgttggtggctctgcaccaccctgagggcccagagccagctcaggatctggtgtctgctcaacacaaagcctcagagttggaaactcctgcctcagctcagatgctggagtgtaagctatgattaggacaaccctcacttcactcatggaccctggagccagccactgaccccgcctgggaacaacagtcattcttcctctttgttaatgtgccagaacctgggaggcttctctgtttatctgtttggcatcccttcctcctaaactaagaaggatcctggacagggagaagtggaggaggataaggtaccaggactcaggcttctcatcccctcctcccgcaaagcggttttctgaccctcagggcctctcggaatgtagttgctcgaggtaaccgctagagggtgcgcacctggatgctggatggggacggctgcgggcatctgcagggtggagggggccaccatccagtgtagggcacaaccctggggactgccctccatagcctgtcccgactgccgactcctagctctcatcgcctcggcgcctcccaccttcaccctctcggggatgcctccccaagagggtagttaggggtggggaagccgcctccacccagggggcgtggtgggggcggagggaaggagggcggcggggcacagagacagagagcaaggctgtgaaactgaggcaccgttcctagacatctcggtgctgtgtcgttcattcaaggagagttgagatacagtgaaatgagccagggcgaggagggagggtgaaggaacggagggcgggcggctccgaggagcgagagtcgggctgagggcaacctggcgccagggaaaattctggttattcaccacttctacagctctcctgccgctccctgcagaggatgctcgttttgcagagaaggcagtgttcctctattcccttcttccgaattaaaaataccccctcagagcgatctagcctcccgaattgttttttcttttaagatgcggatggacgtacgtgtgggggcatcccagcccagccacgccgaggctcggaagggctaagaccctcccactgccccgcacaaagatggctgctccctcctccccgctccttctcccctccccaaaaccccctcccgccccccggcccccgccgccggctccgtcacttccgccccgccgtggccgaaactgacacaaagtagcgggccgaggccccgggggagcggggccgcagctgggggggcgggagcccgtggggagccgagccgagcgccccccgccccagcccccggcatgggcagtacggggccgccggggcgggcgccgagcgctgagcgctgaggtgaggcgaggcgaggcgaagcgggggcgcccgggagcgcggggccaggagggcagagggagatgcggccgcagccgcggggctggaggggccggggagcgggtgtagactggggagcaccgggggccaagatttgggagctgcggccagacggggcggggatggcggccgactggagacgaggggctgtcgggttcccggggacggggcagagcgggggtctgcgtacaggatgggaggatggggtgccgaaggggcgcgtggagagcaggagagcggcgcgagtgccaaggagaagctcgtgcagccttggccaggggagacccgcccagagagttgttgggcgagaggagtaaccgggacccgagggtttggtgcctggagaagggagtttgggctggtaggctttgtctcagtaaggtggaggtctatgcctgaggaaaactgagggtgtcaggaaggggcagtagctctgggagatgatagctgtgccgggagccctgagttctgtccttggtgagggaaggtggcccgagctcgtgttggtggccagtgagctggaggtctcgagttccatttcctcctgtttccctgacctgccatcctcctctgaaagaagtggccagcctttggggctcttgcttgtaagggagcagggaccggacctataggaggagctgttttcctccatggagcattgcctgcttgccggggctggctatttttatcccaaatgtggccgagagggggctggggctgggtgacggggcagggcaacgtggctgatgggcctgacctgctcagaaaacccaggctgtgtgagactaagaaggaaaagtgagaggggatcccagttcccaggtctctcctctcttccccttggaatgatggcccccccagaggggatgaggtctggggccaagcctgcttccagtctccccagggtctcagaggtagaacaactttcctggtccatatccagactcctgactcctgatggcgtgtgcagctcctacattaactctttcatgggactcaaactcagatgtttaggctgatagtgtttcttgatcccttcctccccaagggcggggctgcctgtagaacttgtgatgcccactcttgcatcctttaacctctccctgtgctccccaccctcccgtgactcatactcagactgggtggagaccctggctgggggccctggaggagggcttggcatctctaaaatatggatgaggtttttcttcctgagccaggcaccctggactgccatagttggagaaggtcagggatgaaaaggacttctggctttcaggattgcctgacttggtgtaagggcgggatctgagctagcgaagggagaactggtgtgggtgactgggttgtggccagaatctgtaattatagagcttagccagacaggcaattagtatctcttggggctgacaggttggtggggtgtgcctggtaggctaaaggcagagggaaccaaagaggatgaggaggtgaaaggccttccacccagacaaggaaagaggaggtgactgactggcagtttcctttgggccaggctggggagtaaggatgaggctctgccttgtaaggccaggccttgaaccttttaggagaaaggacatgggaaggcggaagcaggcagaggcttgtctcactggtgctccctaagcctgcaccctgtgccatactgactggactaggcttggggtgggagggagggaggggcaaactccccaccagggttgggaagacccctctgccagcccagaagggtggctgacccaggctgaggggaagctgtttagggactgtctgtgcagaaagtgagggccatgcctctaatgtgagctcccctggaggaggtgataatggaagccctagtaatggggggtggggatggcagggaacttataagcctttcgagaagggtggagcctgcccaccctgtttcctgatgccctgccaggtgtttcctggctcatgttccctccaccccaccctttggggaaactgctttctagtaagcacaagcactactcattgccgccagaacacatgagagcctccattgtccctgggatggataccttgagagctgttccccttttttcaatatctggcctcttctcctttccctacaggcatgggcttctgtaaagtctcagccccccatgtcacccaaggcaggggcatgatgggaggtggtggggaagtcccctctttcccaggaacccatcatggcagtaagaggagagactgggagaaggaggctgggggaggggcagggtcagagctggagaagagggtcttcaaaagaggtctcatgaggggagggaagggttatcctcagcttcctgacctcattcgtctgtcacttcttgcagggtctcccatgggattgctgggatcttgctgggtgagatggcagtgtgtgcaaaaaagcgccccccaggtaagacaggcaaggaggggagatcccgggaaccatcaagagtgggtgttgttatggctcagggagcaaaaggaaaagggacaactggtatgggtctgagggagggtagcttacagcagcccctacccagcttgggggcagcctaggaaaccgaattcttccgcttgatcccaaagctgggttatctgccaggacagcgcagagcaccagccccacgccccgaaacacctgcagtcttatcttcgggcacctgcagctcctgctttctggcctagggagctgtgttctcatctctgcttggtcctctcaccccttccctgctcccctcgtttttccatctaccggttctcctggtttttccgcgggcgggggtgtgtgtgtgtgaaagcggttgcccccgacaacgccggcagtccgctcacccgcattggcccggcccgggggtgggaggggaggcggggctcgcgcgcgagctttcgcctacgcggcgcgctggcaggctgcggctcctgcagtcggggagcgggcgggggcggaaccctgggcgtgctcggcgtgtccggggccactcagcgcacgctggcatccgccggggggcatggggggcggcggcggcggcgcagctgagctcgcggtgtccccgagcgccggcggccgggaggatggcctgggctgcgggtggggcgcgcgcccgacggctggggctcccctctgagcggctgcggctcctgcacctccccggggagccgccccgtcgatgccactaaggccaaggacatatagacggtctgccctcccccactcaaaccgggatcatgacggtccccaaggagatgcccgagaagtgggcccgggcccaggcgcctccctcttggagccgaaagaagccctcttgggggacaggtaacgggaggcagcgcctggcagctctcccgcacccattatttcccccctccaatccctacattcacttgtccccagcctccccctacctgccttgatcctctttccagacccagagatcctggctccgaaggatccagtccctaccttcttcgtttgcatggtctttggtgattgcgcaggggacttggcccaagagagcccctctagggaagtttatgggagtgaagtggcttggtaggcagggggcactgtggcctgggttttgttactgcagtgtgctctgcaggggtcctggggtgtgtagaaagggttctggaatgctgtctttggctcccggacaggcttaaggcattaggtttgctgcctaaccaagttacccctttttgcagcatgaggtcatggtgacccccggggagacgggctggggaatctattataggacagctccttgttctgggacatgaatttgatgcctgcagtcccagacctgcagaggtttcagataggtttagctagataggtgtcactaactgagtgacagatgagccctttaaagctaaatgtgtgcagatggtacaaggaaggtccagttagagagcaactgtttcaattacatttcattcctccctcctctatctctatctcagtctgcatgacccatatccctgaaacgcaccccccacacctttttctacttgaagatgagctttgaaataaggtgatgtcatttcgggccagtcagaag

SEQ ID NO: 4352 - DNA, 6000 bp, Homo sapiens
ctaagtctcactctgtcgcccaggctggagtgcagtggcgtgatcttggctcactgcaacctccacctccccagttcaagcgattctcgtgcctcagcttcccgagtagctgggattacaggcacacactaccacgcccggctaatttagaattgaaataatttatgtacagtatcttagtacaggacctgacattataaacaatgagtggcagccattcttatttaatcagtcctaacaaagttcataaaagtgagactgtgtttgcttagctttttccctagggcctggatacccccagcccccatgacacacaataggggccaaatgaatgtgttgtgaaaaaatgaaaaacaaaaaacaaaaaagaacatgctgggattccttgacagggtcgtgaagcaaactgaatgtgaatgcacagatggaaatgtgccagacagtcattccaagcagaatgtgcaaagactcagtccacagggaatgcgaagtgccagggctagtctcaggagaaactggctcagaagagacagctctcagggagggctaaagtaggaaagaggctagaaagggaccaggtgagggaaggctctgaaggccaagcccaagagttctgcctgtctggcaggcagcagggcctctggagtttcttgggcaaagagtggctgcttcctgggtaaggtggcctgtggaaaatccctgacaactgtgtagagacatgtcgtgagggatggcagggagcatagtgaactaggtttgtggtttggaatcagggcccctggggtccagccaagttggattgtttactatctgtgtgactttgagagtcacttcacctttctcaactgtaaagtggggatagcaacagtgatagtcgatctggcctgctcacttctcagcctcactgtgagaaccaaataagatgatttacaggaaagtgcaaatgagagttgtggctgatatccgcttggagagagcctggagggtgcatcctcccattctccatcacagagttggggagggaggcaccctcgccctccaggggtttcctttgtccaacccagcctcctccaacacgcgggaattgtcaggcctggcgacttcagacaggaaacgctgtccagttccccttctttcccgcctcgctcccgggctggcgctaacgcccacctcccaacagcgccacccgctggcggatatcctgcaccgcggctgcccgctcctgcgccgctggctgtgccggcgctgcgtggtgtgccaggcacccgagacgcccgagtcctacgtgtgccggacgctggactgcgaggccgtgtactgctggtcgtgctgggacgacatgcggcagcggtgcccggtctgcacgccccgcgaagagctctcttcctccgcctttagtgacagcaacgacgacactgcctacgcggggtgaagaggcgtcctgctcgctcttccgcaccgtccttcccggttaataaaatgccctgtacgcttcacgtgggtcggggactggggtgagccgcgcactgcctcgcctgcagtcgggaaagcctgcccgcccgacctctccgagccaggccgcgcacaggaggcagggaggccgcgaagctactagggaggggtccggacctggcgccgggtgaaggcgcgccgcccaagccggtcggaccgggcaccggctcccactccgcacagttgcggggaagcggtagcgctgagcagcgcgggcgtagtgggcggtgtccccgctcccgaggcacccggcgcgcagcggggcgggctttgccgggggcggagcttggcttggggccgggtgggagggggcgggccggggcggggcctggtggccgcgcggcgctgctgggttctccgaggcgacctggccgccggccgctcctccgcgcgctgttccgcacttgctgccctcgcccggcccggagcgccgctgccatgcggctggcgctgctctgggccctggggctcctgggcgcgggcagccctctgccttcctggccgctcccaaatataggtgagtcctccgcctggagtgggtcggggggcggactgggagggaggtgcaggaaagtcggaaggcattagggtaatggggccggacggagaccctgggagagcccagccagagcgcggcccgccctggtccgctgtcctgggcctagggcccggtgacttggcgatggggtgaaaagagaaggaggggggatgccggcgccccctgcctcctgcctggtcatcctctgcgcggtccctgcggacactttcaggctcaggtaccaggtaccgaggggcctgtccagcgccacttcaagatcgtgatgagagggtcgctgctccccaggactggcatcttcgctgctctggggcctagctaaccgttcgacccggtgccagggcgctgagcgggcatggcttgtagggtttagtgaagaggattctctctagcctctattccaggcctggggccgccaggcactcctcaccctggtgctgttgccaccagtgcctggccgagcgggaggggcccgagatgagccaggagaagggagaattggccaggaaagaggctgggacaccaactcctccttggaactttcacttcccgctgctgtcttgggccgggaccgagagggcaggcgcgggtggagtgtccggaggagagagggccattgtgtgttgggggggtggggggtgctcgaggaggaagcagaggctgtaggcagcgggtgtgcctgactgggcatgagggtgtttagggaggtgggggtgtttgcactgctcacccagaaatgggcgttcctggcatctccgatgtgagcgaaggggagggtgagcgggcacccggccacaaggcttagctcagtctcgagagggggcgttcctgaagtggggggagagtgattgggagggagtgggaaccggggagggtcctgtgagaacctgggattggccggaaggggacaaggagggccacaggctgcgcaagccgaaagtctttcttggggacttgtgaatgggttggtgggtggaaagccataaattagagagacaccctctccttccagtattcttctttaagtctcagcatgcaatgtggaagcccctcaggtacctaagggtcttgatgggctgggagctggtggatctgagggcacctgtcacccccagccctgctgtcgattccctcagtactgtcttggggtgtcctgggacctgcaggtggcactgaggagcagcaggcagagtcagagaaggccccgagggagcccttggagccccaggtccttcaggacgatctcccaattagcctcaaaaaggtgcttcaggtgagctctcactcccctctaataaataaacgaatccacacacgccccggtatagccaggtgtctcaaagccaaagcttggctgaggagctggtgggtagagctcactgtagtgggtctatcccaggcccagctgcctctcccaccacaccccagcacctggcttcacttatctccctctccctctgcacacacgtgtatctgtctgcctcagccccacccaacccatccatctccactggggaaattgtgaagccaaacttgctttcttcatctcatgttgtcggttttctcagtggggggatttggaaagagtcaggaccttaccaaacccccccccccccaccccattctaaagctgagtcagaggaagggctggggcttgtgctgggtcctacacggtgcttcctctctgggcaggaagccgagaaggggtggctcagataccttccttgacctccgcacacaaccccccagaacaatgctccaggccaggcagggtttcctggcccctcccctgggatccccccaccagtgatctaattgctggtgctcttctgtgggcctgaggttttctggttagagaggctgggagttgtggacaggtctagggaggtgacctgccctctggtgcccacagaccagtctgcctgagcccctgaggatcaagttggagctggacggtgacagtcatatcctggagctgctacagaataggtaatagtgatggtggcaataacagtgaccacatggccaacaacttgtatagcatttattatgtgccaggtactaagtgcttgtgctcatttaatcctcataacagccctataagggatatactatcatgtattattgtcctcactttatacatgaggaagtcaaggcacagagagattaaataacttgccccaggtcacacagctagtatgtggtgaaaaccagattggaattcaaataaactaacagagtcagtggcccaaccagtatactttgctgccccggggtcaggagtggaaaagttggctgcgggggttgcctggtccccagccccacaaccaccttcaagcctctgcttgtcaatgcacgacctgggaagtggctttagcactgccttctttttcttcactccacagggagttggtcccaggccgcccaaccctggtgtggtaccagcccgatggcactcgggtggtcagtgagggacacactttggtgagtcaggccctcttgtgccatttttggcttaggggaaagagggagggggtggctggaaggtgagaggacactgcatatttttaccgtcaagctaggctcctcagttccagtcctggtgtgctctctgagacagcactaatgttgttcccatgctgcaggagaactgctgctaccagggaagagtgcggggatatgcaggctcctgggtgtccatctgcacctgctctgggctcaggtatactgggcggatttaatgacagtagagaaagtaaggagacccaggcatggagctgaaatgttctctgactttcttttttcttagaggcttggtggtcctgaccccagagagaagctataccctggagcaggggcctggggaccttcagggtcctcccattatttcgcgaatccaagatctccacctgccaggccacacctgtgccctgagctggcgggaatctgtacacactcagaagccaccagagcaccccctgggacagcgccacattcgccgggtgaggatgaatggcaggggggtgggctttggttgtcttgagggctgatccccagacacttagagctatgtgtgcacagtaacaacagctcctgcgaatggagcactttccacatgctgggcactttgtgaacattagctcgtgtactcctcccatacctaggaggtaggtgctatcaatagctctattttaaaatgacgaaaccttacaaaaagtatctgggcatggtggcgtgcacccgtagttccagccactcaggaggccgaagtggaagaatcgcttgagcccaggaggcagaggtttcagtgggccgagatcgagccactacacaccagcctgggtgaaagagtgagacctcgtctcaaaaaataaaataaaaataaaataaaataaaatctagctgagacagattaggtggtttgcccgaggccctacaactaataaatggcctatccatttattagttgtatttggctcttcatctgtcttatgatcccatttgcagagagctctcacttggttatagataatacatagttaccaatgatgaagcaatataaacccaatttcctaatttgtaaaatgaagataataaaactacttgctgcatagagttgctgggaagattaaataagtccatatagatgtaaagtgcttaaaactatgccagacctatggtaagtgacaagagttgttattgggatttttaaaaattattattattattattattatttgagacagagtctcgctctgtctcccaggctggagtgcagtggcatgatctcggctcactgcaagctccgcctcccaggttcacgccattctcttgcctcagcctcccgagtagctgggactacaggcgcccgccactacacccggctaatgttttgtattttttagtacagacagggtttcaccgtgttatcc

SEQ ID NO: 4353 - DNA, 6000 bp, Homo sapiens
ttcctcttccctgcagtggacttctggggagaattccaccttccctcacagagtctggcccccttctgagtgggatgtggggaggaaattttatagaatatgtccaggggagtggcaggagatgagacagaggtggtgtgggggccatgttgccaaaggccttaaatgccacgctgaaggattttgaaattactctgtagcccatagataattaagtagaaacagatcttttagttatagtcacctcgattctcaagaagataactggactagtatcaaaagatctggctttggtttggcaatatcaaaagctttttcacacatctgtaagcccaaatgtaagccggtccatagtaggtgctccataagtgtttgttgttaagtcaattgcagggttctttttttttttttttttcgtgagacggagatttgctcttgttgcccaggctggagtgcaatggcactatctcggctcaccatatcctctgcttcccaggttcaagcgattctcatgcctcagcctcctgagtagctgagattacaagcatgtgccaccctgcccggctaattttgtattttttgtagagacggggtttcaccttgttgtccaggctgatctcgaactcctgacctcaggtgatccacccgcctcagcctcccaaagttctgggattacaggcgtgagccactgcacctggcaattgcaaggttatttctaagttcttttttagagactgtctagctctgtcacccaggctgcagtgtagaggcatagtcacagctcactgtaacctcaactcctggactcaagtgatcctcctgcctcagcctccagagtagcatgcactatgtaccccagctaacttattattattattattattattttgtgtacagacgggttctcaaaatgtcacccaggctaatttctaactcctggtcttacacgatcctcccaggtcagcctcccaatagtcctaagttctttttctttttctttttttttttttttttttttgagagtcttgttctgtcgcccaggctggagtgcagtgcagtggcacgatctcgggtcactgcaacctctgcctcccgggttcaagtgattctcctgcctcagcctcctgggtagctgggattacaggtgtgtgccaccatgcctggataatttttgtatttttagtagagacggagtttcaccatgttggtcaagctggtctcaaactcctgacctcgtgatctgtccgcctcagcctcccaaagggctgggattagaggtgtgagccaccatgcccggccaatagtcctaaattctaagagccaatccacccaactgctcagcaactgagggatgtctgaatgtgcatggatatgtttatttctgtcctgctttcattgcaatggcaaactctgaaatactcacgtaatgaagcattacactccctttaaaacattgtttacaaagggtttataacatggaaaatgtcttctgttgtaaagggaaaaaaagaagcacacaattgaaatgagtcatgtttatcacattgtctaaaagcaagcaaaatctcttccccagcaaaaagctggcagggcagggaggccaatgttaacagcagccggtggtcctcccctccccttatcctcctgttctctattttccaactttttttttttttgagatggagtgtcactctgttacccacgctagagtacagtggtgcgatctcagctcactgcaacttccacctcccagattcaagtgattctcctgcctcagcctcccaagtagctgggattacaggcacccacgactacacccagctaatttttgtatttttaggagagatggggtttcaccatgttggccaggctggtctcaaactcctgacctcaagtgattcacccgcctcagcctcccaaagtgctggaattacaggcgtgagccaccgtgcccggcctattttccaacttctgaaaaatgtgtgcacattactaataaagtggggaagggtatactttatgtttcaaaatgaccttgagggagtacgacagagattgctctcagcccaggttctgctcctccccctgctgcctcaccccattgcccagagatgacccctggggctgagccaggtttcacttgccccagggccctgcagctctggccttcccctccccaaactgcagggcacccagcaaaggagtcgcaatccagtacctgcacctgttcccaactggaaatgctgcctccaggcagccagggcctaccccaagacctcagaggaatttcctctgaggaaattcctgccctcccaggaatttccagaaaggactcatggaggaatttcctagacatgcagacaggcagacagacagacacctcaggcagctctcgtcactaagcgcagatgtttgcctgcgggtgacgtgctgggagccaacacaagcacacaattttgcggcgagaggcagcacgaagcaagaatggagagcagacccacccgggcaggctgggggctggcatgaggaagggactgggagggggccccagagttggtcagcagatcgagtctccaggaacagaagtccctactattatctctgtctgaatggcacagtgccctgcaactctcctctcagcacagcaggcattgcaggggctccaggaagggtcagggtagtgtgactgtgagtggtagggccgcagtctgggcttgagcacttagcaagtttgctgtcctggtggcttgtcaatatcccctaccggcctgggggctccccaaggtagtgattttatcttaaacccatccttacactctcggtgcccatcgcaacacccagctcatcacaacactcagtgtctagggctgctccagtagggtggatgatcgacccccatatggataggggagtggatagagagtgatgggatcaatgccctaagtgagatgagaatactggggacagcaccaaagcagggaaagagggctccgggtcctgtcggtgcgcagaatttccatgcacgcttctgcacccagcttgctccagacctagacgcaggcaagagctgacgtggccccgccagactgggcccagcgagcccgaacctgcctggcccaagcagctgcagcgtgggacttcacacgtccccgcccagtcccagtggtcagagaaaccagggaatccggcccaaagctgtctcctccaggaggcaacccgggccacctgctctaaagagctaccagcatccctcccctcttcaacccccctgctggctccttttcagaacagttatgtccagcagaagttaagttccttcactgaacagtgagtgatttcactcactccacagatatttactgaccatctactgtatgtgctagatgctgtgccaggtgctggcagtaagataatgaacaaaacaaaaacccatgtcctcctggagctttgactctatggaatgcccgaactgggaggcagtactctcgccggggccacgtgggaggtcgacacccaggtgtcctcctaggtgagcaaaaggcgcgtgaggtgccgccctgggagcagtcggcgggtggacttcgtcctgggcgagaggagcgggccgcacctcggacaaacgcttggctgggcacgtcgcctggggcaggtgcccgagggagaggggggtggcgctggccgtgcgcaaaacccggccctgacccggccacggggttagaggccgttggtactctatgtttattgtaaacgcagcgaatacggcctccagcggcctcagcgcacgtggtggtgcagtggggagccggctgggccctccccagctccaggctcctccccggcggggtcagcgccagacttgctgcggcgtccgggccccgcgtaattacaggggctgtagccaggcctggccgtaaaataggaggatgaaacggcctgggaactggagaagctgggccggagctggccaggggccccgggtccgtggcttcccgcgatgcgcagccgcagggaagggccggctgaggatgcgcacacacactcacaacaccaacctggcgcgcacacagccacacaaccacacacgtaaaccaccaaacgcacgcagacacacagcattcggctctcccactccaggctcactcgtgagcctaatcaaacacctgcccgccctctccaccccaggagctgacacccgcccgccaagccctctccagacggcagcagatccaggcggggagaagagccccgagaggcaaattccagtgggtttgtttacacagcgcgggggagggggcctgagccgggtactggggcccgactgactgggagccccagctcagactgggccagctccagctgtgcagcctgaggactgcgcacaaacgcccctccgttccaccccacccccgctgcacgccggtacgcgtctcccctcctcttcacacgctgttcacaaacattagcatacgtctgtcaaagagtttcacacgcttccacacacgcggctgtgatactactcacaaatgctttcatgctagcgcgccatcacacgtatttcatgtgtggttacagtttgtcacccttcatgcccagattctcacagtccatattcaagagcctgttcgcacggtgtacgcgtgtgttgttacatatactcaggttattagcgctctttgacttatctaaaataagaacggccccctctcgagcccagggtcccgcgtgtcgctcctgcgggcaggcactgatgtgatggacagaggcgtccttagccccggccgcacacgttacacactcgatcacacaaagcgttgcactttattcccggcatctaggcgatgacacaatctccagaacaaagacaacattgacaaacccaacaaaaacaaacagccgcgtgtgtgtggggaggggcagtcaagcgcagagtccgggaaggggatgggggaggaggagagtgtgggaacgcgggcgcccgagcctgggcatgcgaggctcagaaaggtgcggggcatgtcaacaacctcgcaccctgcaaggtccgcgcgcggagcagcaaagccgtgtcccgcacccccgcgttcgcagactcgcacttgcgagttcttcccttctcccgcacgcgactgcgcccagggacgcaagcccaccaccgggacaggctcacaaagctccacgcagacccacaagtgagcgaacacacatctctgagcagatctgcgggggcagaggagcgcgcttcgctctttcctgcacccccagcctcctcgcctccccaccccgcccctcctccacctccccagcccccaagcccccaggcagccgcgcgccgggcggggcgagggcggggcggggtgtcgggcggcgccggcccaaaaggcggagtcgctaggcgaaggggccagatctgtgagcccagcgctgactgcgccgcggagaaagccagtgggaacccagacccataggagacccgcgtccccgctcggcctggccaggccccgcgctatggagttcctctgggcccctctcttgggtctgtgctgcagtctggccgctgctgatcgccacaccgtcttctggaacagttcaaatcccaagtaagcctcgagactcccgctggcagcctgggctcccggctggcactaccccaccgggataactgtcccggccaaaccctgagctgagcctagagtagatgaccgaggtaggagggcggctgtagattttcctcccctcacttctccgtcatatctgggagcaccccaccccggggcatgcttgtgtctacttgcatgggcttatatctgcccttcccttccttctctctggcacccctattactctaaagtgagggactcatgctgggcagttcctgccttcagcatagacttcgcccctggcagccagggcccttgttccaggccccccacccccccactgtgaaagcctccacgcctctccttgtgtgtcctttgggtatctgaccacactgacagatac

SEQ ID NO: 4354 - DNA, 6000 bp, Homo sapiens
agcagggccagggccccagtatatccccattttttttttttttgagtcggagtcttgctctgtttcccaggctggaatgcagtggcgtgatctctgctcaccacaacctccacctcctgggttcaagcaactctcctgcctccgcctcccaagtagctgggactacaggtgcccaccaccatgcccagctaattttttgtattttttagtagagaggaggtttcacagtgttggccaggctggtcttgaactccggaccttgagggatcagcccacctcagcctcccaaagtgctgggattacaggtgtgagccaccacacccgccatcccattcccttcttcaagagctctccctcaaatatctgggaaaggtgggtcttttatttaggtgagagcttctgaacatccctgtcagagagaccaggcagatgggcaacactcagagaaattgctggtgacagctgccagtgagaactataaaagactcgagaccaggccgggcgcggtggcttacgcctgtaatcccagcactttgagaggccgaggtgggtgcatcacttgagattaggtgtttgagaccagcctggccaacgtggtgaaatcccatctctactaaaaatgcaaaaattagctaggcatggtggagggcgcctgtaatcccagctgcttgggaggctgaggcaggagaatcacttgaactcagtggagactgcagtgacccagattgcaccactgcactccggcctgggcaacaggacaagactccatcaccaaaaaaaaaaaaaatactcgagaccagtatctcttggtcagccaaggccaagcaattaaccaattcttctcttagatcactttttttctcggatgggtgtattggagattgtggagtcaggtgaaagatttggaataacagggttagaaaccctaggaacaggtgagccaaaggaatgggttttaagggagagggagatcaagaagacaggagtcaccaaaggccacaggatccgtggtccaatgtcagcaaacaagtctctgtgttacctgcactgtggatggactcgtccccttggaatggacactcactcagggctcctacccgggccatggacccacccagaataattttcatagattccacaaagccctggggggatagcagcagagtaaggtgggaaggtctaccaaccccttccccagctggtgcaaactctatttccacagaactcagaggctcctcccggctcacctgcatcctcaaatacgccttctgtccagtcctaatctccagcccatcgacctccgctggaggaatgggggccagtgctggaaggcctgcatgttggtcacccagtttgcagtccacgtagagatgtagggcagggctgggtctggagggacctcggagtcgcaggagaactgtgtgtgtgcgcccatcagccaggcccgcttgctgtaggttcacggcgtggactttgccatcctcccgctggtatcgcaccagtactgcccaggaggggagatcagtatgggcgctatcccccaccccctgcctcccagctgagccttggatcaactctgctagataccacatctctagggcccctatccctaattctactatgtggctctcaacaccttgtatttaataggtacacaataaatgtttttgaaattgctttagaggccaggcacggtggctcacacctgtaatcccagcactttagaaggccaaggtgggcagatcacttgaggtcagaagttcgagaacagcctggtcaacatggcaaaaccctgtttctactaaaaatacaaaagttagccaggcatggtggtgggcacctgtagtcccagctactcaggaggctgagataggagaattgcttgaacccaggaggcagaggttgcagtgagctgagattgtaccactgcactccagcctaggtgacaaagcaagactccatttaaaaaaataattggtttagagacaaatactttcttagtcttcattggtatcagatgactgtatcctctcctagggtgacagctggttttgtggccactgacctgttccagggatctgaaagacctttctgtatcaccgctgaggcacagagacatgcctcaccctccttccaggcatccccaagtacaacctcccatccctataaatatcaggactcaagcctcaccctattgtttggtacatgggctcctaaagcaccttataagcaccccataccaggtgcccctgatgtctgggcacagcctgatgggaccttggtccctaatggaggccaaggagaatgaggaagcacttgggaagtagggatgagggagagtgcttaaggaggtcaccattgcaagaaaggagatgcccaccagtcacctttgttgatcttgcctacaacagaggcctccagccatcgagtgttgtcttggcgagaatagaggccaaagaggacaccaccctgcttggggggcaggcggaaggtggataagaggtagatgtccccagcagtgagcaaggctgtccggatcttctctgccacagctaccatctgccgagactcgcccacagtcagcaggtcaattactggtcaggcaggggttatcaaggttagagaatgggatcaaatgctaaggtatgccctcccccgagcccacatcaccccctacccccaccaccaggcagcgttagtcacctcaaaattcaacccttggctgggcatggtggctcgcacctgtaatcccaacaccttgggaggttgaggcaggtggatcgcctaaggtcaggagttcgagaccagcctggccaacacggtgaaaccccgtgtctactaaaaatacaaaaacaacaacaaaaaagaaaaaaaaaccacctagccgggcgtggtggcgggcacctgtaatcccagctactcaggaggctgaggcaggagactcgcttgaacctgagaggtggaggttgcagtgagccgagatcgcgccattgcactccagcctgggcaacaagagtgaaactccatctcaaaaagacaaaacgaaaacaaaaaaaaacctcaacccttgttgctctcagaggacagaggcactgtgccttcctttccccattattgcctattactaccttccaggaacctgcaggtttgagactcacttggaaacacagaaacagcaccccacaaatttgagatgcccccaccaggtggcgcaaaggagatgctgtgctgatcccccacaggagtggcacctggtgtccacaacgtagaaatggaaggcagcttctctttccactcctgggtttggctcgttccacaccctagttcccctcctcccatcctaggggcgcagcacactcgctctggataagaacagctgcccactgaggactctaaccctcccaccatctgggctatctcccacgggaatgtaggacccagctcctctgcctcctgtgtcctggccaatctgtggttttccctccagccagtaaagaatctatgcctgtgtcatctgctccagctacctctcccacatccatcggcccatcccaccaccagacctccgggagagcccaggcttcttggtccccacccccgccctgtccttgggcagccaggagcccagggggacgaagcccagggacctacagtacgcccaccttcaggctgctctcccagaccctagggtgcctacagatgctcaggaaccaccccagccaggcagcctgagcatccagttcctgagtcctctgccctggcctcatgcctgaccctgtcctgttccagctcccccactactctccggtgcccactcctctccaccaggccataatttcaccaactctaggcagtcttaagttttcctctggctcaatttctggactcttcccctctccccttgcccacatgttctctgctacttgggctgagggcaaatggggaagaagcagagagcggtctaagaggatggagacaggcttaccctgcagatcctgactggcagatgtgaaaaagcaaaggaggagaagagccagggccccccgaagttcctgcgtctccatgcctctcagccggctcactacccctggcaggcaggcagctgggaggggaaaaggctaggcggagagagcaggagccggggggcggagggacagaattggagggggggccagcaggcgggtgagggggggctgaaacaaagagctgccaatcaccctggaggcatcatcagctctgggaaccaggggcactgggaaagaatcctggaggcctccctgctttctacctctccctaatgatcctcccccaggtgcctccctctccgcagtcatcattgttgggggtctcggcacacagcgctaccgaatgccactgttttctggaagccacgattgtggaaggcaagaacccctggcaggggcagtgctagacagtgggcattattccacagctggcaggaaaggatgccaagggagtggccgcaactagcttgctatagtgcccagggatgcccacatggcatgaattttgctgttctggcggagcaagtgctctttattagggtggggggtcccctgacaagtgcctgtttctccattttccctcattcgtaggaaagcttgggagtctggaagcgtctgacgggaactgaagggagaatctaaagcagtggtcagtgaggtcagagtgaagaaaccaaaaaagaggaaagggacaccagggacaggcgcagaagaccaggggtacaggcgaggagccaaggaccagactgtggaacactgtgggtactagcggacgggccgtgacccggatgaagcagaggggcgcctgagttcccgtcacctaagcgacagcctgcgagcctctcttcccctcccccacccaagccccagcccggcctccgctccggccgccgccaccgcccctgttttgtttccatggcgacaggcggcgcagggcccgctccaaacataacgcgctgtggaaaacatgctgctcgggggacccccccgcagtccccgctcggggacgagccccaaggggccctggagcagtacaggccacgtgcagtttggcaagagcccccagacctggcccaggcgcacaagaccccgctctccagagcctgccgcgccttcaggggttcggggctccacttggacgaggcgccgtgacactccgaggcgcgccgggccgacagcgctgtcccgctacgtgggccacctctggatgggccggcggccgccctcccccgaggcccgcggcccagtcccccgcagttcagctgccagtcgggccagaagaagcctcgcctccccggggatctccccaggccccctgaccgcaacgatcggaggggcggtggcggggggcgggcccaggcaggggagggcagaagcacacaaggaagtgtttccgggacagagggtgggcaagatggcggcgcccatggagctgttctgctggtcagggggctgggggctgccgtcagtggacctggacagcctggccgtgctggtgaggggtggcgccggcgccctctgctgtgccctgatgactggggagggggccgaactagccaagcatccaaaccttgccagggctactcagcacgggcgcagtgggggaaactgaggcagtcaaagagcgtacgtggccgatatggcctcagtgccctatgctgtagttttctaggcttaatgcagcaatgaaaagacgcctggttgggagttcaggtgatgggttctagtccttgctcatccattcactggctgtgtgaccttgcggagatcctttctctttgggcattttttttctccattcggaggtttactaggctggactgtctcagggacctactctagcttggaattcctgccttctcctcagcccccttctcctcttcctcctcacttaacagcatttactgaggctattgtttgttagaccaaacgactcacagccaggctttgtataaagagcttagcaatcagactt

SEQ ID NO: 4355 - DNA, 6000 bp, Homo sapiens
actcaccaacctcctcttgtatgggtgctgctgactctgctctttggtagtgtcccaacagccctttactctagccttgcccacctttccaggttcctgacctacccctcctatcagccacccccacttcaggcatattcacctctcaaccattctctgaacacagcttaccttttcaggcccaactcctttgtaccagccatttctgtcaatctgcctgatatgatcatccctctgcccattgcttcatggttttgtacccccatcaactcagtccaggcatcagctggtaaagccttccctgaatctccatggccgggcgcggtggctcacgcctgtaatcccagcactttgggaggccgagacgggcggatcatgaggtcaggagatcaagaccatcctggctaacatggtgaagccccgtctctactaaaaatacaaaaaaaattagccgggcgtggtggcgggcgcctgtagtcccagctactcaggaggatgaggcaggagaatggcatgaacctgggaggcggaggttgcagtgagccgaggtctcgccactacactccagcctgggtgacagagcgagagactctgtctcaaaaaataaaattaaaaaataaataaataaattaattaattaattaattaaaaaagcctcccctgaatctcccagctctaggtgcccagagcacttagacaggcttctcatttctctgacaagtcccgcacaggtttatttacttctctgactcttctactaagtggtaagctccttgggagcaacaactgagtcccatcagctctggatcctcaaaacctggcatgcagtgcctatgaaaatgttctttaaaatgttcttggaggggccaggcacggtggctcacgcttgtaatcccagcactttgggaggccgaggtagacagatcacttgaggtcaggagttcgagaccagcctggccaacatggtgaaatcctgtctttactaagaatacaaaaattagccgggcatggtggcgggcacctgtaatcccagctactctggaggctgagacaggagaatcacttgaacctgggaggcagaggttgcagtgagccgagatcacgccactgcactccagcctgggcgacaagagcgagcctctgtctcaaaaaaaaagttattggaggactagaggttttttcaagctcaaaatggagcctagcatcacatttaaagatggagaaacaaagatcagggtgctggggaggaagctgacttggctggagaagatacactggagtgcacattggggtgggcagagcaggtgtggatattcaccctgtgaaatgcagggacaggttcagggacttgcccaaggacatgtggtgagtaagtggcaaggttaagattcaaacccagttctcctacctcccactgtacagtcttcagaactttttaaaggataagaaccaaatgagaggatgcacttctatagtgcgcactatgtgctgggcaccattgcagtttacaaattttaacttatttaatccttctgataatgctatgtggtaggtacaacctttcacccacattttataggtgaggaaactgaagtacagagatgttgagtaacttgtccaaggtcacagataagaaatagcaactgggcatggtggcttatgcctgtaatcccagcattttgggaggctgaggcgggaggatcacttgagaccaggaattcaagaccagcctgggctacacagtgagactctgtgtatagaaaaaagaaaaattagccagatgtggtggcacacacctgtagtcctagctactcaggaggctgaggtgggaggattgctagagtccaggagatggaggctgcagtgagccaagatcacgtcactgaattccaatctgggcaacagagtgagaacctgtctcaaaaaaaaagagaaatagtcaggatttgaatccaggctaatctggctccagaggtcatgctcataaatccaaggctatgtgggctctccatgcaaattatttaatatcagaattatggttataatgtttcctttctccctccttgttaaataaaatcataacacctttccaggggatgagcatctttccaaaaaacttatcatccctgcacttgtcctcccccagactcttcccactgctctgcacactttttgtgctctgccctgcaccctctgccaggattctcacctgccattttttcctcacagaagtgcatcagcagaggggagctccaggtgtctctgtcatatcagcctgtggcacagagaatgacagtggtggtcctcaaagccagacacttgccgaagatggatatcaccggtctctcaggtagcagctatttacttcaacctatttcttactgtctgaaccatccccgactccttgcctgtggcccagatagacctccacacttcaagatccttgcctctttcacttttaatctgctcctctttctgtagacattctcttcctgatgagtatctacgtccaatagatttccctggctaggaagattcttcagttgaacaaatggggtctttacatttggcaaggtatcctaaataatattcatgccaggtgctaagagagacttctcaaaaaggctgcaggcatttgtctctgtgccctttaatatacttcttggtatcatgggatttcttcagacctaacctgagaaagttgttctgttctattcctgcttggtttccttggcccctcatccaggcaggcagactcacatatagtcagtgtgtgtttattgtgcaatcactaaagaacacatgggatggccatcaaagatacgaacaacagagccccccctttcccaacatgaaattaccattacataggagaggactgtgtcataggtctgtctccctttttcttatctctttgggggccccagatccttatgtcaaggtgaacgtctactacggcagaaagcgcattgccaagaagaaaacccatgtgaagaagtgcactttgaaccccatcttcaatgaatctttcatctacgacatccccactgacctcctgcctgatatcagcatcgagttcctcgttatcgacttcgatcgcaccaccaagaatgaggtggtggggaggctgatcctgggggcacacagtgtcacagccagtggtgctgaacactggagagaggtctgcgagagcccccgcaagcctgtggccaagtggcacagtctgagcgagtactaatcctgttcttctctcctctaatccccgggggccaagctggggagggatgtggaggggaaaaagatgacagagaagtggactccaaacctcattttagttgtagaagaaaatttcttacaaaacaaattccacaaagaacaccctatatgaccacagctgcagatcagttcttagcaatgatgtttttttttctgctttgcaaggcgctagaatcttttattttactttattttttttgaggtggagtttcgctcttgttgcccgggctggagtgcaatggtgagatctcaactcactgcaacctctgccctccaggttcaagtgattctcctccctcagcctcccaagtagctgggattacaggcacccacgagcatgcccggctaattttttgtattttcagtagagatgggtttcaccatgttggccaggctggtctcgaattccagacctcaggtgatccacccgcctcggcctcccaaagtgctgggattacaggtgcgagccaccgtgcccggcctctggttttgttttgttttttttttttaatgggggacaaaagagagggaaagacccctataaatctatatataacaatgtaaccatatacttgcatgtctaatacaaactgaagaaattagcctaactgccaatatcaagttgcagattttaatccatggaaattgtgttttgtgctgaattgtatttgctgattacctgaaattggcttctttttattgggcttctctggagaatttctcccactccccacctctgcagaagaaaattttgctcttataaaacctcatgttttcatcattcccatcttttctttttattgcctcttatatctctgctctttgacctcaaggtctagaggtctgcagtaagccaagaaacaaaggtggggtggatgaggcaaggtttgcaggagaaagaggaattgagaaatggggtatttttgctatcagctcttctgctatgaagtagtaaaaggcagtctataattaactgacagacctaactgaagcacagagaatacatcagacttatgcatccaagacatcagaacttggattttatcaaacttgatgacttctctaaaaggagctttggaaacttcaaattcagctataggatagtaccaatgaacacatccagctgatcccaaaagctgttttcaggtataaggacaaggagaggagacaagtgacgacagccattcccctttgcagctatctactgtagtgacagccatttcttggttgatgggttggaagtcatcagaggtttgaagaattacactggcctttgtttttctggaaatgccgaccatggagatgctttagagtcttctcaaatagcttagatgttgtaatgaggttagctttgcttcataaaacaggggccctcagaagttctccttaaatttttcaataaaaatttagctcttaaaaaaataacagtgtgactgagtgaatgaagataagttggattctttcagagcattcttttcctcaaaacgagctgcataattcttggaatttatgtcttaccacatggtggagggatggaggaactacaggatgcaattcttcttctaccaatgggcaatagaggttgagagagattcagcatctttctgggattagaattcaagtctctttactcctacagcagctgtgtctccaacgttgagactttgcagatggcacagactccatggataataggtaaacttggggccgggcgcagtggctcacgcctgtaatcccagtattttgggaggccgaggtggaaagatcgcttgagcccaggagttcaagaccagcctgggctacatgacgaaactccatctctatcaaaaatacaaaaaattaactaggtgtggtgctgcacgcctgtggtcccagctattcaggaggctgaggtgggaggatcatttgagcccagaggtagaggctgcagtgagccatgatcatgccactgcactctgggctgggtaacagagtgagatcctgtctcaaaaattaattaattaattaattaaaataaactaggtaaacttggataggcagtagatatttttgcccacctgaggaggaactcagtcaagctgttgcttaacagcttgatccagggcgtgaaaggttagttgagactgaagtgttcacttccatagaagaacatcacttttaaccttgctttggcgaagggagtcggaaagctgagtctctatggacgggggggtgatcttgctttcagtgttccctcagcttttgtggatttaaaaccattctgctccccctaaaccttttgtttgatttcagcccatgttcttgacaatgcagagcaattctgagcagtcacaaagcctactctctgttcttgtccctgccaacccccaccccccataatctgactcacaacttcaccatcagttggggtcataccactagtctctgtcctataccccatgaaatgtaaatactgtatcataagtagaagaaaataatttttgttttctaaaaatgcattttgagatagtttaatgtaaatctgacaggagcattctgaagccccattaggaaaaaatttaaatggttcctcttcatcgccttaatgtctaaagatcagaaatcgctgagcaaacccgcttttgtttccttcccagaaacaatgcaaaacaacaggtggagatagtctggtctttgccctgctgtgtgtgcctctgtagctcctcctgacaaacgtctgggaaa

SEQ ID NO: 4356 - DNA, 6000 bp, Homo sapiens
tgcctggaccatttttctcattaggtatctgcatgccttgttttcactctttcttcagatctctattcaaatgtcagtgtccagtaaagccttccctgaccaaattacattttatattttattttactttttgaggtagggtctcactctgtcacccaggctgagtgcagtggtgtgatcatggctcactgcagcctcgacctcccaggatttaaacaatcctcctgcctcggcctcccaaagtgctaggataacaggcataagccaccatgcccagcccccttaccaaatgttgttattattatttttttttgagatggaatcttgctctgtcacccaggatggagtggattatgtgatctggcacactgcaacctctgcctcccaggttcaagcgattctcgtgcctcagcctcccgagtagctgggattacaggcataagctgccatgctcagctaatttttgtatttttagtagagacggggtttcaccatgttgaccaggctggtcttgaactcctggcctcaagtgatccacccatctcgacctcccaaagtgctgggattaccctaccatacccagccccctgaccaaattttataaaagagtagcatcttcctcatcccgagttttaacctcccagccactctttcttctttatttttctctgggacatttaacactattgagcatacattacacttgtgtatttgtgtcttccaccaaaatacatacacctgaggggcaggtcttttgttgtttttttcatgctaagtccccagtacctattgcagtgcctgactatattgtaggtgctttataagtatttaaagtaaatgcatagactcagaaattgaatcgctcaatgtgagaactttttttttttgagacaaggtctcaccatgttgtccaggctggagtacagtggctattcacaggcttgatcatagcatcatagctcacagcagccttgggttcctggcagcttcccaagtagctgggaccgcaggcacgcgccgccatcctgcccagctatgtgagcacttttgcagaacctgagacctattgccaagtatcatcccaaagagtggaactaattttcactttaaccactagtgggcaggttattaccattctcattttaatgaaggcggctgagacccagcgagagaagaggtttaccccaagtcacccaggactccagattctcagaaaatacagtggcaactcagaatactgtgggaggaccaggggggctttgcagaggaaagggttgttttggcatgaaaggacaagaagggtttcatcaagtggaaatgagaactactatcccggaagagtacatcttccaggtgggagataccgtaggaacagaaactcagagaaaggcggagtccaggctgcctggggaaaagccctccctcactaaagggtcgggaggggcctacagtaccctgcggggagtttgaaattaattgcatgggctctgggaagccagggagggttgtgagtagaggggtgatatgagaattgaggctttctgctatttgtctgtctgctatcttctgtctccattttctttgtccttctcttctgccatgggtttctctcagctgccccagcccctcctggagtaactaagattttccttttctacgtcacaatcctgacagcccatcaggaagcagagggagcgggtgagccaaggtcctcctcagagcctcggtgccccctttgcgctgtgcccagaggggcagagaaaacaagaattggagaggcaactggaaaggaaggtgcctcctacgccccctgactgactctggggtgctggcctccccctgccttctggggccaggcctcaggcccttccacttcttgggctgattctccgtgcctagtaccagttggtgccagctggcagctctcactggagactgaggtggcacgcatatgggggaggggaggaagtgggcaggagcccaaggggaacagggggcagggtctgaggaggtggagtcggaagctgcgtggccagcatgggggtctcatgggatgagggaaaagtgaggcagaggaccctgggggcttccaggggagtaggggaggtgtcaggtggtcctagctctggctttcctgcccctggcaagtccagtcctctccccaccacctactttcctctacactcacccccttaagctgcccctggctaattctccttggtccctttaagagctgcctgggaactggggcactggagggggctggcagggcccccaccccctccctgccatgcctggccctgctccaccccctgtccggtgcagactctgctggaagtcttggacgcctgggttagggtctccacttctgggctgggggtaaggcttaaaagtggtggggaagggggactgtggtccctggggtgggagggaggggcgggatgccagaactctgggactatggacatggagtgtctgtgtgtcaactccagtgaacaatgcagggggtggtcctctggcctctactgggggaggggcagcctcagggatcttgaggggcatatcctaaggagcaggatgcctgggtctcctccctccactcccccatctcatttccccaagaccttcattttctaaattccatcagccactccttgccccctgcaatcaaagacacagggtcccaacatccccactccccacaggtggggaaattgaggctagacaaaccagaggaaatagaattatgtatgctgcagcaggagaaatggagattagcttgtggaaaggctctctctccctctccaccccacagaactgcaaacaggaggtctgggtgtccagctcactccagcgagtttctaactgtggctatggccaccaccctggactatgtccctactctctcatcaagactatttagctcttttctggaagttttgattctcatatggcaaggccaggggaggcccccaaagtccggctgggtgacctggattgaagtggagccaggtaggatctataggctcccccattcccttgggttatttcagaaaggtagctccttccttctctgccacagagactggatccaattcccctaaaagggaagaaaataggggcagggacacaaggatgtccaatgggggtgtgagggcttcctgcagttcacctgcttccttcctgttatcatactagttcagggtcctctactccccaccatcttaatttcaaatcatgtgtcccagtcccaggggagagaagcctgaacaggcaggtcctttctgagtccccacagccgagatgcagagaggcagtgagggtggagtgtcaggaatcagtggggacatggcggccccgttcagggtccacttccgatttcagcacatgccatgccctccttgcttcaccacaaagcaaatgctcaaccaccaccccagctcagatatgaaggggaagcagtcttggtccatgaaaccctctacccagggccgacaccagcacactcatttccttcctcttaaaaatactatgaagtctggcggagccatgctgctcccaggcaggttaaaaagccattattttatggatgtgaggcagggagggtaaatgctctgcccagcatcacacagcaggctacaggcaaccaagcctgggatctagggcccttcgccccagactcatggtgccttttctagtcccctgccagctgacagagaggccagcctggaaggggctttttcttttttcttttttttttttttttttgagatggagtttcgctctttttgcccaggctggagtgcaatggcatgatctcggctcactacaacctccgcctcctgggttcaagtgattctcctgcctcagcctcccgagtagctggtactgcaggcatgcgccaccatgcccggctaattttgtatttttagtagagatggggtttctccaggttggccaggctggtctcgaactcctgacctcaggtgatccgccagcctcagcctcccaaaatgctgggattacaggcgtgagccaccgcacccagccggaaggggctttttcaactcctcattttgccaacaaagttagggcccagtagagacataagggagctctagtaacaaggctgtttaggatcagggctgggagagggcacaggcttggctctcaaaaaggctccatacaaaccgctgcctgcctgtgctcctccccgaatgggaaagaatccggctgtcttctttccctatgtccatctagtctagacccttggaaagtcctgtctgaagtctgctctctacagcacaaaccttccccttttaatacatctcagagggtgttagccacagaaggcttctgggggagccaccttcttctcaggcagcttaggaaggagaggcagaacctgaacctggcagtggaccccctccctcagaagtcaggatactgtaaatagaagagggctccttggggttcttaacagagtctgtcccttggcttatttgcatagttgcatagatatttgtgggctcattcgtgtcctcattggcaaactgaatttgcatggggttgggctgcggtccagctgtgtcgccccggcatatacacagttcccggggtagagggaaacccagaggaactggttgtaaagaggaatgggccccagctgaccccctgaacccaggtggtgacatgtgcacggtggtgcctgctgaaggtgggcaagggagctgagcagggaccgggggctactgtacctccttttcacctcctcccgcatctggagcccctcctcctccacatgtgcgaatccaggagccacagaaggtggggcgcagtgggacatgggtaggaggaggaagaatatggggagattctagtccctcccacttagagatgcggtcgccatggtgactgaggaccagtgaggcgggatggggttgagaatgggggtgggggtgtggcaggggctgaggcactgagagaccggaaagcctggcattccagagggagggaaacgcagcggcatccccaggctccaggtaagggagcgggggagctgacagttctgaagggagggggcggggccattgtctggtgctggctctgccctaaagagggggctgacagaggggtcgggctattgtgtgtgatactcagcgcagccttccagagctagtcagactggaggaggggacctgggaagctctgggtaaggggttaggagggactgagctggtgggtggcaaaaaggctgggagacagtggggatgggaagaggtggagggacacagggggcgtagaggcttggggacgtccctagtgcctatacacgctaggcactcaatacatataagttgacttgacttgcctgtgaccataacaagagggcagatgagggccagggcaggtggagctaaggcagggaagtcaggaggcaatgttccccagaactggactcttctgtgggctgcccctgaagctgaaagggaggaggtgggggaaactggacctgccagatcactcgtgaagccaggagttgcttctctcctggctccaggagctgctcctttagtgcagcatccgtgttctgcaggggctcagaagagactgagcgtctggggctggttgaagctcagaggtagcatagagtcggggcgggaagcaacctctccatctcccctcccacctccacatctagacctttcctctgcacaatagaacctggcaggaaggggctacatcgcatgctgtgtaagggttgcaggggaggagctggactctggcagggcagagggtgcactcagtgttgttgtcatggcaggacccagggctgggctccagggcttgtggagaaatgggctgggggaaaccccagattggagctgtgaaaatgacacggcccctgtgggcaggtccctgaacatctgaccccttcccactgccaccccacctgacctgctgcctgacaccattcccagccaaggtacttctgctcct

SEQ ID NO: 4357 - DNA, 6000 bp, Homo sapiens
aatattgtttttattttttaaaacatgcacatgtttcaaaattcaaaagttaagaaagggtatgtagtatgcaacgaaaaggctccttacccacctggttcccttctgtagagacagtcagtgtcactagtttttatttcatttttaattttttttttttttttttgagatggagtcttgctctgtcgcctaggctggagtgcaatgacgagatctcagctcatgcagcctctgcctcccaggttcaagtgattctcctgcctcagcctcccgaatagctgggattacaggtgtgcaccaccacgtccggttaatttttgtatttttggtagagacggggtttcaccatgttggtcaggctagtctcaaattcctgacctcaggtgatctgcccacctctgcctcccaaagtgctgggattacaggcgtgagccaccacatccagctttaatttttctttgagacagggtcttactctgatgcccaggctgcagtgcagtggcgtgatcatggctcactgcagcctctacttccaggactcaggtgatcctcccacctcagccttccaagttgctgggactacaggcccgcaccaccatgcccggctaatttttatatttttggtagaggaggggtttcaccatgttgtccagtctggttgcaaactcctgggctcaggtgatccacccatcttggcctcccaaagtgctaggattacaggcttgagccaccactgtctggccatgtcactggtttttaatgtatcctaccagagttactcaatgcatatagaagcaaatatttagtgtgtgcttttctagcctatgagttgggaggaacagggcaagaggcataaggcttttacatcaggaaggattttctgcccatcagatgaaaggagtcagcaagcaaattttgaaatctccctctccaaggaatcttgtcctgtttaaatggacgatgttggccaggtccagtggctcctacctgtaattccaacactttgggaggctgaggtgggagaattgcttgagtccaggagttcaagaccagcctgcgcaacatagtgagactctctatacaaaacatttttttttttttttttgagacagagtcttgctctgtcgcccaggctggagtgcagtggcgcgatcttggctcactgcaaactccgcctcccaggttcatgccattctcctgcctcagcctcctgagtagctgggactacaggcgcctgccaccatgcccagctaattttctttgtatttttagtagagacggggtttcaccatgttagccaggatggtcttgatctcctgacctcatgatctgcccgccttggcctcccaaagtgctgggattacaggcgtgagccgccgcgcccggcactacaaaacatttttaaaaaaattagctgggaatggtagcacaagcctatagacccaactactggggatgctgagatgggaggattgcttgagcccaggagattgaggctgcagtgagccatgatcatgccactgcactccaacctgtgtgacacagagagaccctgtctcaaaagaaaaaaaatcaatcaaaataaatgggtgatatcaccaagatgactcctggaaagggcctgagacttaatagttttttgaaggaagcagagaaaataaaagataggacttaggtggtgaagggtggagggtttgtctgggttgggaaagccacctggtagaagcagcaagcacagtgagggcagaccggtggtgctttgtgtctttagccattgtctttccctggattccagagcagctctcctacctgtgtcctaaggagtgccctcacattgtctttcaagctgtctcggggcccctggctgcagccactgcctccatcctcaccaatcccatggatgtcatacgaacccgtgtgcaggtaagactgaccacttccctcaccctcctcctggagaagccattagaagcatgaccttcaagccctccagtgttgccctgacctctttgtgtcctggccctctagtccagtcagtcttctcctgaacatctaagccccttctgtgtgcttagcatctgcagaagccagcccacagccaggcacagtggctcacgcctgtaatcccagcattttgggaggccgaagcgggcagatcacctgagcccaggagttcgagaccagcctggccaacatggtgaaaccctgtctctactaaaaataaaaaattagctgggtgtgttggcatgcgcctatagtcccagctactcgggaggctgaggcaggagaatcactcgagcccagaggtgtaggttgcattgagccgagatcacgccactgcactccagcctgggtgacagagtgagactttgtctcaaaaaaaaataaataaataaaagaagcccgcccagcacttaaagtacctggaatgcttctcactctgtctgctaccttgcatacctctcctccatcacatgcccatgcctccaggaaatcttactggtttcttccagcctttattggagtcctattccatagcctattagcatagcctatcaacgactctttcctttaccttgcaggtttgtggttataagaaatatcgatttcagttaattcataagtctgtctggtttttccagtaggccataagttctctgtggattatgagagtgacttaaataggtttcacagattttatggtgtggatgcagcaaaaccctgacaaagcccatagtaatggttgtcttcagtcagcttaaagacagttacacagcacctagaccagggaaatagaatctgaatgatgatatgtaatatgcaaatagtaggtgttgccatataaagttttatgtctgatttgaggtggagaatcaaagttgtacaagagaatgaagtcactgggttatggtgaggggaggagggaaggaagataaccttaacaggttggagataaaatcagcttccctagtaccaggatgttgggaagcagataagtaacaaatataggtatttttgttcctaggaaagaatgccccctcatttgaaaatgaatacactggcatctggttggtttgcaaataataaagtgcacagggtcagtcctcattctttcctgagccttgttctgggcgttctaggaggagatccaagggaaaggacaggtctctactttgaggagcttccaggctggaaagacccagaggcataggtgaaaaagtccttgacatggctgtggaaaaagtggaagggttagggaagcagagacggtcacatgagagagtattggagaggaagaagggagtgcggaggagggtgctgaaggaggtagggcggaagcgggggatgttcttagccatggctgggataccttgtgaaggtcatatcatataaagggaggtatgaacaaggagtgagtctgtcctgtattggccgaggggctgaggagtggtttctaaaggtgtagtttaggggttggggagggtgtgggactgttgagaaagaagagagaagtgatttctgcttggccaggctttcagtgtgagagggaagatgcctatatttgttcatggggtgtgtgagagatggcagagatggagaggaaggttccagctctggggcttcaagggattgaaatgatcagaatcaaaatcagactggcagagctgcagagggtcttagagaggatttaacccagcctccctgagaccagagagcagcatctagtccgaagactcatagctacatagattatctcatgatatcaatgatagctaacatttattgtacacttaactatctgccaccactcttgttagtatttatgaatattttttttttcttgctcataacaacctcgtggtgcaggtactattatcactgttttatatttgaggaaattggggcacaaagagttaagtaaattacccaaggttatgttgttagtaggttggggagcagaattcaaactcaggcagtcaggcaccagggctcatactaaatcactgtgctgtaccatccctcacaagcagaatccacaccttccgacgtcggagtctggttctccccactttagcctaaggcagagggagattgagcagaggggctctgactacagacaatggccctccactgtgttgacttttccaggttgagggcaagaactccatcatcctgaccttcagacagctgatggcagaagaagggccttggggcctcatgaagggcctctcggccagaatcatctcagccacaccttccaccattgtcattgtggtgggctatgagagcctcaagaaactcagcctccgacctgagctggtggactcgagacactggtaaccagtggtggggagagaagcctgctgttttccacactaccgtgggtcaggggcagagtggagaggacagcaccctctccaggtgctcccaccacacacccagccctgccctgggccaagtggcctatctgggatagggatagagactttgaactgctcttgctgaagaggctccacgcctggatcccttgcccccactatttaaaattctcttctgagctgggctccctcactcagtccctgtatttgatactggcctaaagaccccaccccccaccctgccagcccttcttctggcttccccttccatctgtgtccctgagaccctgagaagagctgtacatagagcttgcttactaccactggttcttcctcttgggctttcagcccagactccaagcagctgctatcaaccctctctcccttcatctcttagccttgcttatttttattttgggaccgagctgcccactagatgactctgcttttccctgcatttggggctaaggtgccaggtacttatttgcacagggagcaggagcagcaaaaaatctctggttctccagagcactcgtcctctctttggaggggttattaggttgggagaaatgttgatacttttgttttgtgtgtgtgtgtgtgtgtgtgtgtgtgtgtgtgtgtgtgtgtgttttaacatctgtgaaccaggctattagtcctgctaaagcgccaatcctgctgtcagagctcacccccttcctaagacaggtagaaaaatgtaatgtagctttttccacaagccacttccctgtcccttcagtctcaggagccctaggagagtctaagctggggcatcccctggcccagaggactcccgtggtgggcacagttctaagtggatcaggctgtcttgggtgcactggacttggagcactaccttgagaagtcaggttgagaaagtagttgatctagaaggcaacaagtgggcatgtgttccccagcacattacccaggccagcagagccaaacctaggagagggcagtgggtagattctctgccccaggcagccatgacatacacataaataccccaatcactcagacttacggcaacaagtgttgtctcactatggtgatctctaagatccacatcactggatgcgtagtcatcccagtcatggtaccctgtggaggaatgctggaagaacataaagagcagttcagaaagtcacccaataccaggaccactgcatttaccagcctgatactgccaagattatctgatgctctcctcaggagctaggagaggagtgctccttcctccctaccgctactctccccaagcctgtgttgcaggtagagaggtgcagcaaatagagaaggcatgtcaaaccctgcatttctacctgagacgtgtgacctggatgatcctccaaaccctattggtcccaccccctgggaaaggccatggtgccagtttgaaaggtgctagctacctgaagccttgatatttcttcatggctgccgcacattcttccaccttggccagaacaggttctgaaaaccacttctctaccttcaccaccaccactgcccatcttgatctctttgagggttttcccatttcacttgatcttatttttgtttatcccttcctgcactttgtcaagagagtcct

SEQ ID NO: 4358 - DNA, 6000 bp, Homo sapiens
tggaagaaggggtacatctctcactctcactgctctgggctatagtctgcagcaggggaagagacaaggtgacctctggtgatcccttgcccttggggactcaaggtttcctttaaggtcaggattattttccaagctgagaataaggatctcaccctttctctcctctgtctctggtaagcagcagggacacaatactccacctctctaggggggaaaaggacaatttatagaattgttctgctgttcttagccctcattgagacaaagaattcatttctgtctctcaaggtggcttctcctgcttatggtcataaattgccttcctgctcactccctgacctcttgatctttttgcttttgtgctaaaaaaaattattaatatttctcttaactccatatataacctttggctgtttctctcctttattctaggtgaagtagcatccttagggattacttcctccgccttcgcgcctgcctgcttctgttggggcagggctctgtgcatgaggatgaagacaaatctacaggaggaagattcaaaagatctctgtttggggaagctctaaaactgaaaaataatcacagctaacatttactgagcatatgctgcatgcctagtattgttctaagggctgtatggatatgaactcaatcctcacaactaccccataatgtaactactattattatccctgttttcatatgaaaaaaacaagaactagagaggttagctacataaaatgtccaaggtcacacagaaaggaagggaaagaacctagatttgaatccctgtctggtttcagggcccatgtgctttgctgtcaactactctgcaaggtacctctctgatagggagggacttacccagctttcgctctaccctcagggagctccagaatggtgtgacatgcatattccttgcccctcaagaatccccaagtttgataggggaggcagatatcctgtcctaggaagatatgtccagtctgatggaaaagacacaagctttatctttggatcatctgactaatactagggactcagccccaggatgtctacagtttgatgagttatgttattagattctaagagactcagttaattcgactagacaaaattgtgagccttagtgttaaagagacgaggatggagcaaagttagggcagcttaattggggttgccccaggaggggagggtgatacaagattggcaataagcagaagaaatgctagtggagataagagggcaggacacttgtgtggtgtgcagacttgctgaagacaatgtctggaaagcaggggtttgcttagtttagcagctctctaccttggctgtctactagaatcacctggagctatgtctaaaaatactgatgcttgaacttcaccccagaacaattaatctttagggatgagggcatggcactggtgtttttaaacagccctcagggcagggcatggtggctcatgcctgtaaccacagcactttgggaggctgaggcgggtggatcacctgagatcaggagttcgagaccagcttggccaacatggcgaaatgctgtctctactaaaaatacaaaaactacccaggcatggtggcacacacctgtaatcccagctacttgggaggctgtggcaggagaatcacttgaacccgggaggcggaggttacagtgagctgagatcatgccacggcactccagcccaggtgacagatctaaactccatctcaaaaaattaaaaaataataataataaaattaaaggccctcaggaggtgctatgcacaactggtgttgaggaccactggctggggatgaggtctatggtgtcttaagctctgagatctgggatgctggatgacttatgtggaagaaattctagagacatgagtttgctatgaactgagctggtgaagatttggaattaaaggaaagggggagggaaaagaaaagctaaaggaccagaggagacaggccagattgttgttttcgctgttagtgagctagagaaacttggttcctctgtttctaggcttttgaggcaaaataaaaggcccacaaaaatccaaaaggtctgataacccagtcccttctcataaaaagaatagctatcaagcctgatatcagacatggagattaggcaggaaacactgagctaagaatattcccttccttcgattaaagacctttttttttaaattaatgctctcctaggccgagtgtggtggctcacacctgtaaccccagtactttgggaggccgaggcaggcaaatcacttgaggtcagcagttcaagaccagcctggccaacatggtgaaaccccatctctactaaaaatacagaaattagctgggcatggtggcgggtgcctgtaatcccagctactcaagaggctgaggcaggagaatcgcttgaacccaggagatggaggttgcagtgagccaagatcatgccactacactccagcctgggtgacagagtgcaactccttcaaaaaaaaaaaagaaagaaaagaaaagaaaagaaaacacacacacaccaaaaataatactttcctaagtcagggtcaccctcgccttcccctccatacaccatcatgtggagtggaaaggagaaaaggctgtctcgctgacatgtccggagctccctacctcagggtttttgcctttgctgctaccatcttcctgctgcattcttccctcagacgcctgagcagctaaaccctcagttccttcaggtctgtgcccaaatgtggctgtagcagaacagctttctttgattacctgtaagaacagtaattcctccctctctccctctccctaatcttttatcctgctttatttgtcccccatagcatttaccataacctagtatatttcatatttttttctactgcctctgactttcctccagaatggaacattaaagggaaagactttgtccttttttttttattattattgtctccccaaagcctagaatggtgactggaaaatagcagtctggagctgaaaaaatatctgtggaatgtatgattaatgaatgaacaaatgaaaagccttatgtgtctgtgtgttggtgtctttctgtgtacgtttgggattgcagtcctatttctctggccaaagtatggctctattcttaagctgtgcttgcctgtgttttggaatatatgaagaattctctgggtctgtgcatatggggcttctgcatatgagcttgggtgttttcctgcctttctctgtcttctaattgtgtgtggatgcgtctggaccacaggctggtgttagtatctgcggaggaaagaggagctgtggccgctacacatcaacagagggcaccagagagccacgcacctactttcaggggcagaaattgagaaaacttggcggggagtgttagagacccaggagatctgggatctgggaggaaagaagtggagacctctttggaccaacacattactgtaaaattgtgcaattccagcaacttctctgtccattccctagggtccagacctctggctacccgagcaatcctgtgagcagaagtatctggtcaggggtgagaagaggagctggttgccaaactgggcccttaagaaagtggagatccctcctgaatgctctcatgattctcaggaattcccttccttcctagttcctccatgtccctaccccaaaagatctcaaactccagcgtgcttagagatctgactggtggctgtcttctcctctggcttgcattcagggaggtgaggccaggtcttggcccttcaaagccatccagttggctaccttctccttcgggatgggtggaaggctaagatgaacaaaggaagggtcaactgtgcctcttccaggccgctgagtcctccaacgcctagctgtgctcaaccttgactgggtgaagccaaggcagggcctcaaggcaggtccaagaggcagctcccattctccagttctgggttttataggtggggagaggcatgtatgcccctcccttatccaagcattcattagtcaattgagaattcttaatttggggaatctaggggctagactttgggtgtggaatttaaaaagaaaggtctttatgtttatttaactccctgccccccaccccactcctagacacacacacggaaacacacacacacacacacacacacacacactccccatcacatcctctgagctagaggctgatgtccctcagcccatgttcctcctccactgcttagttccatagcccgcgaccaagattgcgtctataaataggagggggtggggtggccaggggtcccgtcgtgcctgccccagaacccacgacggtcacatttttcacccccttttgcctttgccctcaattcctttccctctttgctctccttccatctcagttccagcgaggggggtatgtgtgtgcgcgcgttgtgggggggcagggggagggctcgtggagggaggcgccgtcggagggagagtagacgtcaggcggagggagggaggcaggcaggcagggaggcagggagggagagagggaaggaagagaaggggagagaaagggggagcaaagaccgaaagagacccagagagatacagcttgagaggagaaataattaaagggggagggcgaccaggaggagaaaaaggtctgggaggaaagagagataaagagaatcggagggcagggaaatgagtttgtgcgcgtgagtgtgcgcgcgcgcgtgtgtgtgtgcaggggcgggcgcgggcgggcggggggcgggctcccgggctcccgggctcccctcctccccagcccgctcctctggctcgctcgccaactccgggccccagccgcgggcgggcgcacggcgggcggacagcatgctgagcctcctcgtctggatcctcactctctccgatactttctcccaaggtaagggcccccagcccacccccggacgctcggcttccccccggggccggggcactgcttccccggtgggagagtgctggagtgccccgcggcccgcggccagtccccgggtccggacgccacgaggcgggggctcggtccgggcgcagagccctgggggagggggcgcggagtaacgaggggctggggagaatgagtttgccgttgatttgcccaagttgtttcctctggctgcgcgggagaaccgagcaatggggccgcgagggctggaggtccgagtaaaacggggaaccgaacgctttctcttgagcttctggcagccctaccgaccctcgccctctgaggccggggttccggacgcctgagtccagcctaagggcaaggctgggaagagggtgggatttcggatttcgggcgagggggtgagcgaaaagctgggtcccacctcccgaagatgttgccaaggggatccccctactccagcccagcccctcgggggtctgagtctgaatcacggctccagcctgcctggggctgccccctctagaggaagggaggggtgtctcggcgcctctagtggggatttggaacccctgcccacggaggctctgggtggagagtggagttccacatacagcttcaggcccgcttgatacagagggggggaactcacgggggcgggggcagaggcggtggggggagggggctgacactctacttgggctcaggaaagtgttgctgtctggggcttatttgacactggcaggggagaggctgggaggtgagggaggtggttgggagagatgaggatgtcagtgtatcctgggcagggctggggttgggggagggaagagggctgagggaaccaagggtccagactgcagcagggactggggtctgtgggagttggttcttgcctcccaggtctgactctaaggaagactgaatcctgctgaactccttccctccccaaaaatggagctgacacacagaaattgacacacaaacaccgtaaaacactcacagacactgagacagactactcacctactgagagagagacatcccca

SEQ ID NO: 4359 - DNA, 6000 bp, Homo sapiens
ctttctttgtgcatctagtttgataaatcttctagctacagtctccatcctggcatgcaaagctctgtactcatcatactctgcactgacgtcatctttataattccggcgttgctcataggagatgatagcaatatattttatcaaataatctgggagttcaattgctgaaggttccatggaggcagtgcaatcctctttagctcctccactggaatttggactggagttatttagcttggcaatttcctcttctctcttaagatctttctccttttcctcaatagtctcaatgtcgtgcttttttatttggtccttttccttatgttttttagacttctttttggactttttgtgagacactgaatggttttcttccataggctttggacactttaatagaactgaaccagggggtaaggtttccagagaagtcctagaggtatacttgtcttgttggttctcatagatactattgttttgactaaaactgtcaacaggtaggtcttgagcccccggccttctggagtgctaggggaattggagttagaatttacaatctgaggaggatgtgaaaccggcagatgggttgaaggcaagcggtggaggggtggggatggcagcagctgcagggggcagagggaggcctgcagcagatttttcactggtgggattcaaatgaccatttagtgttggtggtactctgctcgtcaggtgagatattcgggcttttttatccattaaatgatcaataaactctgaatccaaaagccgtgtctgaggagaagatacagcgtttctactagaacatactggagattctgaacggctggtgcctgcagcattctgagatggatttagttttctagagagcattgactccaatgaccaagtgtctatttcactgtatccaggccagtctctctgaagctctttaaaaacataatcctttgaagtatacgagaggtccttaggattcagattggctacctgttgcagaattgctcccagggagttcctgtctttttgattgacaccatctttctggagtctagcaagtagctccggtttcttgtaggccttcagggccagtaagtgaaccaccctgtccctgtatggcttctgagagacgctgctgctgctgtgtgtctatcgaattggatttgcagggttcatgggggttgaccttttcctctcaggaactgtatctgaaacagcttgaggtgctttccgaatttgcactcttttccctacatatggtccaccgggtttgataacttctgtgcttcggttgcgggattcctcctctgcctgggtcgttctttctcgtgtcatctgatccgagtcgtttgttgcacacactgtaattttatcttgtataaatcccaggcaattgagctgggaggctccagagctggagaatgtttgctggacgcagtcaaagctgccctgagggttgtctttgcccacatttgacaaataaaagttaaagttatgaacttcattgaggggatcatttttgggaattttgacaagctcctggagtctttggaactgaattgaaggtcgaaaagaaattaaattcttgtggctctggtaagtctggagcgcctggatcgccgactcggtgagcttcacatgcagtacggtgatgttgtcctgccccagccgtccgcacgagagcccatagcgctgccccgcgacccccccacccccgacatcttaaactcccagaggtgccgccgccgccagtccagctccagcctccactgcggccgcagctgcttgggcttctgcagccgccgccactgctagggccatcccgctgctggcgtactgtcatatactgcgcggagccagacctcggactgccatcgccgccacctgccccaccctctggccccgcgccccgccccaggctagtctcattggtctagttccctcagaaccgtcctcatcggccgccctccactttcacgggggcggggcccaaagtcgctggagttttgctcctgggactggacgtccgagaggtaagagagctatcacaaggttttctaatccttatgtttcttttagtggatctccaggttactgtggtttgtattatcaggctacttacaaaaatgaatacctctttaaatcaggccattttacagcaaactacggtccttgatcaccattatgctctgaataaagactatgagcaattgcacttgaatgctgttaaactttattgactgaactttgaattgtttgattttgatcaggttggcttgtggaaagtgctattaagaagagttctttagttcgttggtattatcctcctgatagctattataaaagtttccctgatgtgtcctctcaagaatcttaaattctcatatgcagctatcctttgtacattaaatggtctccttatggttaggataacaaaaacatgaagaaagcatataagattccaactaatttgacgttgtgaattgtgaattctgaactgaaaccaagtaagtcccttatgatcaggctccaaggttttggtcagcctctcaaaattgagaggctgaaaccctttgaccaaaattaacacatttgccccttccctccagctcctggaaaccactaccctaactctgtttccataaaatagtaaactattttagagtccacatataagtgagatcatgtagtacccaccgtgggcttattttaaggctctgagtaaatcaccatctctctgtgctagggtattctgagtcagtcttgttataaaatattttgtttaggtaacatattgcaaaacgtttcataattcaatggttcctttcccagaaaaaaagcagtgaaagttccaatagccaaaaagtgtctaactcaactgacctttgggaaaaaatatccgtataattccagatagtcctaacttctgaaggtaatatagcctggcctctgttgataaacaaacaaaaacaaaaaaaccacacacacacacacaaaccagcttcttgtctttaagtgtgcaagaatgttagcacttaaaatttttaagatacacaaaaactaaacagaactgttcaagtttttaaagggagcttggaaatttgaagaaagtaaagttaaaaatattgccccatgagtcatataattatttttctttttatttctcatagcttccctcctatccattatttaggcaattttgtatccaaatttaataatttaacaccttatttgttacaagaacacgttactatgttattttaagcttttttgggcaaattacacataattagataggctgggttagggctgtctacaagatcccagcctagagtgtggtgcagtagcctattttctctaggactcttgctgcaacaggatatgggagaagggaaacattaacgttagcagaatgggaggaatcagattatggagacatgatccttgccttctggcacctctccagctgatttagaagaggacacagagggagacagacatatggccatttctataattataaactctgctacatgctgagaggatggcttctcaaagccagttagtgtacaagcagtggaggttgggactgccctacttctcctgcctagggtcacacagtctggcagatctggaaagacttccctgagaaagtgaccttggaactgataccttagtggaaataactaggcattgggagggggtgaggtgaggagaaggtcaagagctttcatgtagagggaactttgtgcagagaccttagtcaggaagaggttttgcatagtggaggaactgaaagctaacagccaggctacagtacagagcaaatgatgctggggtgtgaggtgatgtcaaaaggtagacaccagggctagagggcgcataatcttgcaggccgtgctaatgattttgttttctacccaagaatgctacttcaggagatcagtcaaaaggttagggtgatggtgacggtggaaatatagaaaaaggaatttattcaagaggtattcaaaaagaagtgaaatagagatgagttggagatagattggataaaaagagtgagggagagggaggtgtcaggctgcagcccaggttctgagttgccaaagaggagtcttttcctccaggtgagctaaggcttagaaccacgatttttggtcactttttcttattttcagtgtgagaagtggcgagttggctgtccaggtacacactgtcatcttacacttactgtttaagacagaggcgcatatttggaaagtgaatgagtcaggagccagaggagaaggtatgccggcagagcctagggcggagaggaggaagagagtctgggggcgcgtccccaaaaaggagacagggaagacagagcagaggccggggaggggagagcaaggaccatgacaggaggaaagagaggctagggaacactgaggtggaggaatcctgggatatgacagttgtaaagaattgtagccaacctaatccagttctctcaatgtgcaactgaggaaattaattttcatgcgtttactttattgtaaatgtggtacttgcacttgagaaattttggaaaacataaagatgtaaagcaaattaagatcactcatagtctttccacctagagacatgtactgctaaagcaaggactttgatccttttttccctttgcatttttaccatggttggaattgtaacacagacacaaccttatgtcctgcttccaaaacataaataatggttgtaaagcgtcccacacgttgacccaaagtctcctttgaaacaggaaattgagacacgccggttgtgaaacctactgaagtgagcggcggcgccaggattcctgggaccccgacctctttgcagctcgcacagctaagggcgagggcgcccttcggcagaagcagcaaaccgccggcaagcccagcgaggagggctgccggggtctgggcttgggaattggctggcacccagcggaaagggacgtgagctgagcggcgggggagaagagtgcgcaggtcagagggcggcgcgcagcggcgctccgcgaggtccccacgccgggcgatatggggtgcctgctgtttctgctgctctgggcgctcctccaggcttggggaagcgctgaaggtgggtggaacgagggcgcttgagtgcactcgcgggagggcggagagagggagctgggtagggacggggagggcaacgcctgatggggactggtgagacccgggacgcactggcgcgatctaggtagaaaactcgctgctccctggctccggggagaggcagcgcggcacagagttcgctggcatcagccgcctcctgaagctcatctcctcttgtttctttcttccttctctttatgctggctgctctcccggccacttgctacacgcctccaatcttcattctctcccagtcccgcaaaggcttttccccctccgctgcctccagatctcgtccttcgccaatagcagctggacgcgcaccgacggcttggcgtggctgggggagctgcagacgcacagctggagcaacgactcggacaccgtccgctctctgaagccttggtcccagggcacgttcagcgaccagcagtgggagacgctgcagcatatatttcgggtttatcgaagcagcttcaccagggacgtgaaggaattcgccaaaatgctacgcttatcctgtgagctgagggataggatcctgggccggtacccaaggggagagaatggccacagaaactcaactgggagactgtggcaccacctgatgagattctctgctctgtccaccctcttctgatttcccttctacctggagatgtcccaggctttgactcctcaaagtgtccctcgttcctgcctactccaggtcacttactttcctttccctgaagtctgggtccccattataacctgcacatcaatttcttctctttcatctctcccagtcttttaaacccttctttgatctttctccattcctctccacagatcc

SEQ ID NO: 4360 - DNA, 6000 bp, Homo sapiens
atcaaacctaagctgactcctctttgcttttctgaccccatattcaacggtgtaggccacataatttgtggcgttgtgcagaatagaaatctggggccctgtctttctccattcaggctgctacaacagaataccacagactgggtggcttataaacaacagaaatttatttctcacagtttcggaggctgggaagtccaagatcaaggaagattcagtgtctagtggaggcctgctttctggtacatagagtacactttctggatgtgtccttacatggtggaaggggtcaggggtctctcttgggtctcttataagggaactgatcacattcatgagggctccaatctcataatctaatcacctcccaaaggccccacttcctaataacataacattgggggttagaatttcaacatatgaattttgggaagacacaaagattcagaacatagcaggtctgtattcaaataggcaggagaagagtgcttttaaaggtattaaaatataaaactttttcattccttctgaagtttctctctctttctgtctcaacctgttatggtgttttgttttgttattcttgtttgtttaatttgctaatgttgtaccccttgggcacagggatactcacagtgtgagcacagaggctcttaggtgcctgggggccgcactccatgactccggcgcatgcaagctgcccactggctgctgggttccccttgctgggaagaggaagtcagtctctccttcccacagtggccactccaaccctccacagatgggtgaccaccatgaaattgcaaccactgtatggagatgcacttgattcttggatcaagggtgggaaagcatgtcgtcctgatctgtctcaaaacactctgtggtgcagcctgggtggggatggctaaagccaacctctgtgcagacactgtgggatgcatgcccccaaatcttattctccctgtgtccctggcaaaagcaagggaattgtgaaaggtgatggcagaaggggccacctctgctgatgagatcagacggctgtatgggcagacagtggcagggtagtggtggacaggagggcaagaattgcctgtggccccagacattggggagcagatggcagagaatcagtgctggggaggtgaagtgatgggagccaagaccacatgtcagcaaagaagccctcacacaagttttttttggctcatttgacttcatttataaaacacacattaagataaaattatgaagaatttaaggatgatgatcatagggcatcaactatgatgctgcattggttgcgtgccccatgaagcaagcccgggatatacaatacaccgattaactcactatttgggggatgatcctgactttgtctctttacaaccttcggaaaattttgcctctttcagactttccatcctacaactctggttagctcagtcttccccaaccatttctgccatcttccaccttggtctcagtcatgcggatgtcttgtgcctgatcagaccaatgttggtcctctcttcctatctctctcaccttttcattccctgctctttgcattaacttgggaaacatttgtgtgtgtatgctagctttagtgccctcattttgttaccttggcgtgaagtctgccgtccctgcagctctatttcatttgaatgagggagaagcctcataaagttttaaaagagctttttaaggattacagtccctatatctctaaggttttcccaggacccattccacatgagaaatcaggataagcttgctaaacttgtacagctgacccttgaataacatgggggttaggagtgatgacggccccgtgcagtcaaaaatccatgtataacttttgacttttccaaatcttaactatgaatagcctactattggctggaagccttactgctaacataaacagttgatgaacatatattttgtatgttatatgtattatatatgatattcttaaagtaagcaagagaaaagaaaatattttaaagaaaatcagaagggagagaaaatatatctgctatttattaagtggatcatcacatgttcgtcttcattgtcttcatgtacagtaggcagaagaggaggaggaagaggagttgccttgtcttagtggtggcagagtcagaagaaaatccacgtgtgagtaaatgcacacagttgaaacccatgttattcaagagtgaactgcagtgtgagggtttgagtcaatctagtctggagctaactgggtttgctgttttgctgttgctgcaatagtcttcaagttcctctacattgctctgttcctagggtggggctggtttgccagaaggttttgttaatgtctccactctcaggttttggtgtttcctttgtgaaatatctctagaggacctacctccatgctttccattcttctagctgcagactcgtcttgtaattgatatttatgatactgcttgggagaaggagtaagagcactgtcttttgttctggtgcagtctcattcttaggcaggtcagttgtttttgaattttttgaagttttgtcatgtaagtgttcctgcctttcttccagcagtttgggacctctaatagtctggaaccaggatgttttctcgttctttcccattgtttttcttctcctcagctgcagtgggttttcacatatgccctgagggcagcagggctttctgccctttccccaccaggttagggcttttttttttcttttagatggaatattgctctgtcacccaggctggagtgcagtggcgcgatctcggctcactgcaacctccgcctcccgggttcaagtagctgagactacaggtgtgcaccaccacaactggctaatttttgtattattactacagatggggttgcaccatgttggccaggttggtctcgaactcctgaccttgtgatccgcccacgttggcctcccaaagtgctgagattacaggtgtgagccaccgcacccggccacggtttttttttttttctatgttgcaatagaggagatgggtctggttgggacttactacccttcccatgcagtagctgttctcatacctcaggcccgcatcatgagagaggatttatctggtctacatctctgaccctaatgtttcagaagaccctggtgaggttcatagaaaaaggcttagagactgatgcgaatttccctgtttttgtgactcccagggcttctatatactcatgctagcctttactaatttgtctaaaattttagctgaattcttattcttactggcttgtataatatctggcatctgtcccaagtaaacaagggtttgcattccatctgtcctttgaggagtctgtctttctttatattttgggttaactggttgccttgatatttcagttctttgataaattcaagttatgattttgataatctggcttcaaaaaattataagtatgaaaatgaagctctttccagctttttgcatgctaatcttaactttaaaaaaattatctgtaatcccagcactttgggaggctgaggcaggtggatcatctgaggtcaggagtttgagaccaacatggtgaaaccccatctctattaataatatcaaagttagccaggcatggtggtgcatacctgtaatcccagttacttgcaaaaccgaggcaggacaattgctttaacctgggaggcagaggttgcagtgagctgagatcatgccactgaactccagcctgggtgacagagtgagactctgtctcaaaacaaaacaaaacaaaacaaaacaaaaaacaaataaaaaaattatttgcaggccatgcctggtggctcatgccaacaatcccagcactttgggaggctgacacaggaggattgcttgaggccgggagttggaggttacagtgagctatgattattccactgcactccagcctgagtaacagagtgaaaccctgtctcaagaaaaaaaattttttccccctaaattagcttcagatactttttttttgaaaaccaaaaaatagtaaatagcccagacacatttatatggatgatatctacaaagcacaaacatatatttagaagcccttcaacagttacaagcagcgtaaaagaggaatgtaaatgtgtccggcaaagactcatttataacaaaacaaccctgaaacatccaaataggactaataaaaagggatcctgggataaagactttggaatactccattaacttcactgctcacaagttctgactagtttcttataagtaataggacatttatagcaggatcttttatgtaaatctcatgccagtaacttgtacttttatcctaaataaaactgtatgagattctcatctcactacatagggttacaagtaacttttatgatatctttaaaaagtttcatgttgaatatcacctccataattaaaaaatggatgcatagactgaattcattcattcatttgacaaatattcactaagcacctaccacttgtgagatactctgttaggtggggatacagtatgataactgtatggaactaacactccaagtcaaacattgaagtcaaaattctgggctggcgtacattagttaggagcccccattttagaaaatattatttcaagcaggccttgtttttatccagagagtgtatacagtataataaaactcagtacaccaagatttatatttcatggcgtgtttttctccctaagtagagaaaaagctccttcagtaaagtgattgtgttgtcaaccactgcatattcttaagtgtaccaagatgcttgactccaggcaggtgctaagagagactgttgggtgagtgaatgtatatcaatgaaaatcaaacagaggaaattttctttatatgttttagtgttcctgtggtttttttttttttttttttttttttttttttttttttttttgtgatggttactggctcttctctaagaataatggagaaaaggtgttagtttgtactgtcgcacagggcagtcgtaggagactctgaaaaagcaaataaatcaatgttaaatcagaaatgtgaatgtagtaaggggctgaagagacaggggaagagaatacatgggaaaatattgaaaaggacagagtgatcaaaaagagcagggacatgggagcattgggcagcacactgggagccatttcactttatgctcttattgtatgattgagaaaaaaatgtccttagtggttaagtggcttttcaatgccacatcagacttgttccatagcagttgaattaggggaaggtgaataagttggaggttggtgacaaggagagaagctggaacagagaggagagtcagaaccagagggaaatgagagactgagtaggcatctcagggtttttgaaggagtggattttctttgttgcagtcaggggaggtttgtctgttggctgcagaaagaagtcagaatagagatatcgtggggtaggtttgtttggaacagaaatcaaagaccaatttttctgagagaaggaaataacatctgcaaatgatatgctgtttttgctacttccattgttagctgttctcccaggtgatggcaatgcagacggtaagaactctgacaactgcccagttgggtggtgggtgaaggtctctctctctctctctgtgtgtgtgtgtgtgtgtgtgtgtgtgtgtgtgtgtgtgtgtgtgtggtttccctagcatatacctggaaagtgagagtgccaggctggttccattctgactatccatgactccaggtccctgagctcttatgaaggtggttgataaggcatgggactgtgtggcaagtgaatgtctgctaagatcatgatggatccccttttctccagattctgagttcccgcactctggcacctttctctctccatcctctttctcaatgtctttctccccattctatctgttcttttgtcgcagggctcaaggagcctctctccttccatgtcacctggatcgcatccttttacaac

SEQ ID NO: 4361 - DNA, 6000 bp, Homo sapiens
tgaggaggaaatgaaaggccatgtaagagtcacgtggctgtgggaggcttgtggggtttccgtaatggggaagtaggcagagggcaaggtttctgctgggaggaagggatgacagagctgtgtggggtgggaacatgacactggagttctgaggaaatctctctctctctcggggtgcaaaagtcacccactagagtggtcttagggaagtgacaggcaagaagagcccaggcgaaggcaaacacaacaacgtctgtggtctgagcaaaaggacaagaaaagggaagttggggaaggacaggaagagcactgggctccctcgggacaacccagcccctctgttcaggctgggttctaatcatagggtgtcctacccacttcagattattctcttaggattttgtgtgttcagagagcttaataaccacttactcctctccccattgcattttatatcaatttcagattcttgcatctatatttataagtattcaccagtgtaaagagtctgccagtttcccttcttacactacctccacccttcctttttagggatagatgtacataaactcttgtgtataaaattgtcatacttaggagtctgggttatttttcatgaaagcaatttgaatattttaggctgatagacattctaaggatcacgttttccatggcagctctggggcagagcactgcatggacatggagggatatggactgtgacacaccggcagggactgtggctgtgatctctgtcccacaggatgaaagcaggactacatatcagtcagatcagagaggaaaaaccaggtggagggagagaaatgacatggtgactgtgtggagcaaaggagagggaagttttcggagaacacacatttctaggtatctatttgaatgcgtattgccatgatgggggtgagggtgttacttactcttctaggcaccctgagggggaatttcccataaatactttttgtttttttttcctcaccccttaatctttcctctgaaaacagactgatttatctcactgataaattcaggagggaaactgggcaagtatatatcagcacctcctactgccctttacctctctgggcaagttgctccccaaaggctcagtcttgctctcctcctccaggccctggctctcacaggaacagctgctcaggtggggaacttagggttttatcagcattgcctgaaataagtgagtgtattagtcttcttgggctgtgctaacacaaggcaatcagctgggtggcttaaacaacaggaagttattctctcacagctctagaggctagaagttcaaagtctccatctggaagactcagtttctagtgaaggttctcttcctggtttatacagacaactgccttctcactatgagctcatatggcctttccatggtgggtgcacacacacacacacacacagagacagagagcgacagggagagacagagagacagagaaggaaagtggaagggcactccagtgtctcttcttataaggacactaagcctattggatcagggtcttaccgtttagacatgagattgacattacttcttagaggccccatttccaaatataatcacactgagagttagggattcaacatgtgattttttttttctttgggagggtacacaaactttcagtccataacaatgagaaggccactccatttagggtccagtatgagcaagatcacttggattacacacttaaagcaaattatctagtggcactatcagaagtcaagattgaccattagatccatctatctcatgttattttcaacttgtttgcttctgaattcaagagggcaaaaaggatgatacttactgggttttataatattatccaatatagctaggttatgttgcagttataaataaactttagaacttggaggcttaacacaatgaagtttatttctcatgcagttaaactgcatgtagatcaggctgctcttctccatctcatagtcttgccatttagaaatttgactgccaagttggtaccacagggtaagatgatcagatgtgatattttcagtggtcaggactggagctggctaatgcttccaacaccacacattccattgcccagaactcagtccatgaccttaacccaactattaggaaataggacagttgcatctttcctgtaggaacatggaaaaaaatgtgaataaacacataatgtggtatctactattgttttctaaaaccacaaaccaagtatttgccattaacagcacaagatgagcaaagataacacctagtgcttatgaatgatttgggtaggatttgaactgggtattgctcttaaagatattatagttcatagaaattgccacatatctgtggccatgataggaagagctcattgagaatgacttctggcctcactattaacgttgacaaacctaagaaatagtgtatatatcaaagtatcatgttgtacacagtaaatacatagaataaatataaatttaaaacagaaacaatgttacaaatgggattttcctttttaaggcacggtcttgctctgttacccaggctggagtacagtgacatgaacatggctcactacagccctgactttcagggctcaaaagatcttcctgcctctgcctcccatttagctgggactacaggcatgtgccaccacatttggccaactttttaatttttttatcgagatgaggtctaactttgttgcccaggctggtctcaaactcctgggctcaagtgatcttcccaccttggtctcccaaagtgctgggattacaggcatgagtcattgtgcctagcacaaattcatgcccagattttaagtgactgctccaatgcattcagtgaataattaatatgatttaagaaacactataataataaatgtatttcctggatctcaaaaaaactgtgttcatgtatttacacatattaaccagccagggtcactgataagtcactgaatacttcatataaactacttaaatcaaacattgacaaatgctgccctttttatacaatgtgttttggtcagatcacaaaacaacttaaatttggatttttgtggtctccccatgtatgagtcctcttgaaaagctgcatgttctgactatcacaatcgtataccattccacactgtacagaattttcagtatttagttgagatgcatgctgttcttccaggacttcaaattatgaacttcccagggggttagtcagtcaaaatgctgctctagagaatatagttctaagtagatttgtatctgggattctatacattgaaattaaaatcacaatgcattttaattttttgtttaaacatctgcagtttaaaactctttgatagaagagattacattgttaacctctgtgtgtttatatgcctagtaagacactggtatcaaccatgtactatgtaattttttagtgaatgactatacagattaaatgcagtagaagggcttctttatatttgttatggtcctatgcattctgaatggctgcaatttaatctctaaggataatgtagagtggactgtagtttatataattgtgcagggaaatcttggaagatgtaaaaagcaacgtctccaatttataaaagaatcagtgagaatgaggaaataagaaagatgggtgaaaagaggtgaaattggaaagagaaaactttgaggacattcaaaagggggaaagaaagaatggagtgatgagaagaggggacactatggagagtggaggcaaagttaagtggagaaactggaagaactgtgatctattaaaacaagcaggaactgaaaaaatgacatggtttctcctttttatcttacaaatgacatgcaaaatccagagggacaaaatgacctttctttcaatgccatacaccactttgtctaaggcagttgaggaagggaagtagatataatggagcttagtggcagagcagctggaatcctgagagaagagaataactttagttcagagcaggtggggaaatgagagattgagtaggaggaccaaggttgagggaagcagatcttcttagttgctgtcagcggctgatggggaagattgttggtagaaggaagtcagaatataggtacagagggataagtttgctaagaacagagatcagcaaacagcttttctgagagaaagaaacatctgcaaatgacatgctgtttctgcagtttctgctgctagctcttcttctcccaggtggtgacaatgcagacggtaagaacatcgctgtcagctgcaaggttacatgtatctgggtagagtgtgctgggctttcccgagatggatcaatagagatgccagaatgcttgccatctgagcatacctgtctccaggtccagtttactcttttggaggatggtggcagagcatgggctctgtgtaaggaaaatgttatagctaaagtagtcattaatgtttctctgtggtaactggttcaatttccatttcctctccattttccgttaaaacaatcagggcccaggaaaatgatgtggtttctcctttttatgttacaaatgacacgcaaggtccagagggatgaagcaacctttcaatgccacgcaccactttgtctaaggcagttgaggaagggaagtagataagatggagcttagtgggagagcagctaaaatcctaagggaagagagtaactttagttcagagcagatggggaaatgagagattgagtaggaggcctaaggttaagggaagcagattgtcttagttgctgtcagtggctgatggggaagattgtctgttggtagaaggaagtcagaatatagatgtagagggataagtttgctaagaacagagatcagcaaatggcttttctgagagaaggaaacaactgcaaatgacatgctgtttctgtagtttccgctgctagttcttctcctccccggtggtgacaatgcagatagtatgaacatctctgtcagctgcaaggttacatgtatctgggttgagcatgatgggctttcccaagatggatcaatgaagaagccagaatggttgccatttgagcatacctctctccaggtccagtttactcttttagaggatggtggcagagcatggggctctgtgtaaggaaaatggtatagctaaagtagtcattaatgtttctctgtggtaactggttcaccttccattttctctccattttccttgcctctctttttttttttttccttacactacttgcccttcttccaccaaaagcatcccaggaacacgtctccttccatgtcatccagatcttctcatttgtcaaccaatcctgggcacgaggtcagggctcaggatggctggacgagttgcagactcatggctgggacagtgaatcaggcacaataattttcctgcataactggtccaagggcaacttcagcaatgaagagttgtcagacctagagttgttatttcgtttctacctctttggattaactcgggagattcaagaccatgcaagtcaagattactcgaaatgtaagttcaatcatctaaattatgggagttctttagaatgttctatttcagggaaatattctctactaatttttgggccatttcccattatcccatcccaccataaaattctgcatagatgaaccttttaagggatattcctgatgttgactccctcaaatttcctaggctcttgctatttttggaattttttttcttgtgctttgttatcttccacctgtggtctccctctgtatcctacaatccagagatacacagctgtcccactctgtgcttgactcccttaaaataaaatctattcccccattcaatttcttcaaagatctatgtccacagttcaatgaccattatgaccaatttcatgcgtcatggaatgctatcctcctacctccctcacaaaggctcccccttcaccctctatcctatattatgtggctcacctatcatttttccacatcttc

SEQ ID NO: 4362 - DNA, 6000 bp, Homo sapiens
ttgccttctggacccaccagtggccttccaggttcttcatcctcaggacagaccaggaggatgggaaaggaggctctctctctgctgctctcaagtctaaccaaaggcttcttgcaaaataattatagtattcatgaaaactagtatatgttctgttctaaccacctcaccacattaactcattttatgctgataaccacccttaaggtaggtactattactatctccattttactggtgagaaggctgaggcaaaaagagtttgagtggtcacagccgagactcaaactttagagcttgttcctagcctgaactcttaattaatcttgcacttaatttctttaaattatctatggctaaacttttatttttattcttttaatttttaaaaatttagtgtgatattctggtattttttttagctgggtatggtggcacatccccataatcccagcttcttgggaggatgaggtgggagggatcacttgagcctggcagtccgagactagcttgggcagcatagtaaaacccagtctcaaaaaaaattttttttaaagaaggaaaacttttttatactacaactttccttaaggatcttcctcagtgggcttataatattgttctccccattatgaagaaaatgtcagctcacttaacatctgtatctgttggaagacatgaaggtaagtttgaagccctttgggcttcttggctgaaatatactatttataaggtagaggtcatgatcaatttgtttgagtccaccttatggttcagattgtacccttaactacaagacaccacaaagatgcttcatcggcaaagtgtgagtggctgattacatatcttgaagacaggcagcttgatatctagatgcccacacctatgcactataaaagagtgtagattatgctcagtgatacgccttggatgttttctcccctccaaatctcatgttgaaatgtggtccccaatgttggaggtggggcctagttggaagtgtttgggtcatggaggcagatctcttataaatggcttggtgccttccccatggtaatgagttcacatgagagctggttgtttaaaggaaactagaacctcccttttcactctcttctttagtagtcctgggagtttccatttatttcctttggatttattacttttagacccattcaggtcaagacaagaagtaaaaaatattaaagtcactgactttcttgtgaaaatctaacaggcagtcagcatctgctattgatgctctttcttgagcagaaactcctgttcagggtagcaaaagaaagtaaatgcagctgatatcctcctggccctaatatagaggaaaaaggaaagaatccctctctcctttcttctttttaggcatgtccatgaaatatacatagctaacataccaacagtaccaacattgtgtggctgtgagttgagatgtcatggcctgaattaagaaagggaacttatagaacagaaagttggtttagatcagtgatttcctatttgtgggttatggaacccttgaatccaaggaatttctgcatgaggactatgaatccatgtgcacttaatcacaaagtgtagactcaatgaataaagacatctttatctatctatctgtcaatcaatcatctatctatctggtcatgagcatgtgctcttaagacatattgccaggttcaaattctaattcctttacatagcaactgtgtgccctgggacaagttacttaacctctcatgctttgatttccttattcttaactacatagagttggtagtaggaggaaaatagataggacatgttgcatagttagccttgtatttgatcctcagggagagatcaacatttgttaggtacataaatatcacgagcagacaggcattttgcactttcatcgtttcatattcaattttatatggacctcaccttgttttagagaactttgagagtgagaaggaagccagcagattgatttggtttttctgcttcccagttttggagaaggacataaaggctaacacactgtataggctgagccttgatcctccctctgccaggcacgtcccgaaacacaaaagttcctgcccaaagcctctcacgctggatccagttgcaggggcacctcacagtcctcaggccctgtagctcatgtacagccatttgtttcatttttccactgctacaaaatgaaatatagattaaggctcccaacatcaaataacaggtccaagtttgggcatagtgatactctttgtgtattgagcattcctgtacccagaatcagaagcaagaactgaaatttagacacgccctattgatttcagtgaacgtgtgttcctgatgtggacaggctgggtatgagaaattagtagcagcccactccacccagataatggatatgaaacttgaaggacttttttttttatatataagataaaaaacctgtggcattcaactgtgtatcagcccgttcttccagggaggaatagagctcttgtttaatgttagtgttaatgtgttccttctgtgttcttgttctgttcttttgggtacctgtagttatatgctatggaaattagggtatggctttttctttccgatgctgttaatggtttgcttttttggggtgggggtgggctgggaagatgggtagtttggttgctttttaggctttaatgagctgcttttattggactgctacatttttgctgttactgctaccaaagcacttcctttatttcaataccgggcacttaagcaaaagctttagaatgataaatccaaagtttcagaaagctttagaaatgaaagtggcctccctaactccaaagcttatactcttcgaactaggaatagtacctctcgatgagccctgctccatctcccatctaagtaggagctatttagataacgacttcagaggaagcctttaaatagactatttgagtcatggtaaaatgactctctctgagggacaatttgattgtaggttcactgtcctaggaaaaaggaacccaaatttcccctggcaaagtctcaacaaactggtaaagtagaatctttccccgtctcttccagggcttagggcttcaaatattgccctctgacagcaccttaaaaactacatcttccctatttcctcctccttctcttctccaatcctatccaacaactttctgcattctgttctttcctgattatgctctcttctttgtgactgtggagaggattgagattgcgtagatatattaaactagcataagatgttgtttatcaaattaaacatactatgtaggttgacaataactttaatccagtcaaaattcatatttctcctataagtctttaataaataatgataataaagaagacaaaaaatgtatttattgaccatatttcacatgtcagatgctgtgcaatgcattttacttcttttttatcttattaaatctcataatataaccatgacctggataccattattgtccctattatacaggtaaccttcaatcacataaaaattaggaacatttgaattcagagcttaaaacacaaacaacttgtacttttcaaaataacttgctgttacctttaaggtctgtcattaaaacatagcatgtcctgggctcagtacctaatctttcttatctgaaacttaaattcctatttattaacctttttagccctatattttctaattccatagaaaactaaaggttttggttagatcttcatgtggaatgactggtttcattcaatagacttaattcagcagtctgtggggaagagcaaggtatgatagaatggttcctcaagtgcttcagatgtgaagtgggtttaaatatactgtccctgtcttcttcagagttttggtaaagataaaataggacactcatttaaaagcaatctttgcaaatgacaagccactatagacattaatagagttttcatttccagtattatcattaatatcagatcctggaagaaggttgagccttgacctagagcaaaaaaacagaagaattagtaaaggaatcctggagaaagcccctgctgtgtatttaaaggagaaagggagatcatgttgggaaattataatattaaaagtaaacaaaagctaggaagtaaaataaaataaattatatggcctagatccccataagtaatggtttaacttctgccttcctgtgttctgagccagattagggcacagtagagaaagaggagtctctgaaaatgtttccaatttcgctggtcagacagcggatcatcagtgaatcagatgaaaatttgtggatttatgcactaactgatcagcaggaaattaaacaagaaaagcgttggtagctctggtgaatcccaaaagaatttggcagttgctagccatgctcctgaatatgtataaacagtacatcatatgactaagagtttgacttaggggttagattttatgtgtttgaaccccaaattagttatttaatagttggcaccccaaaacaagttacttaacctcactaagattcagttttcctgtttataaaatgtagatagtgatagtatgtactttataggattattgtgaaaaataaatgaaatatcagatttatttaggataacacctggcatatgtttggtattcagtaattagttgctgctgttttattctgctctcccttgcatcccacttttctaagttgtaaactaaatagttgtacacagattgacagattaagaaaggcttgtgattgtgctagacctatgcctctctctcaccagattccaggtgtatatgtggaggtgggatagggagtggagtaagtgggtaaatattaaattgcccagttgggcaccatcctgaatattatctctaaagaaagaagcaaaaccaggcacagctgatgggttaaccagatatgatacagaaaacatttccttctgctttttggttttaagcctatatttgaagccttagatctctccagcacagtaagcaccaggagtccatgaagaagatggctcctgccatggaatcccctactctactgtgtgtagccttactgttcttcggtaagtagagattcaattacccctcccagggaggcccaaatgaatttggggagcagctggggtaggaacctttactgtgggtggtgactttttctaggacatgtgcaaactattgggcatttcccagggactctgtagtggagccaagctagaaagcagaggcaagtgggctgagcaacacctaaggaggaagccagactgaaagcttggttccttgcatttgctctggcatcttccagagtgcaaatttcctaccaaggaaatgagggtagaggagagaaagaagctctttcttcccctgattctgattcctgaaaagacggttggtccttaaaattccatggatgtagatcttatccccacacccagattctagtcctctggagataaagaagactgctggacactaatgtatcctctctggacttttgcagctccagatggcgtgttagcaggtgagtcctctgttcttgttcccttggtgtttcaacatgtctgggcattgctttcctctcactattttcttcgtcccatcacttctgctttctaatgagcatgaatctgttccttggccagactactttccctctccaccttgccttgtctttctttttttccctgattcattgcattctctcaagtcattctctcctctgttttagtcaataaccatgtctgttgcacatatacatgtctcattctctctcctagacactttggcatgatctcgctcaataattacattattattattattgccattttataattgaggatgctgaaactcagtgattttctggtggttacatggctaaggaactggatttcaacgtaagttccttggatctaagtccagttctcttctgactatatcacccttttgttatcaccatgtatctacttctttggtctctgttc

SEQ ID NO: 4363 - DNA, 6000 bp, Homo sapiens
tccaaccctgaacccccaacacagtggggggtgggcagggaacaaggccctcacataacagtcctacagatgcccctgcatcttaggctggaaaggggagaggcttctatatatatctgtaaagtactcctccgccaacagtgcatacacattcacatactcattaattaatgaaacaatctctccctgttcctccccgcttaagtgagcctgtctgtgtgcctgggtcttcatcccctagcaaagtcctaaccctgggaacttcctaagactttccctcccatttctagtcttaacaggcttgaggttggcagatcaagggggaggttagtgagaagggctttcccctaccatcatcactctcagtcacagacaaaggtctgggctgtcatcttggatggcactgcctgctcatcccaagtggcagctgcccctttagggttggggggaaggtcaggtccctgaaactctttctccttaccagctatatctgggtgtggtgctggcagctgtggtcattgtcactggctgcttctcctactaccaggaggccaagagctccaagatcatggattccttcaagaacatggtacctcaggtaagatggcagggctgggctctgggctaggctgtaaggttttggcaagagtccagctcatcttttgtcagctcccaggctctaagatagagatggacagaaaagatcctccagctttccatgccagcacctaattgtttatggggcttctccttctgcttgacggtgtgggagaccagcaggagaagaaggcaggggcagagacaagcatttcatgagctgcctgtggctccccacagcaagcccttgtgatccgggagggagagaagatgcagatcaacgcagaggaagtggtggtgggagacctggtggaggtgaagggtggagaccgcgtccctgctgacctccggatcatctcttctcatggctgtaaggtgaggaggtcataccagagcaagcagttgagtctaaggagaaggctgtgtgcagagctgagaggggcccagtgaggtttaaaggtggagagacccaggtccaaatgtcaacaccatgcctatgcccctgctaaaccttctctcagtgtggggtgcttgtgcagtgcctccttgcatctgtgtgttatgaatgctctatgccccaggtatttctttgttgtccactttttagcaatcatgtattgaataccaattatgtgtcagctgctttatatatgttcgatgtgctatctgatgtaattctgaaagagtggtgtaatcatgcagggctgctgaatgtggccacacacgttgcatcctgaatgaccccaggaggtgcattttcataactacagtgttagtgtctccccctgtggttgtgcaaggcagagattctgtttacattcaccattttacagttgagtacatggaggctctcttggttaagcaagtaacccgaggtcacataagaagtcaggaggagtcagaattccaaaccagggcaggggcaatagatgagtaatgccataaatatgtgatgagggcaagtgtgactttgttcctcgtgtcatgaagattgagtgtggttggaggtggttcaggagacagctgtgtgcatacaagtggctctgccagtctgatgactatgcactccttcctcctcaggtggataactcatccttaacaggagagtcggagccccagacccgctcccccgagttcacccatgagaaccccctggagacccgcaatatctgtttcttctccaccaactgtgttgaaggtgagaagccaggctgccccctgtaggaaagagtctgaatcctgaatccatagtcaggatgaagggctctggtagtacttacctggcaaaagctctgccattggtggggcaattgaggggtcagggggccctgaatattatggaaacaccctccacagagcagggtattgactgagggcagcctgactccatgggaaatgtatctcccttccccagggagatctctgttctgtccaccccaagactgagtggatttcaaagctttcaggtattgggttaagaaccccttacgcatgcgcacacacagatgcacatacgctcagaaccaacctggattcttaggagtctttggatttgattgatgcttctattccttgtggttctgggcctcgctgcccccttcgataacctttgctttggccagggccccagggtctgggagggccaagaaggcattctggccaggtgaacacttggggcctacttcaggctgcttctaacctttgttacatcaaaagacatgtttcaccatgcacagactacccagtttgccccatccctgttctgggttctagagataaacaaaggtcaataagaactcccagagctgccatcacttaatggcaggggtccaagcacaactgaaacctgtgccctctgtggtaaagccagtgagcagagtcagggctgcatcagagaaggagtaggagggaagagacagaaagaggcctcactagaccagtggcctctgaaaatagggcaaaggaggcctcatatcccaatccacacttcccctgtccattactcatttctcctcagtgtattatgtttctctgtggtttttttcccttcttcgacaagttggaattccactgcttggaatccatgagggattggttccaggacccccttcgttaccaaaatctaaggatcctcaaaggccctgatatgaaatcgcataatatttgcatataatctgcgcacatcctcccatatactttgaatcaactctagattacttataataccgagtgcaatgtaatttttatactgttttgtttttaaatttgtattatttttattgttgtattgttatttttatttagctccaaatattttcgatctgaggttggttgaatctatggacatggaatctgtgaatatggagggccaactgtacaaataaaaatcaccacacattacatttcctaagtttgttttttgttttgcttttgagacaagatcttgctttgtcacccagactggagtgcagtggtgcaatcacagctcactgcagccttgacctcccaggctcaagcgatctcccacctcagcctccagagtatttgggactacaggcgcgtgataccacacccagctaatatatatatatgtatattagagatggggtctcactatgttacccaggctggcctcaaactcctgggctcaagtgatcctcctgcctcagcctcccaaagtgctgggattacaggcatgagccaccgagcctggccaaatttcctaaatttttaatgtactgagattttgaaatttacatttcccacaattgatttattcagaaatgcctagtaatacattcctattgcttactctgcaattggctttgaaaagaggaaaggaaataaatgagatatttgttgagcacccgctatgttccaggcactggcctaagtatattaaagcacaatctcatctaaatattaaaacagcaccgagataggaattcaaataaggattcaaacccaaatttggctggctccaatgtgcatgcttttttcaatacaccacccttccttcccagaagacccctgtaatgtcacacaagggttagcaattgcctggcttcctctatagagattcatgcctaatgttgagaaagaaaatcttaagactggatggaaaatccataatgagtgctttactttgtgttcataatatacttttggatggtatcaagtatgggaatgattttaccaaaatgccacaggcaatttttatttattgaatcttgtctatttgaactttgagattatttgcaagcttctccccaggctcgagtacaagagaaaataatttgctgttgtattgattcaaggattggcgatctatccagggaaaggaaggccaagtggggacaacctactgaatgtggcctccagatctgcggctttggctcacctatcctgtgatgattttccttgctcaggaaataggatgggactgcagtccctgggagccacaaggcacccaacctgatgccccaccatgttgcaggcactgccaggggcattgtgattgccacaggagaccggacggtgatgggccgcatagctactctcgcctcaggcctggaggttgggcggacacccatagcaatggagattgaacacttcatccagctgatcacaggggtcgctgtattcctgggggtctccttcttcgtgctctccctcatcctgggctacagctggctggaggcagtcatcttcctcatcggcatcatagtggccaacgtgcctgaggggcttctggccactgtcactgtgagtgggtcaggctgaggtgccaccaggggagggtctcactactctttcctcagagtgatagaggcacagttgcttgtagcttctcactactttttccccctagagtcacttattggatgcgatactcagagatcacttaatacatggcttagggtatgagttgagaaatctcaggtggggctattcttaggcactcagtttctcttttggagcttgtcacggctgccttttctcacgatctgccagcagtctgggtctcattccgtccaagtctcctgtagaggctgtctcaaaggtcaccagtcactaactagcaaatccagggaccttttctcagctctcctccctaactctgctgctgaaacagatactgctgtccaccctcctaccattctctcttttgtcgattgctgtgatgtgtcactatcctggttcgcctctcctctgtcccttcctgctccccctacactgattctcaggcctcagctgtctgttcttcctacaccctgagcaagagccaatctcctcccagtttgcagtgtcccttctgtgttgatgactcagacatccctatgctcagctctgctctggccctctctggagctctagtcaaacgtcttaaaccccctaatgggcatttcatcttaacagatactcatgatctcaacacatctaaaattgaacattcattatttacagctaagtcccacccattcaagttagtggagtagaatcaggggaggaggaatggagccacggtctagggtaaggttatggccatctccggcttcagccttaaccttttttattctcctctttctctaccaggtgtgcctgaccctgacagccaagcgcatggcacggaagaactgcctggtgaagaacctggaggcggtggagacgctgggctccacgtccaccatctgctcggacaagacgggcaccctcacccagaaccgcatgaccgtcgcccacatgtggttcgacaaccaaatccatgaggctgacaccaccgaagatcagtctggtgattgggtgctccagagggggtggataggattagaggaggctgagggcagtggcgtggtggggtgagtggttgagataaaggctctaaagggagccacgctcctggttccccctcatttcctcccaggggccacttttgacaaacgatcccctacgtggacggccctgtctcgaattgctggtctctgcaaccgcgccgtcttcaaggcaggacaggagaacatctccgtgtctaaggtagggggtcaggacacacaccaggtatgttttgggggtgtctccaaagcctcttgctggccccagctttccttctcacatgatgtggctgccttgggggtttcagtgccgccttcacctgatcctccactcccttccctcccatgctgacactgaattcttgtctcttctggcagcgggacacagctggtgatgcctctgagtcagctctgctcaagtgcattgagctctcctgtggctcagtgaggaaaatgagagacagaaaccccaaggtggcagagattcctttcaactctaccaacaagtaccaggtctgcttgggttgccaggacagaggaagagagagggatataaatgggtgagggtgga

SEQ ID NO: 4364 - DNA, 6000 bp, Homo sapiens
ccaggtctaaaaactggaaaccaaaaatcggtcagagcaagagtgaaagttcagcttcagaacaaacccagaggtagaaaatcctctttggtcagggtgggccttgaacttcatgggatggcagcagtagaattcttcaaattctgaggtgttctgtgtcccatgtttcccaggtcaaattctaagactcatcatatacatctttacagcttagatatagacaccttccgtgctcataccttacattctggattacctgtgtattctggctcctagacttgggggattggaggtatttaaggagaactaggtgttctctgttggaactggctttatgttagacctgtgactgttggcagtttgtccagggtcagtctgggccatgtgtgctgggagggacttgggaaccctgggcagtggtttccaggtagtgatcattcctccattccttcattcagtaattatttgttgatggcttactatgtgctaggcattgtgctagggcaggaaactttacaaggaagccacccttgcagagctctcagttcagtggggaagagagataaacaggcaatcaccatacagagaagtgtggcaagtgctgaaatatggcaggaacggaatgctgtgaaagcacgtggcctgggtattcatctttgggtagaaatgggacaggactaggtaccaggtatccaaaaccaagctgaaaccaaggcacagggtgaggccacagaaagaagaaaggtagagtgagaatttcaatgcactgggccttagatgaaattttgctaggcagatggattattccagacattcctttattaccacttgttctatgtgtaggtgtttctgtctttgcacttaaggaagcagaatagcttctggagcaattaaatgaaattctgaatatagtcaaatctctggcttattcctggtaaatctaggacccaaattgtcctgttttatggtctcatggtcttgacccactcccaagggttgaaatcacagtagcatggtttttggtctacaccacaagttcttgggaatgagcgactaaaacccttgttgaaaaaagcagtggtctgtcagttctcagaggagaaaaatgaaggatccgggctctgaagatgattctgctcctcttccctctccttcccaacccaggtgatcatggtaacaggagatcatcccattacagctaaggccattgccaagggtgtgggcatcatctcagaaggcactgagacggcagaggaagtcgctgcccggcttaagatccctatcagcaaggtcgatgccaggtgagatcactaaagaactcaagatctgccatgttccctccatccccagcctgccccacccagatgccactttactaaagttcttggagtctccttcaataggtaggatgtgtggggtttacactacaaagtaaaacataataggaaaataaagtgaatatgtcagtgggttttcaaaggaagcaagatgaagaaagaggtaaagagaggagtggttggcaaaagtgtggggagggaataggatgtgtcaatttggggacaatatagggctagggacaagtgaggagactaggttgaaagaagaagcaatgaagctatagtcaagatgggcaccaagacccctggtgaattctcaacactcaaaactagccttttgaaattattttccctcagtgctgccaaagccattgtggtgcatggtgcagaactgaaggacatacagtccaagcagcttgatcagatcctccagaaccaccctgagatcgtgtttgctcggacctcccctcagcagaagctcatcattgtcgagggatgtcagaggctggtaaggaacgaaaaggagccccaaggaaactggcagaactcctgtggcttagccccgtcccaaaccaagcagaggaacatgtgggctgggctagaggagactccagagagtaccccatctggaacctccatggtggccttcagtttggggctccctgaaagtttaaatatctcaggaggagtgggagaaggacgggagccctaaatcaagcatgattacatcaggaaacaagggatgcagaaagcgtactgatctttgggactagttctggatctgatgcaataaattgttcactctctctgtctggacttcctcagggagccgttgtggccgtgacaggtgacggggtgaacgactcccctgcgctgaagaaggctgacattggcattgccatgggcatctctggctctgacgtctctaagcaggcagccgacatgatcctgctggatgacaactttgcctccatcgtcacgggggtggaggagggtgaggaggcagggtgcccatggtggagacttcaaccctggactcaggtgggggttggtgtacatcccctctttccgttttcccatcatccaacctccatgagcctgtacgggctcagaagaaaatcactgtaagacaaaattttgcaaattagatcagctggtacatagaccatcactatctgcaaccccttttgatgagatcggagaaaagtcccttttattcattttgttttcctatcagggagactgagactctggtatacataatatcgtcattgtcctctcactggacttcaagtaggcccacagccagttccaagatgtagccacacccctgggactattccatgcgctgcaatctttaggagggtcccctaggaacctgttgcctaaataatggtgacacatcaggatcagctggagcttgacccgtgaattgactgcatgagcccaattacacaccctcttccccagagaactgtgaagagaatgccctcctgcgaacaggagagatccagaattctgcattccaggttccctgctttctgcctggagctatcttactaaaacatatggcaatccacatcataatcatgattaccatttcattgaaaccttgtataatcctgacactttgcttggtattttatatccactcaattcaataagttcgtttgaacactgactatgtgggaggcactatgcttgatgctggggatacaacagtagggagaacaaagacacaaatccctgccctcgtgtaacttaatttctagtggggatgacaaacaataaaataattaaattatatagtatgttaaaagaagataagtgccatgggacagaccaagcagagagtgcagagagggattcgatctttgaaaaggcagtcagagacggatgcagcaatcttgcaaggcaggaggaatgaagctcacggaggtgagggtgcccaaggtcacagctagctatggcagaagatgggatttgaacacaagcctgtcccaagccctggctgtttccattccagccttaatcttgtaaaggcttttatactgacattctcaaacatcgcaggattaaccaggcccaaccctgctaattttcagagatcagataacgttagctagggtgaatctaagaacaaacagtacacagacggcatggctctgattaaaaggcacacaatttagaaacaatactgggaccctggaggtctaggacctccagaccctttcctggactgtgacacttctttgaggtggcctgtctgtcccggagctggtttgagggaggcgtgttctcccagggcttctcacaggaggttgaccttcctccccaggccgcctgatctttgacaacctgaagaaatccatcatgtacaccctgaccagcaacatccccgagatcacgcccttcctgatgttcatcatcctcggtatacccctgcctctgggaaccataaccatcctctgcattgatctcggcactgacatggtaagggccaagctggtgagcaagagattcccagaattctgcctcctaagctccctgctttctgcctggagctatcttactaaaactcatgacaacccacttatgatccagctctcgcacctcctgcaagatggattgaggctgcgtcaagacagaatggtagagcttgaattactgctgggtttccttctgaactttgtgacccctgtcatccccaccctccatcctccaggtccctgccatctccttggcttatgagtcagctgaaagcgacatcatgaagaggcttccaaggaacccaaagacggataatctggtgaaccaccgtctcattggcatggcctatggacagattggtgcgcccagaggaatgaggggtggagggagcagggagtggtttcccctgcctggcaacgtgagccatctcagtttggaagtcagggagatattttctcagcaacaaactgtgctaggccctgaaaacacaaagaaccactcatctctgatctgtccttgacttagagtccagtacaaaaggaacaaacatacataaaatgatagcatctccaagtgccaagtaatgagtatagacagaacatactacaggattacaaagcaagcaggctcaccattatgaggatagccagagaggccttatgcaggaaataggacttaaacttggtgtgggagagtggggcttagactagtaagtgtatggtcaggtgtgggagaccaaaggagtggggaatttcagatggcacagttaaagaagactgaataaaccaggttggtagagcccttagtctttataaagtagtgaaaaataagactgtagacagagatatcatttgtgttggggtcagccttgacagacatttgagagtcattagaagtctttgttcttgattttccaggtgcaatggtatttcagaaaatagggtgagtgatgaacagagtaagatcctgtctcaaaagaaaaaattgggagagggaatcagtggcctctaaagtcctttttagttttaagaccatgtgattcaaagctgactctgggtcagagtttagaaacaaatgtcagggcttgaaggaaagtcccacagagatgagagataacaggcttaggcagctgatggcaagattcttccgcattactcttcagacacacaccagcccagccagaagcaagtcccagcccccagccctcccctggcctaccttttggggcccttctctgaaccaggctcccctgtcctgcaactctgtcattcacagggatgatccaggctctggctggattctttacctactttgtaatcctggctgagaatggttttaggcctgttgatctgctgggcatccgcctccactgggaagataaatacttgaatgacctggaggacagctacggacagcagtgggtgagtagaagggataaggtaggagctgagaccagtaagagtgagagtgacaggggagagtgagtgcagcaaattttttaagagagaagaagggaagcaccacacaaacagagctgatgccttttcttcagtcctgtatgagccttctcacacttgccctcagtcttcagccacaacagcaaatcctcttctgtttagcataggctcattctggttggctcctcctgtctgttgtctggccctgcctgtctgagtcctttggctccttggagtctttgtcatatcaacttttctgagccggtttctcttttcccaggtttcaaccatgattgccccagaaataaatgctgggtcctctcctcttatactctccctccatgagagttcaaatgatatgatttaaaatttgaggcagggtgcagtggctcacgcctgtaatcccagcactttgggaggccgaagtgggcggatcacttgaggttgggagttgagaccatcctggccaacatggagataccccgtctctactaaaaatacaaaattagccgggcgtggtggcgcatgcctgtaatcccaaccactcgggaggctgagtcaggagaatcacttgaacccggggggcaaagtttgcagtgagccaagatcacgccattgcactgcagcctgggcaacaagagtaaaactctgtctcaaaaaataaataaataaataaatataaaatttgaaaaccagctgggcacagtgactcacgc

SEQ ID NO: 4365 - DNA, 6000 bp, Homo sapiens
cagattaatttcactacttgtcgttggtgtctgttcagattttctattttttactgattcagtcttggtaggttgtatgtttctaggaatttatccattttctctaggcttttcagtttgtcagagtatagttgttcataatagtctctgacggtcttttggattttggtcttttgtattcctgtaatgtcagttgtaatgtctccactttttctgattttgtttatttgggtcttctttcttcttttcttaattagcctagctagcaggttattaattttgtctgtcttttcaaagagctaactttttctttcattgattctttgcatttttttagtccctacttcatcgagttttgctctgatatttattatttcttttcttctactaattttgggcttagtttgttcttgcttttctagctccttaaagttcattgttacattattaatttgtgatctttatacatttttcatgtaggcatttatttctataaacttccctcagcactgcttttgctgtactccatagcttttggtatgttgtgttttttttttcatttgtttcaagaactttttttaaatttccatcttaatttctttgttgacccaatggtcaggagcatgttgtttaatttccatgtatttgtatcatttccaaagttcctgttaatattgatttctagttttattccattgggattgaaaagatatttgatatgatttcaattttttaaaatttgttgagacttgtactgtggtctaacaaatagtttatcctggagaatgcttcatctactaatgaaaagaatgtatattctgcaactgttggatagaatgttctgtaaatatctgttaggtccatttggtccaaactccaatttaaatccaatgtttctttgttgattttccatctagaagctctgtctaatgctgagagtggagtgctgaagtcctccactactattctgttgcagtctctctctctctgtctcacacacacacacacacacacacacacacacacacacacactcttactctcactctctctctggtaatatttgctttatgaatttgggtgctccagtgttgggtgcatatacatttagagttgttatatcctcttgctggattgatcccttcatcattacataatggcattctttgtcttttttttttttttttttttttactgtttttgacttaaagtttgtttatttgatataaatatagctagctattcctgcttgcttttggtttccatttgcatggaattgtttttccatttctttacttgtagtctatatatctttactgttaaggtgaattttcatgtaattaacatatagatggatcatgtttttaaatccattccaccattctacatcttttaaatggataatttaatccatttacattcagagttactattgatatgtgaagctttttcctgtatactgttaattattttctggttgtctcatatattctttgtttctttctctcttattgtttgtcactgtggtttggtgggtatctgtagtgacatcattcaagtcctttctcttcaccctttgtgtgattgctttacaaatgagttttatacttctgtgtgtttccatcatggtaaatgtcatcttttgcttctgggtttaggattcccttgagcatttcttgtaagaccccatctagtggtaacaaattctctcagcatttgcttgtctgggaaacgctatttctccttttttatgaagaataattttcccagatatagtatttttggttgactctttgaatatattattccattttcttctggcctgcaaagtttctgctgaggaatccaccattagcctgctgggctttcatttataggtggctagatgtttttctcttactgtttttatgatttactctttgactttagatagtttgactgtgatgtgtcatggagatctttttgcattgtattttcctgggaattgctgagcctcctgtatctggatgtctaagagtcttgctagacttggggagttttctgctattgtttcattaaatacattttctaatcagctctttgtctctttgccctcagggatgaaataatttgaatattttatcactttatgaagtcccaaatgtaacaaaggtttagctcattcttttttattctttttatttatttattttttgtttggctgaattatttcaaaagacctgtcttcaagttgtgagattctttcttcagcctaatctagtttattgttgaagctttcaagtatattttgtatttccttcagtgaaatcttcaattccagaattctattcattctgttttttaaatatctatctctttggttaatttgtcattcatatccaaaattgtttttctgatttctttgtattgtttttcagaattctcttgtatctcactgagcttcttcttatttttttaagttactttcatggggaggtctttttcctgaatatgtgtctattgtgttgttggggtagggcactctggctttgattctgggtgcatgcagtagtatagtatttgtatgatttatttggctgtaaataacattagtggtatctgtgatttcctcagtaggtcagagtgtgtttattagcagaggctgtggtgaagttgcgctgaggattgaaatgtcaagtgggccagtcatcaggccacagtggtggcagcatacctatctttgtgcctcaaggcagtgtatgctgtcacttgtgtttatgcttatcagcaggtcgatttttaggtctccaggtggcttgctcagataccgataatggcagcagtggactgaagggtggtgagcaggctctcaggccccctggcagtcagtgtggcatggggaatgacagtagtgggatgattctctgggtcccaagcagtgtgcattgatgttgatggtggctgcaatggcctgggcagaccagtctccaggaccacaggtggcacttgcaggtaggtggtagtggctgggagttaggcccaccctaggcccctgtggaaaaatgctcaggtgcccaaggcagtggattgggttgggcaatccccaagatgctggcctatgtgttctctttccaagggggaagggggaagccaggctgagtgggcttgcactcaggccccccagtggtgaaagcaaacaccagctatggtatgtggaagcagggccatcctcaggccccaggcagagtgctcaggtgaggacagtagccgccaccgtgaggccctgccactggagaaggtgaggccaggttcagtggccacagccttggatggcagatggggaatatgcatccctctcagcctcagtcctaggagggcttcccccaagccagcactagctgcaggagcttttgcccagcttgcaaccaagttgcagcagcagctcacagcccactactttacccagtctcagtcacagcagcattcacttcctaggaccagaaactgcagcccacacctctcttgctacttagctctacctgcagagtgctcccaatccatactctagtcttggcagcaacagttttagttttcctaacacctcagacccagcactgttgggccccaggacagcgtgcattctgccaaaggctcagtttgaaaatggtcccttactataactgcagaggtctcagaaagagtatggaacccagcaggagctccctccctggagcagttccgccccacagtctcccagcagctccctatggtagtttcagggattgggagggtcaaaggggtctcatgtggccaggactgcatgattctgcagtgggatgtgggccactggaggtctctcgctcacctctattgggaaatcactcccagctcccagcagatctcagccagggaggctgtctctgttccttctccttccctgcttttagtgtttcctgtcacatctctgttgaattccagcattctcccttggaaaatgtatttgaaatatgactgtttgtatactacttttgttcttctaagtagaggaggtaggcattaaatgcttctagtcagccatttcgaagccccttctcttgatcttttatttttaaaaacagacattctttttctccaggaatttctctctctaggataaatatgactactatattgatcgtttttcacctaattccatatacacagatgtcaaaattagaagacacacccgtaaattccttacatgttatataatcgccataattcatgtaacgggtctcctacttgtagaaatattgtttctgcttatagaaatattgtttccaatatttcctcttataaacaatgctgcaatgaatattcttgtgcacctatcttttcacgcttatgtgactaggttatattctgatggataaatctagaatatatatatggggtcaaattactgaatctaatggtatatgcattctttttttttttgagacatcatcccactacatcacctaggcttgcctccaattcctgggctcaagtgatcctcctgcctctatcttccaagtagctgggactacaggtacttgccaccatgcccagcttttaaatcctgaatttattattattattattattattattattactactactattaccagtatttcatagagacatagtctcattttgttgtccaggctagtcgcaaactcctggactcaagctgtccccttccctcaacctcccaagtagctgggactacaggcatgtgccaccatgcctggctttaaaatcctcaatttttatttattattattttattttgtagagactggttctcactatgttgcccaggctgattccaaactcctggcctcaaacaatccttccacctcagcctccaaagaagctggtattacaggcaccactgcacctagcttagtatatacatttttaatgttgctagatattgctgaatttccctccgtgttatcaagtaatcctcccaccagcaatgtttgagagacaccatttccttatattctcaataacaaagtattgtcaaacatttctttgttgataaattgagtagttacaatagtatttcatggcttaaatttatatttttcttatgaatgagatgagcatctcttcatgttttatgttttatgtttgttttgatagacagtcttgctctgttgcccaggctggagtgcagtggtgcaatctcagctcactgcaacctccaccttctgagtccaaacaattcacccgtcttggcccccgaggaagttgggattacaggcatgcaccacatgcctggctaatttttgtattgttagtagagacagggttttgccatgttggccaggctgatcttgaactcctggcctcaagcaattcactctcctcagcctcccaaagtgctaggattataggcgtgagccactgtgtctagccatcttttcatgtattgaatagccatttgtattctcttttctgtaactctctattaatattctttactcatctgtattagtgtgatagggatgccataacagaatatcccagaatagatggcttacacaacagaaatttatttctcacaattctggagactagaaatccaagttcaaggtgttggcaggttcggtttttcctgggacctctctcttcggcttgtagttggccaccttttcactgtgcccccacagtcattcctttgtctgtgttgtctatgtcctaatctcttcttataagcacatcggtcatactgtattagggttcaccctaacaattccattttaacttaattacctctttagatgccctgtctccaaatacagtcacattcagaggtactcgggattagaacttctacatatgaatgttgtgggaggacagaattcagccctaacattctaccctctggcctctcaaaattcatgtccttctcacatgcaaaatacattcaccacattccaacaataccagaagttttaacccattccagcatcaactgtaagtcca

SEQ ID NO: 4366 - DNA, 6000 bp, Homo sapiens
tttcttcctcaaaaatgcctttttcttctattcttgtagtctgaattccaatttctgttcggtctctacttgcagtgtggtaagactatagtgcactctcagcacattgtgagtagtaacaagccaaaaaccaggggtcatgtccaggttcagatgctcatgtgggagaggtaaaatattgatatatagaggcaaaagtggagtaagggggaaggcaaaggctggagctgaagttttgaaagaaacataccttatttaatgctactgactgctcagaagtcctagcatgtttaatttgccagaacttcttaatatcaaattgctcttgtgtctgaaatcctggttctcttgaattctctttttttttgagacggagtctcgctctgtcacccaggctggagtccagtggcacgatctcggctcactgcaagctccgcctcccgggttcacgccattctcctgcctcagcctcccgagtagctgggactacaggcgcccgccaccacgcccggctaatttttttgtatttttagtagagacggggtttcaccgtgttagccaggatggtcttgatctcctgacctcgtgatccgcccgcctcccaaagtgctgggattacaggcttgagccaccgcacctggccggttctcttgaatcctttgttgtgtagtaatgaatagttttctatcttctttagtattaagaaatggcttttctgatcttctgagaaactaaaacattatttctaattttagatttcccctcacttctcaaggcctcaaacacaatatcctctaatgacattgtctttggggtgacccaaaattatcatttatttcttacttatgagcagagagtttgcagcttttacttgccttgtctcttttaatacctacagccaccccctgggagcagaggagggagtgtgtataaagtatcacatttccacagtttgccatttatttccacttaagctgattacaggttgtgtttacttttcgttattccacagcatctctttagctctgtttcaatagtaaatccctccaacgtgccagtctttctccctcaactggattcgatctgaaaagtaacttaataaaatcctaactgtagactccctctcccttggggtcaaactagaaccccactgaggaaggaactcctacaaacaaaaaagcaggagtagcccttcttgagctggcttgacattattgattctgcgtgggtgccaacatcccagtcatctcaaagaggagattttgtgaatgaaacaacatgaagaggtgaactgtcttttgagaacataagccagaggtagatgtcctgggaatgtgagtgctacagcactgggtaggtgaaaggagatgcctacttccacactcaaacagaacactgcacctcatgatttgctgtgcagtgggagtgggtggttgacctagaggctttgattcagacccacatcacaatttccctctagaatcttcttatttaataactgctgaccctgctataataggtctctgggggatacaccaattctctttcaatgttctggccaaagagtggacaaaaatcccttcccttgatttcccaagacttgggactctcaagatattttactaaatgacaatgaaaaacaaataaatttaaaaaattataaaaacaataatatccattgcagagggtacaacagttacttaggaatgaggaatacaaagtattgtgaaaagtctgaagaattgacaaatatttgtggctggtttctaggaaatttctccttgctgagaatagctttatctggctacccagaaggtttaagtcccttccacagagtcagttcctaggagtcactcaggatgtggtcttggtgattgggcagaatatattgctataaagtctgagaaaagttttaggaaaagtgctgggctcagtgactcatgcctgtaatcccagctcttaaggaggcagaggtgagaggatagcttgagtccaggagttcgagacctgcctgggcaatatagtgagcactcattctcaaagaaaaaaaaacattttaagaaaagtttaaacatatttgtgttttttaaaggctaccttagatacaaaatcattgtcctgaaattttacagttggactgaggtggggtatagtatatctcttgggtaagcagagtatagatggcctgagaacaatttgttgctccttcctttgccacctgcatatgtgaggataacattcttttgcctgtatagaaatgaagtgtgcatttaattttcagtgtatgggtattcccctaggaatctctctagtcctagccatgatcacaatgtctgaatctaccataaccagccccctctcagacccatataccctgtcacattctctgtaagatactctccacagaatatgtctctagctctgctggcacctccctgggggtctttactagcttactcccaacttgccactccatggagcatacgttgctatacttcccaccctggactgcatcctgtatgccttgactctcaggaggtccagactatgggcatgataactagcaaccactatggcgagcaagattcccactgcaccaacagtggctctccacctgctctgggaaacattcttccttaggcactgggaatgagcacccttttcaggtaaaataccacccactaaatacaggggtgtcactatcttctcacaggcccatccataaaagagtagcataaagatagtaattaaattatttaacattttctgatatttttgttattattctaagtactttatacaattaatttatctgacattatttaaccttcaaaacaactctataaggcagttactattttattttattaaatttacaaaaataataatttttttatttaataaaatcccccattttatttactttttaattaattttatagagatgagatttcactctgttgcccaggatggtcttgaactgtctctattatcttctaatcttgacttttttccttatacgctacaatactccaatgaatattcttgttgattttttttttcacacctaagtgtttctattggatgtattttttgaaatggaatttttaggtgataaggcttacaaatttcaaatgtttaatagatagtgcctaaatccccttcaaaaatgtttgccaatttataaccccattatttgtgttccatttttgaaagatataaatatgtgtgcaaatcaactgctccgcatgggtagttccttacaatttctgtaatggaaaacatagagggaaaactacttgcagtttcagtgggagaaaaggttcccgtttcaagaaaagaaaatttcagtaggagaaaatattgtgaaaaacaaggtaattttctactttaagtttctgtcctatgggtataaaaaatagctggacattatcttcttcccaggctcttctcccctcttctccgtcaggctgcattgctggtcatttttggctcctgttggaagcaaactgctctaatgcctttggataagattttaaccaggaattatctttttttttttttttttttttttttttttgagacggagtctcgctctttcgcccaagctggagtacagtggcgctatctgggctcactgcaagctctgcctcccgggttcacgccattctcctgcctcagcctcccgagtagctgggactatctgccaccgcgcccggctaaattttttttgtattattagtagagacggggtttcaccgtgttagccaggatggtctcgatctcctgacctcgtgatccacccgccttggcctcccaaagtgctgagattacaggcgtgagccaccgcgcccggccgaccaggaattatcttaaacagaaaaagaatactctaaggaggggtataccggccagcagaacagtaacccctccccggggttttcacaaggacacaagctggtgtgtaatagacttatctataaagcagactcaactcctaactggaattgttcctgattggttagcagaaacagaattgaggactgacgacagctgcacaagaagatgaaaccatttccttcctcttttctaagcttgtctcttaaaacccactggacgttggcacagtgctgggatgactatggagacccaaatgtctcagaatgtatgtcccagaaacctgtggctgcttcaaccattgacagttttgctgctgctgggtgagtgagggtcattctgaaatggggcaatttcagacactcctactgcctggactccaggtaccagtgtggtaaggagcaggcctgggccctggaagcaggggatagattgaaagaggagagaggaccctgaattcttaagtgttccaatggttcctaaggtcagaactcagaggtagtttcatagtccctggaaagtccattctgcaccaaacattcatgtgtactttgtagtcatgaggaggaacaggaaatgagataaaggggacatatgaagtgaatacttttataaaagatcaactggaaacaggatcttgagatgggtcctggagaaggaagagcccaagctcacctccccagcatttcacatacgcagctaaatttgaagccgtgttctcctgctcgacgttgatccactctcttctcttttacagcttctgcagacagtcaagctggtgagtatgccctttgcttccttgtattgacagtgttgtatcctcataatatgatgctgtgtttgctggggcggcgggggggtatgtctattccactgaaaatcaagcttgggttcagcatgggcagttcccccattttagtggggtctgggatttgcttcttagatccactgaagacccaagggaatgaggccgctgcaagtacagatcttgaactacatctacaataggactcttgggtgcctgacctcccttgggagctcctttggcatccacagtcccttcagggttatttattccacacccctttccactctgcccctcagcagctcccccaaaggctgtgctgaaacttgagcccccgtggatcaacgtgctccaggaggactctgtgactctgacatgccagggggctcgcagccctgagagcgactccattcagtggttccacaatgggaatctcattcccacccacacgcagcccagctacaggttcaaggccaacaacaatgacagcggggagtacacgtgccagactggccagaccagcctcagcgaccctgtgcatctgactgtgctttccggtcagtggaggaaggccccagggtggacctgggagggccaggacggatgaaatctgtttacagacagaggtttgcaggaaagagtgggcgtggactgcttactgggaagcactgttgtgagttgctcattcattccccatttcacccaccctctttgcttagcatgcgtggtgggggaagggggaatttctaataattttctcagcatgtgttaggttgtttttgcctcagtcttgattgagcaagggggttacgaggccacaaacagctgagtgtgggagaagcagaaggaaatccctactttaaaaaactaccctcctcctgtggcaatgcggtaaagcagagaggttgggggaaatagacctctaaaggctctaaggcaggaggctgccagacaggtgtgtggaggtgggagtgtagaattcagtctggaagatgaggtcagaggtgaggggagggtgaagggtagatcaggcagaggctgataggctgttgcaactattttgacttttattcctgagtgagttgagatggctttaattaaaggagtcacgtgatctgatttagctttatgtaaacatctgacagtgttcagtttaatagagtctgtagagaaaatgcttctagatagtatttcttttttttttcccccaagtagctgggactccaggcacacaccaccatgccaagtgacttgtttttatttatttttatagagacagggtctcagtatgttgccca

SEQ ID NO: 4367 - DNA, 6000 bp, Homo sapiens
gcaaagggagagtaaagaccagaaccaaactggggctcttccagccaagtggagtgggaggctgggttgggaaggtgttagataggcactacctagagtttagagtgttaaggcactgtggaaaaaaataagaaaattttttttctttgtgaagcttagttttgaatgagattggtataaagtaatttttgtatatgtatttgaggagtagttggttttctagatccttttctggatatcgttgatgctctgtatgcaaaaggtaggtttttgggttatgttgttaaacagtgattgaatggaatatttatgtatttgtcaactatagtgcatagcatagacagggtaatgtttcaagaagtagttatgtgcgtttttcctttagtcctcacaacagtcctccagggtaagttcttctgttgtctctattttacacatgaagaaactgaggcttagttaggcaagtcacttgctcaaggtcagtagttagtggctgagccagatctgtctggttctaaggcacatgtatattttatcctgtccaatttttttcacctctgctttgataatcagtatttgtctcatttatctcaaagaaagtcataatacatagctgtgtttcatatttatattttacttaaaaaacagtggaataaatactaaaaaaaaaggtgttctgtcagtagtcaatgagcacatggtaaaaatagatgttctttcttagtgattcgtgctaggcttttggggatgactcctctaacacctgaaggactagaatcaaattaaatagggctacaggctacagagactgtgaaaggtgtactacaggacacaacataatgactcctgagcagttaatttgtagttagaagcaggtctctttgcttttctagaatcctttcttcctggaccttctcccccaaccttcaccagttatggtttttttattggaataaataattaattttggtacaagtaaacttcagaggtaattttatctctagttgtaactaaaataataggcctatattaagcaatgtgtttcttgaaacattttcaatagctaaggcctattcatgcagaaagtagctgaaaacatactcagaccaatttttcactttattgttgtaattctttgtgtaaaagcaaagataaataaataaatgaaatggagggtggggagggtgagtaccaagagatagagtaaaacagctaggttaatgtaggttttgttgttgttttccttctttattatacccaaaagtgaatgtcttaacaatggtaggttcatttcaaagttgatcgtggttctgtggatcctcttgaagtcctgagcagcctcatttgccctcaaaatcgaggtgctgaggcatgttccatagagactcagggctccttccacctctaaatagcactcagaatcaaacttcatagaggtgttctagattgagctagatctgtcagcagaccccaatctcaacctacatctgcagtttctctgcatcctttctttcatccatcccttcatccagcacctgtgttctgccaagttctaggaagttaacaaagtccctgacttaagaccttattatattctaagggggaagaggaatgaggataacatcaggcagtggtaaacagtttgaagaataccaagtccatcagcaggaagggatttcttcagtgttttcccatttactttcatgagatagttgtattcttttgacatgaaagacagtactgtctcacatgaaagacctcattgatattttaacatttacagactaaaagataattctgtgttctttttcctctttactttctctgttctcattcttttctactcacataatatatcaattatctactgctacgtaacaaaccccccaaaatatagtggcttaaaacacgcactatttatttggctccccattctgtggattggtcgagcagattctggtctggatgagctcagctgatctctgctggctcacttgtgcatctgcagttggctagaaggttgactggtagctggacagtctacagtggtctcacttacagtctaaccattggcaggctgttggccaggcagacagaggacagctgggccatgcatctctcatcagccatcaggctgactttggcttcttcacatggtagtggtggctgtgtgggtcccaagatcagtgagagtggaagtggcaaggtctgttgaggtctgggtgtggaaactgcacagcatcactgctgcctcattctgttagtcagagctgatcacaagatcagcccagattcaaggggtagagaaacagatttctactcttgattggaaggacctacagcattatgttgcaaagagtaagatgcagagaaggaaagagtttgtagccatttgtgcagtcagtcacacattgtaaaccccttctcccatgaacataccctaaaactcttagtgagtttttaggaattatgatatggggttttattatctaagaatttatataatttaatgttgggagttccgtcctattcttggaaatagctgttaccagggaacagttagtttaattctgttcctagtagaaaacagtcttttttttgtttttttgagacggagtctcgctttgtcacccgggctgaagtgcagtggcgctatcttggctcactgtaagctccgcctcctgggttcacaccattctcctgcctcagcctcctgagtagctgggactccaggcgcccaccaccatgcccggcgaatttttttgtatttttagtagagacggggtttcaccgtgttagcaaggatggtctcgatctcctgacctcatgatccgcccgcctcggcctcccaaagtgctgggattacaggcgtgagccaccacacccggccgaaaacagtctttttaacttccttttgttttttggtggggttagcatttaacttgtagctttctgagatgaatatagagggtctgtatgattattaaccatgtgatctgttaatatttcctatgacagccattatagactaaagataaacacacagagtttgactatttaatttacttgaccagttacctcagtgcattttaaagtatgtttgtgtaacaagacgttcataataataactaacatgtattaagtactgtctgtgagacactgcctaagttataggtatcatcttatttaattttcataacaacaaaaaacaaaaatgtagatattattagtagtaccattttagagatgaagaaacttgtgcttagaaatttacaaatgtgcccagggccacgtgaccagtgctcttctctaaggttcaacaaagacgatatcataattcagactgcagatctgccaacattcaaatggctctagtcctcgagtgttattttctaactccgcttttagatgcaccattgtatagcccttacaactgggcctgtcccttctgtagatgtgggagtagctgaactccacagaaccccaggttacacactaaggacacaggttgttagggctcctggatgagggtaagtgtgtttattttaaaccacgtgcttttggctattgagcttatgatttcaaaggtgaaagcttaagcacgttattagacttctcaaggagagttcccctagattgggagaaaagttgacattgggtaatattaaatctttcttttaaaaccagggctattttgttgttgtttacaattttaagagtctagactgaaagagtcatgaaatgcagccacctatctgacctcttcccccaacagttagggaattcgctctgcccccaggccacccaaccttcccttgctctcctgaatgggaccctgacaattccctggaattgtaacctcttccttactgctgaggctgagaagaggatcttttctactttactccatttagggtttttctttatatctgtgtagattgtggctttttgttttttctttttaattttattttaaaacaggaagaacagttatctgatattaaaaatcaaggaagcaatatttgtattggtcacaatacgctcagactaaaagaattatgctgtaagtagttgtattgaagaatatttgaagtgcttttaaactatttgtttaaaactatacctatttgtataacgtgaccagatcaaattgattgtatctttgggtggcaccaaatatgttggtttcttgcatggattgattattctgaagctcatgatttctgtgggtctcaggtgcgtggaagttcccatcttagtccttaagactcttaccccaattgtaagagctgaggaattctgtgatagctattaagataagagatattcctaagaaggaatatattattacagaaattttcaaacatcaaaaaggtttgaaagaataatgtaacaaagccccatgtacttgctttaactattgtcaacgtatgtccaatcttgtttcaaagtcagtcctggatgtatcatccataagaagtcttcctgaagacattcaagagggaagtctttgctttggaaccctgatgtgatcacgttaatcattgcttctatgcctgtagctgaaggaaccgccagcgttttcagtcctctaatccttctgcttcccttttccagggcccagtcatatatgcacagttagaccactccggcggacatcacagtgacaagattaacaagtcagagtctgtggtgtatgcggatatccgaaagaattaagagaatacctagaacatatcctcagcaagaaacaaaaccaaactggactctcgtgcagaaaatgtagcccattaccacatgtagccttggagacccaggcaaggacaagtacacgtgtactcacagagggagagaaagatgtgtacaaaggatatgtataaatattctatttagtcatcctgatatgaggagccagtgttgcatgatgaaaagatggtatgattctacatatgtacccattgtcttgctgtttttgtactttcttttcaggtcatttacaattgggagatttcagaaacattcctttcaccatcatttagaaatggtttgccttaatggagacaatagcagatcctgtagtatttccagtagacatggccttttaatctaagggcttaagactgattagtcttagcatttactgtagttggaggatggagatgctatgatggaagcatacccagggtggcctttagcacagtatcagtaccatttatttgtctgccgcttttaaaaaatacccattggctatgccacttgaaaacaatttgagaagtttttttgaagtttttctcactaaaatatggggcaattgttagccttacatgttgtgtagacttactttaagtttgcacccttgaaatgtgtcatatcaatttctggattcataatagcaagattagcaaaggataaatgccgaaggtcacttcattctggacacagttggatcaatactgattaagtagaaaatccaagctttgcttgagaacttttgtaacgtggagagtaaaaagtatcggttttattctttgctgatgtcctttctgcttgaaataacagtcaccatacagctaaaggagaggagtttctttccttctaagtaggcagaaatggtatcattatgttgccgctctccaatctcccagagctcgctctctagagaatcaccttctttcgcttttttttttttttttgaggtagagtctcactatgttgcccagactagccttgaactcttgggctcaagtgattctccctcctcagcctcccgagtagctggaacgaactatagttgcaccactgcagctggcaagaatcaccttctttataaagcgtcagtcatgcttccagcaagaggcagcatcagtcatggctttataacagcttcatggtgcctcaaagactgttgaggttaatgagagcctagattagacagtttggctgtccttccctaaaacttgttttctcctattcactactccccaccgcacttaaaatcta

SEQ ID NO: 4368 - DNA, 6000 bp, Homo sapiens
ggttcgcggagcccccgaccccccaagggctagaggagcgctcggcggaccaaagaaagcccgcgagcggctgcgcgcccaccaataggtgcggggctcggagccgcgcagcctgcgccgtccctccctccgcccccgccccgccgccgccgccgccgccgcctccccctcctcctgctcctgccttggctcctccgccgcgcgtctcgcactccgagagccgcagcggcagcggcgcgtcctgcctgcagagagccaggccggagaagccgagcggcgcagaggacgccagggcgcgcgccgcagccacccaccctccggaccgcggcagctgctgacccgccatcgccatggcccgcgggaaagccaaggaggagggcagctggaagaaattcatctggaactcagagaagaaggagtttctgggcaggaccggtggcagttggtgtaagtacggggtccgcagctcccggccgccgcgtctgatctttcccgggcggcgcatcccctgcgcagggtccgcggccggttccgcacccaccgcgctggccggggtggcgggggcgagggtggtggacgctgctgggtcgcgccggcctgggcttgcagtcctgtgcggaatgcggtgtccccagagtggggcgcagggtcggggctggaacacgacaggcggaaggttatgcatatcgtagcgatcttggcttggtaatttgcagtctttcctaccgtgcatcggttgagccttttactcctgggaatagtcaggctctgcgagactacatttgtctctcccgtgtcctgagtccttaaaaaaaaaatgagatctggggtcttgagagaacctcgtgaggtgatgggatctaatgcagacgaggttgtgtgttacagcatctttcttctagtctaaatacgtatctcaaaagagaggaaagagaagggtggagaggaatccatccacactgtagtatttcacagcgatggctaaggatttccctccatgacctcccctggagtcatcaccacccagaaatggttcaataagctccatttcaggactccgattcttagctttggcccgaaacctggcaaagtctggttgttttcaaggtctacacagacagttgtggatcagtcagtaggttgggttgattatggtgaagggaatataaacgcagagcagctgatcttaaaatattttgtgcagcctgttgcttggttggatagacttttttccatcgaaaattagatttcttgttttcagcctctccggaaaggtgacttttttttttttaaaaaaaaggtcattttgaagggcagagttgtaggcgaatctatgagtcgtgactgcgtgagggaaggagggagggaactccccctgctgcatcactgccccctcctcctccaacatcatcatcatcatcatcatcatcatgaccatcaccaccaacaccactggcaccaccactgcagtcattcagggagtcctgaacagaggccgattggtgttcctgcttgggaggatctgtgggaatcggcaggagaatgagtcagggaaatagtgcttagctgacattttgaaatggaagaagctggaatatatgaatttttgtaaagaaaaaaaaatgcagcctgtgagtctctcttgattgaaaattaaagggttaataatgcatcacacttcaaggttagtcaaggtgaagcgtctttccaaggtgttactgggaagcataggtatccctgagccatggaaaatgtagttctttaatggcttttagcttttgttttatattttattttggggagacttcttcattgagattattgtcatagtgtctcaggcataaaggtagtttcctgtgttttactgtggaaaggaaaacctgaagaactgtggggtgtgtgtagaatgaacagctccctggcaactccttgtaacttgagggaggcctggaaggtgcactgcggtatgggcacccttctccccaggttagctggggcttccttctctggtggtctgaccctgctgcgtcacaggggcaggggctgcattgactctaggcacattgtgaaatttgccttcttgtctttttccccttagtataatatgcatctttgctcattccagtttcatgcttctcagaataatacttgctttagagggtaaggcagtatggactgactcatttttaagccgacatttaatgggcagcacctccatgagagagagaaagagagaccgtgtgtgtcaatttttatgtcttgatatcctatccagcaagctatcagtatgctgatttgtgaatgtagacccaggactgctgtacttgcctcctcttcccttccatgttccacggtacaggtgctgggctaaaaatcccctttttgttttgtgctaatatgtctgcccctttctggcagtgtaaaaactgtcagagcctctcttaggtagaaaaggcggcagcaattaccgtctcctacggagaaaatgccccttttccagcactgggcccaacatggatgcccttggggcgagggcaggatgcccttggctcgattttgcttataggtagattttcaccaagatggacgcaggagactcgcctgtcacctgctggagaaatcacagcatgcaaatcactttgtgccttctgcctttttattaggttaatacagacattggtaggttttatatttacagctaggcctggatgcctgcctgtgaccttttgaagggtacacactgtttgtttgttcatttgtttgtttttccaaaaaaacctctgtattacttttttttaaaagaagaaaaattgcgtgaaagggagatgcctctgaagcctctcagctcccctcacagtgccaccccagatagttggtgtgacttatctagccttttttttggctagtggggagcccctggtggcctgtgtctgagtgagccactgcataggcccctctagtcctgagtgctccactctctcccagtgacctcacggcagtaactagggagattttatcaactaacatctcagagcaaaaagggaaaattcctcacttttcttaggatatcgtgtgggcagaatagaaaggctgtctgtttctgagcttaatcggcgtacttgcaaaatgacttgtttttccgttgctcttatttgtattttaaactgtagcctcaattatgtaccctcttatgttgttagaattaggcatctggagtccagggaatgagtatagagatgtttcagttgttcgaaggggcacatgtaggtaaggtaagagcaccaagatgaggtgggggtggggggcagcaagaggaaacttgaatcagggctacgatagctgccttgctgactgttacaccaactcttgcacctcttaggagcattcactggaaaaattttccagatctcttgacgtcacagcgttgccatttgcctactgctgcttggatacagaatgcagcacttaacccttgtcctgcggggagggagtgattgagttgggtgctgtagttctggattacacaaccttttctttcttccttatctttacttctgtctttgcttttttccttgttatttgcttttgatagaggagaaaaaggattatgattaagcattttgctgtggttttgtgtgttttgcttgttttaacagctctgtagcctgatttcctttaactgtttagtgcctgataggaaagttgggcttttaaatgtatggacagggcaacaaggctaattcctgcagttgtgtacccactccctccctggccccctcctaccacatatacttcttttcaataatactgtttttcagtggcttttctccaagtaccctggcatttttaatgcatgagatctggacctttttagcagtaacctaaggctcctttgtgcagtcgtgcttctgactcgataaccttacagttcacttgttccctgttttgcattcacattgagtcgtttggctggcacaggactgccaggcaatgcctagtacagcctgttactatgcagctaatcagggagataatccttgtaaaccagtaactgatagccaccctcattcccatctatgtgttgagtctttttttttttttttttttgcttttgcagctatttcagcctccatcctgttgtcttgttaactatgggaaaaagaaaatgcagcccagcaagtcagtcattattcttgttccagttccagaagatggaattaaaatgtgctggtcattttcactatagaattttctttttttccccttgtcttgtcctccgaggggaaagagtgtgctttgttgataatacaaaccaaagggagagtgatagtaaaaaaaacaggaggatatcatcactgggtttctcaggattcattgctctgccatagcaaaataaccctcaggcatctgagcatttggagaaacagcagagcttggattgtagtatttaaatgtcaagggatatgcaagcaaagaaaacataggtctctaagggagtatactgtcatattttaaattcattgcataagcatccaaacatagctctagattttattggtgatcttcatgattttttttataattttgagaataaaaaatatggatactttttttaaaatttagggaataaaaaaatataaggatcctagttctagctgaacattcctcctacccttaaccacctcccatacacactgcaagtggagggctgcccagcttctcgattttcaccctgtgtcagtggggtgaggtgcactcttgacgttggacaaggaagaaatcatgggaccgggggaaccaggaaggaagcttgttcatccgtgggaagattaaactttcattctgagcatatgactgcatcacagctttttgtttctgttcttcttgcagttaagatccttctattctacgtaatattttatggctgcctggctggcatcttcatcggaaccatccaagtgatgctgctcaccatcagtgaatttaagcccacatatcaggaccgagtggccccgccaggtaaaatccacatgaatagcttcatttccttcagagatagcatgggtgtcactttttctattgagaaaaaattctttggaaaattactctataatgtagtcttaaagcaaccatgaaaagggaaaagagaaacttctctcggctgcagccagatgtcctacccgcattgcaggcagagctcccacgggttgcagacatcttatttgcccagttctagagtgagggtgaagcgtcctggttcttggccagcctgctacccaccagctatgtgactgtgaacagattgagttctgatgggggcctctgtcttctcatttttcatattctagggtttggttagtgggatcctttccagaccttttcaactctaacagacatttttttacttcttgaggggggctatgactcaggtaaattcttttaaaaaagtcacttgggctcctgttttaaaaggtgaacttatttttagagatgataagaagctgtggaatgggcagctactcacagggagaggagccatgactttaggggtctattgtcccacctgctgttaatttgcagtttgagcttgaacaaagtcactcttacttctcaatatttatacccattgatttaataagcatctcatttgccagctttctggtcccactttgtagtttaattaactgtctcttttagctcttaaaaacttgggtgaacaaaaagattatcataagaaatgcaaactgccacacgagtccctgctgtgacttgggtgccatcagtgtagagctatgtgtgtccacaccagtcgtgaaaggcccatggccatcatgcctgatgctgataggacaaggcagtggaatagccacaaacgtgaatttaccatctggctgttgtaaaaatcattgtctggaggacctagagagaaagtgttgcataacttccgggctctcacttacgaatgaccttgaagctgctgctgagggatggcaatgactt

SEQ ID NO: 4369 - DNA, 6000 bp, Homo sapiens
agccttttctggcagaggctcttgtgttttctcattttccgttcctctcactgtggctaacaggtgggggtgaggggacagaagagggagggctgcctaccacggtctggggcttcaggaatatgagtttgtttatttaaatgaatctcagtctttcaaataaaaaataaaaaatcagtttgatttcatataattgtcaatacttgaaggagtggttggaagcatgaattttgatctgagagtgaagctgatattgatattgtgcgcctccacattcatgtgctctcatgttggcttttctcacgtttgacaacaactcatatgggaacatggtgatacaccaagcagatctgaactgaaaacttaaaagaaaaaaacaaaaaacctttcagggtgactttgaaaccgactttgtgtccttttttctttccctctctttcttctatcatcattcttatatttccctactcatttccttcactttctaaaacacaatcattaaacacacatttctagtttaccccatggctctgattccagatatactgtgactttgtcttcataaataaacctgaaattttcaagtcagacatccacaaaaatatcaaattaaaccctctacctgcaccacgaaaagctcaaaagactgccaggcatggtggctcatggctatggtcccagctactttgggatgcagaggcaggaggatcacttgagcccagacattcaaaactaacctgggcaacatagtgagacctcatctccttaaaaaataataataagggaggccgaggcgggtggatcacctgaggtcgggagttcgagaccagcctaaccgacatggagaaaccccatctctactaaaaatacaaaagtagccagacgtggtggtgtgcacttgtaatcccagctactcgggaggctgaggcaggagaatcgctcgaacccaggaggcggaggttgcagtgagccgagatcatgcaattacactccagcctgggcaacaacagtgaaactccatctcaaaaataataataataataaggaaaagccccagggagatttactgctcagagaagtctgactacattggtccagctgaggtatggtggtggcccaggtagaaggcttctgtatactggatgtttaacaaaaagttgtgtattttttaagactagtcaagtacagtagtgagaaagggggaaaaagtagaacaaggagttcaatctgtaactctgtaactgtaaacaatcaatcgagttagcgtactacctttggactagccaataaaaggtaattttgaggaaggaatctttgacctaggatattagcttacagcaaatttttactgagttaactttttttttttaaaatggagtcttgctctgtcacccaggctggagtgcagtggcacgatcttggctcactgcaacctccacttcccaggttcaagcaattcccctgcctcagcctcccaagtagctgggattacaggtgcacaccaccatgcccagctaacttttttgtatttttggtagagacagggtttcaccatgttggccagctggtttcgaacttctgaccttaagtgatctgcccatctcgtcctcccaaagtgctaggattataggcatgaaccaccaccccggcccgagttaatttttaaattgaaatggatatagatgataaatgaattcattttacccatcacaaaatcaacccattgccaaatagttacacaacagctattatagaccaagtgtgttgttaggagctacaagaaaataagagatgagccaaagaaaatgcctactttggggaaacatataccttatatatacagaagactaatagacatgatcagttcatcaacaatgtcttatggatgatacactgtcgttggtctagcactcaagagtaaggcaagcttactgtggggtcaggcagcttctcacacctctgtgaccacctccagcccctactctcagtgctccctaactctagagcccactttcttcccttctctgcccactgaagtctattcatccttcaaaatctggagcaaatagtaatcgtctgtgttgttttcctaccaacccattgtcagaattggcacctctttctttgtgctcttattgcaatttgtacataagacatacttctgtcttagcatcttacacagaatcttgtaattatagattttcacgtctcacttccctaccagactgattgctgctctagagaaagcgtcatgccttattcttcctttgcaatcccaatacacaaacttgggcttagcaatatagaaaccacggagtgtttgatgcctgagctcatcagagaatgaatcacagatctgagttgatagaatgttatagggcatttcgtttcaccctctatataatgtgttaatctgcttataatacctccaaatatttgtcatctagatgctgcttgaataaagccaattttagagcttgaaatgctggaaggtgctataagcaaaaatgtgccttttcagttccaccgctggccataattctaatctttctctccatgttgatccttcaaatgtttaaaggcaaatgtttacattactgagtcaggtgcttagattaagagacaacttagatcctcttttgcaaagtgagcccagggcagttcagtcccctgctcaaggtctccacagctagctcacagcagatccaggtctccagctgtacttccctctgctccaggcacttggagtaggtagttccttcttactaaaccagccaggtgctttcagtcagcagtgggtacctgaaactacattctagtcaaggaaatatataacactggtcctttctacactaggagcccattccttctgtctgggacacccttctggacaccctggcaggataaacactactagcctttctccaggcccccctctactggcctcctctctagtttcaggggagataggaaaattgcctcaccctctttctcatcccagctcatggaaatggctcctcaccctcccctaacacaaagaacctgctttctttcctgctgtcctgctgtgggcactaatgtcatgctatggtcagacctgctgtctttatagagccagcatgcttctgtgcacaactgccaatatcatatgtatatatgcaatactctttcctttttcctggaattgtttttctcataaaagtggatattctttatcaaatggctactatgtcatacaaaaatgagtagcatttggccgggcacagtggctcacgcctgtaatcccagcactttgggaggctgaggcaggctgatcacgaggttaggagatcaagaccatcctggctaacatggtgaaaccccgtctctactaaaaatacaaaaaattagccaggcatggtggcgggcgcctgtagtcccagctattcaggaggctgaggcaggagaatggtgtgaacctaggaggcagagcttgcagtgagccgagatctcaccactgcactccagcctgggcaacagtgcaagactccatctcaaaaaaaaaaaaaaaaaaaaaagagtagcattctatcccatcttgcgagtgagtaaactgaggctcaaaaggggtaagtcattttcctatatcaccaagttgactcatgatagaataggattctgaaacacatgtgtctacccccaatacccatacttcacaactgcctctctaaatgtggggtcaccttactcctgttgggcccagagaggggaaaattatacaaggtttttgattttatagtgtccttcagggcctaaaacatgaattcccctagaaggaatctactggttcttccccagtaaattatatccagttgctatgggaagcaaccagccctgcaacacttttacatgttgcttgaaaaaagaggacctttttatttcattaaaaaaaattgagcattttagtctctacagttaagactaaaatattgaatattttagtctctacagttgagctgcttctctcaggttcctaatccaaaacaaaaaaagatgcatatccagctttgagaagagaattcacctgtgaaataaaaaatagcaaatttttagaaaaattatgtctttgggggcactgcacttaacaaacttagggagataaaactgtcacaaaaatatattgggggaaaagctaacatcacataatttagtgacaaatgtgtgtgctactgaccagaaatgctataggaattaaaagaacagaggctcattgatgtgaaaggcagataccaattcttggaaatgcttttaaagtttcaataacttacagctactgagcacttactatgtgccaggagctattctgagacgccttacattattaactcacttgattctcacagaacacttcaaggaagctactattgttttctttatatttgtgatgcacagaagggttaatctgtccaagattacactgtcgtaactgatagagccgcgctttatctcaggcagcctggatccagagcctggttgcttaatcaatgcactctgttgcctctcggtgttcttacacatgtgtgttattaacacatggcctggtgccagaagattctctggcccatcccagtggtgactgtgccatgtgccctggaggtgaatcagtatccaattgagaagggagggatggctttgcatgcctacctttctaccacaaaccctccctggcagccaccctctctctctcccactggtgaccatcactggtgacctgtgaaagggacacaccaacagcacagctggggccctggcattgtgccaggggcaggatcacacagggcagtgccgcggtagcacccgtggtgccacaggtgtggtggctcctggtcccaactccaccccaccagctgctgtgtggtgttgtgtcaggtcaccacaccaatcggagcttcagttttgtatgtgataaagagattgtgtctgacaaggtgaccttttcctagtctgctgatctatgcagttctagggccacagaatggagactagaggcagcagctcagtctgaagtgcaagactttatccagtaaaaggtccaattccagcagctctgccagaagctacagccttgacaactgtacgaacatttggcactggtgctgcatgaggggcgggaacataccaagcacagggttaaccagtgacctgaacattttccttctcacattcacacaccagagacccgctacagaagattcaaactgagcaaatcgcctaatcttccaaattctttttcctggcttgttagagcagccaagggtggggtggagcttgtgaataaaaagcctgcttcatcttcctcatgcaggagaacatggccaagcgagttgccattgtgggagctggggtcagcggcctggcctccatcaagtgctgtctggaagaaggactggagcccacctgctttgagaggagcgatgaccttggggggctgtggagattcaccgtaagtggggtttcaacaactttatctgtctattggagaatggcttggcagctgggaaattatatctgtgcttctttcacaagggttggtggccttgaggaaggttagaaatgtctgctgaacaggggaccatgaggagccactgaaattgtaaaagaaacaggacatgggtgagctagggtggaagtcagaacagacttgtacactttatctagagccaaggggaagaagtgtttccaaagatgcccaagaagtatggaagagaatggagtaactgggccaggccaggaaagcctaggagcaaaggagcaggaccagggcgtctgaagcagggccagagacggcagtgttaggagcaagagcaagaatttcagcctctgcctgcaagactgagctgcttttacctgcttcttttcccagcctggctccgtctgcattacagactcagggctctgtgtaggatgagctccataatcaaggtcctgctgacctggcaatcccagtgcaggccaagaaca

SEQ ID NO: 4370 - DNA, 6000 bp, Homo sapiens
caaccacctaattttattatgctttttacaggtaggggggtggatgttggtttggattgtcctgattttctccgttatggtgtggctcaagtaaaaattcccataaaggtgtctgggcgcagtggttcactcctgtaatcccagcactttgagaggccgaggtgggtggatcgcctgtggtcaggaattcgagaccagcctggccaacatggtgaaacgctatctctactaaaaatacaaaaattagttgggcatggtggtgggtgcctgttaccccagctacataggaggctgaggcaggagaattgcttgaacttgggaggtggaggttgtaatgagccaagatcactccaccctgggccacagaggaagactccgtctcaaaaaaacaaaaattcccataaaaaaaatagatgtttctcacatgttgagcatatatggatttcatttttaatatgattgtagaaacattagatttaaagcatattgaaaaagaaaacagtatattctttaggagcttcaaaaaagggttttggtttagttcaaagggtgaaagaagatcttttattattttggtaaataacttctaaggaaacaaaccaccctcacatgcactatctcatttgtatttctgtcaattctgaaaggccagcatttggccagtattatttgaatctgtattgtattttttaaccagaagaatgaaggtttatagcttcattcttttggaagaggaggctggagaccacaggttaaatgcaggtgcatcgctcttggccggccctggcagggtcctttctccctccttttacactcgcagacaagcttgtggatgctcaataaggacagctgccgtttggacagagattaatcatttatttgtgaaggttttttctgccttgctttcttgttcttttttaaatcttcacattgttttgatcccaaaatgtttgtgttgtccttactcaaaactaggaaaaacaattatgtggtaagaggctcagagccacttacttaaatctcaactagatttatttgtgagaacatctgttttctgatatttagacacttcctcttccattgctgtttcctatgactcatgcacagttatttgttcaggtttcatggaatttcccaagtgtatttacctttgtttggtttttaaaatgtaaattatattgccccaataaatgagtatgtgtgtcagggggactgtggctgggtcattgcatgtggagggggagtttacagaagagaactcctagaagagctttacttaactatgaaaattttcaaagaataggacatttctaataagtccctaagagtgtcctgaaggacatgttttggttctgaaacatagtttctataatcatccttaaaaaataacttgtttctgcttaataggctttactatgaatatacctccatatattattgagttagaatgtgagaaaaggagattaatttttgaagtacaaatatagtgagttagtgagtgtaggcatcctgactgcctagtcataactttgatgaagtagaaataccaacatcctcaatatgaagatatgcagcagccccaccaaaaaaaaaaaaaaaaaaaagcaatgagaggtttcaatttcctaagttagaaaagggaagaaaatctggaaattagatttgttgggtcattgggaaaaaagatttaaagaagatgaaaacatacagtcaagactctttgcctcatttttcccttacaggcttcacaggctgctcaagaagccgagatcaatgccagaaaagccaaaaactctgttactagcctcctcagcattattaatgacctcttggagcagctgggtacgtagccatagagtcatttttgtcagtctctgaatcttttgtactgttcttaggatctgatatagtacagttgactcaaaagcagatgatataggtttacatgaatcccttttaagtcattaattaaattattaatatttccttttgctgttgcttatttttgaaagccttataaaataaatgtttgtcttgcatgacagggtctttaagagcaacttgcttctttaccatacttattatttgtcagctttacagtgtgacctgaatcatgactttaggctgtgttaatgtgacaagtacttactaggtgccttctgtggaccttgccctaagtagaacactgtggtctgaggagtttctttttatattttgaagatatattgccagctagggtagcatttatggtccagtatcattgtacaactaaacagtgatttttcttaactcatcttgctggcagtatctttaagggatttaaagtaaaggatttcaatagtagaataaaagaatagtagaatcacaggctgggtgtgatggctcacactggtaatcccagtactttaagaagccatgcaaggaggatagcttgaggccaggagtttgagaccagcctaggcaacatagcgagatctcacctcgtctcttcaaattattttaaaaattagctgggtgtggtgctacacgcctgtagtcctagctacccgggagactgaagcaggtgcatcacttgagtttgaggtgatagtgagctgttatcgtgccactgcactccaccctgggcaacagagcgaaaccctgtctcaatttaaaaaacgaaaaagaacacttaaaactggtcatgactttactgcctggaattctcttcatttgctaagtaaggacagtccgatgaggggaaagctttcatgccaaaagagagaaaaaccttgatttttcaaggaaatctatgcatacggaaaccttcttttaatccagtttgatagggtgttagggagcaggcttcattttaggacagatgcacttttgtcaccagactccattataaagtgtcaacactctagccaggactctttgtagcaaggcattatattttaatttgccagcctttaaagactggtgcattttgttttggtggggggctacaggggtattttttatcggtctcaaatgtcaagaataagttatgtgccaacagatggatataaaatgaaagtaagctagaagagaaagctttttgtggaacagccagacttttaacattagtctgacttgggttagtatctttgctttgttgcctataggctgtgcaaacttgggcaaattatttaacatctgagaatcactgatgtaaaatggtcttgtgagactttaatcaagtcaagtatgcatgaaatgctgtctattgtgtctgcttttgtttgttatggaaacatctcatttctttcaaaagaacctctttttcttgctaagcttaaagtgaagacttgctgaaattatttcagcattttactcctggccattttccataggaaggctcctaatagtgtctaactcctgaaagcagaaagtgaccttcaaaactgacccatcttccctggaatctctctaagagctgagggattagggttcttagagatttgtgtatctttgatggcactaaaatgacatagagtttacatgtatacacctggaaaaggtattaaatgttatcagatggccctcaaaggtctagaacatggtagctgtgcattgaggaaacattctgcaaaaaccattgtctcagaaagaaacatccagctctatattaattgtatgctcagacccatccctgctgggttaggtcagcatttgtacttggtttgcatattttataccattgtgtgacatcaacaatctgcaagtcacatttgccgggctgcctgtgcagaatggcagctgctgggcctagagtctagtgcaggtacttgtgaagggatcattcttactgaatatgtctgttctcttctatgtactttctgaccctccagggcagctggatacagtggacctgaataagctaaacgagattgaaggcaccctaaacaaagccaaagatgaaatgaaggtcagcgatcttgataggaaagtgtctgacctggagaatgaagccaagaagcaggaggctgccatcatggactataaccgagatatcgaggagatcatgaaggacattcgcaatctggaggacatcaggaagaccttaccatctggctgcttcaacaccccgtccattgaaaagccctagtgtctttagggctggaaggcagcatccctctgacaggggggcagttgtgaggccacagagtgccttgacacaaagattacatttttcagacccccactcctctgctgctgtccatgactgtccttttgaaccaggaaaagtcacagagtttaaagagaagcaaattaaacatcctgaatcgggaacaaagggttttatctaataaagtgtctcttccattcacgttgctaccttacccacactttcccttctgatttgcgtgaggacgtggcatcctacgttactgtacagtggcataagcacatcgtgtgagcccatgtatgctggggtagagcaagtagccctcccctgtctcatcgataccagcagaacctcctcagtctcagtactcttgtttctatgaaggaaaagtttggctactaacagtagcattgtgatggccagtatatccagtccatggataaagaaaatgcatctgcatctcctacccctcttccttctaagcaaaaggaaataaacatcctgtgccaaaggtattggtcatttagaatgtcggtagccatccatcagtgcttttagttattatgagtgtaggacactgagccatccgtgggtcaggatgcaattatttataaaagtctccaggtgaacatggctgaagatttttctagtatattaataattgactaggaagatgaactttttttcagatctttgggcagctgataatttaaatctggatgggcagcttgcactcaccaatagaccaaaagacatcttttgatattcttataaatggaacttacacagaagaaatagggatatgataaccactaaaattttgttttcaaaatcaaactaattcttacagcttttttattagttagtcttggaactagtgttaagtatctggcagagaacagttaatccctaaggtcttgacaaaacagaagaaaaacaagcctcctcgtcctagtcttttctagcaaagggataaaacttagatggcagcttgtactgtcagaatcccgtgtatccatttgttcttctgttggagagatgagacatttgacccttagctccagttttcttctgatgtttccatcttccagaatccctcaaaaaacattgtttgccaaatcctggtggcaaatacttgcactcagtatttcacacagctgccaacgctatcgagttcctgcactttgtgatttaaatccactctaaaccttccctctaagtgtagagggaagacccttacgtggagtttcctagtgggcttctcaacttttgatcctcagctctgtggttttaagaccacagtgtgacagttccctgccacacacccccttcctcctaccaacccacctttgagattcatatatagcctttaacactatgcaactttgtactttgcgtagcaggggcggggtggggggaaagaaactattatctgacacactggtgctattaattatttcaaatttatatttttgtgtgaatgttttgtgttttgtttatcatgattatagaataaggaatttatgtaaatatacttagtcctatttctagaatgacactctgttcactttgctcaatttttcctcttcactggcacaatgtatctgaatacctccttccctcccttctagaattctttggattgtactccaaagaattgtgccttgtgtttgcagcatctccattctctaaaattaatataattgctttcctccacacccagccactgtaaagaggtaacttgggtcctcttccattgcagtcctgatgatcctaacctgcagcacggtggttttacaatgttccagagcaggaacgccaggttgacaagctatggtaggattaggaaa

SEQ ID NO: 4371 - DNA, 6000 bp, Homo sapiens
tgctgccaaacgagccatgaactgggctggatttttatatttgatgaaaaagagcctaaacgctatctgatttgggataaagaaaaaggagcattaaccttgactatgcctttagctccagccacctttttaagggtaaattgctgggcaggagggggagggctagtcacggaatgaaactgtaagccggaccaggtgtgaggaggggaggtgataaaaagattatagggtggaggagcagaggctgaggaagaattgggacctagctcggcctggagaggagcagcctggggaggaagggagaggtcagatgggtctgtagaaaaggaagattagaaagactcagcgacgcttggggttggtactgaggggacaggtgggagggaaagaaggaagatttgggacgagttgcactggtcacagagactaggaagggactgatgtgtaaaagaatgcctggacgtcaggcacctcagaccatttgcccattttatgacatttgcccatttccatcttgtaggatggaaaaattttaagtgccattttccggctatttggaactactgtcgagtttgtattggggtcaagcggcattgcagaagaaaataagatgcttagattttaggtcaggtgagagttgaagaagttttaagttcctaagaatataggctaaggtagaagaaggaggaatggaaggtggaagcttgcccatagtgaaggaggcaagcctagagaaaaagagtagagacacggagaaggggtaggggtttcttgccctccagaaaagcagagaaaggattgggacacggaaataaggaattggggcacagagataagaggttggggtgcagaaataagggattggggcacagagataagaggttggggtgcagaaataagggattggggcacagggataagaggtcagggtgtggaaataagggattggggggtttttgccccctagaaaagcgggacttgccactaagggtgaaggagaaggggttgaggggtacttgcccctcccccagaaaagcgggacttgccactaagggtgaaggagaaggggttgaggggtactgaggggtacttgcccctccccccagaaaagcagagaagggatagagacaaggagagaaggggttgggatacttgccatttccccagaaaagcagagaaggggtagagagaaggggttggggtacttgacccttccccagaaaagcaagacttgctgctaagggtgaaggaccaaggcaggcgtccctgcatggtctgacacccttgaaacgtgggtgaatgatcagagaggcgtccctgcaatgattaaacaccaggggaagtctgccttcccagtccatgaccggcaccggagttttgggtccacggataaaacgtgtctcctttgtctctaccagaaaataccagaaaatgaaaggaattgaaattaagagaagggagagattgaagtgtggcgccaagattgaaaggagaaagaggttgaaggatagggaggttggagaagagagtaaaaagaggccacttactggatttgaaattggtgagatgtttcttgggctggtcggtctgaggacctgaggtagtaggtggatctttctcacggagcaaagagcaggaggacaggggattgaactcccaagggaggtcccccgatccgagtcacggcaccaaatttcatgcgcatccgtgtgaagagaccaccaaacaggctttgtgtgagcaacatggctgtttatttcacctgggtgcaggtgggctgagtccgaaaagagagtcagcaaagggagataggggtggggccgttttataggatttgggtaggtaaaggaaaattacagtcaaaggggggttgttctctggtgggcaggagtgggggtcgcaaggtgctcagtgggggtgctttttgagccaggatgagccaggaaaaggactttcacaaggtaatgtcatcacttaaggcaaggaccggccatttacacttcttttgtggtggaatgtcatcagttaaggtggggcagggcatattcacttcttttttgattcttcagttacttcaggccatctgggagtatataagtgcaagtcacaggggatgcgatggcttggcttgggctcagaggcctgacaacccataatgaaaaatatatttgtgaacataataacagttcctattatgttttcagaaatataaattaatttggtggtttggttgaatgtgggttttaactgtctccatattagagtacttaggtttcgttgtgagaactcaagtaagaaaaaaacttaacagtaaatattaatcaatggagtatctttcttctcctgagtactgtcaattccttattgcataaacgtatcactaggaacactgagagaagcttgagaattttccaccacagagatcaataggcagctgtgagatgcttttttccaaaaggtaaggcctttttaaacaacaatcaacaattgttgatcctctagattccttttgaccacaaatccttttagagggaaaataaaaacatctaaaaatgtatgaccccacttaaaaaaatactgacagctatggagataaaaatccttgggttgctgatttgttaattgcttcttggggtaatgaaagagccctagactggcagtcagggcacttaggatctcttttcagtaatcataccttacttctctctctctactctcttttccccagaccacacctaacaatatatcaattttttaaaaatggaatttcttatgccctctttatttatggacatgtatgtccataatgggagacgttttctttggactgatgcttgaatcagtgggtgcttggcattgctgatagggatcagtgtaaatgagctattgtaaaatttagagttcagtggaactatcccccaggtaatagtatttttagattaaggtcccttcccctttttctgtgcatggttaggtcaatatttctctgtctctcatatcactcctttcctcctcatagccactgacaccatgctcatccaactcaaactaagctattagaatcctctttttatggacttactttcttttagaatggggactttcttcccccattccaatccatcttccactgggcaaccgagtgaattttccctaaatattgttttaactgttcattcattgaaaacctttttgtgcttttctaattaccccagaataaaatttacactcctctgtccacaaactaactcctacacaattcttttaacatttaatcctgaattgtatcctcataaagcaatgcatagagaaaaaaaagaaataaaaatttttcctttcaatatgtgagtactatgtatcttcaaagaataaggtagccatacatcttttctttatgcatgtttccttaaatgggtaactgaatatttgaacttgctattgatattaagcctctatgtgtaactaattctgaattataggtagacaagttgtcagattaattctttcatatcataaaatattattgatgctgctaattttatagtcatactactgttaggcaggtaattttgggtatctatgggttttgaattttctcagtaatgaatttctcaaaagaatggataggtgttgctcttgtcctgtctttggctgccagagctgaacttttgatggccacggaacattttctctgtcagcctctatgtccattacaccttcaaaggtgtgctgtttcctactgcttgaccctagcccttctttcattacttttcatccttccgtgatttgtcccaactccagtttacattacttgagtcatagaggtatcctcactgcctccaaatgttatcattcttattctagttctattatccctatctaaattctacctataatgtgaagcatctcataaaccactgcctttctgatattggtctctttgttcggttatcctctagaacttatttttgccacaaaattttgcacttaatcacgtgtttagtcattattaatcatattatatatacactgtgagatacttattgtctattagagatacaggaaaagtcaaagtgtatctttcccattccatataccgaacttcacttctgacatcagatatgtgggatttttttttccctcatacaccaagcagttctccagcagacaccagccaggtgatcctccaattcatttctgaaactatctagatcccacagattgaaggctccgtcctgcaagatggtccacccacttctgatgccaattgcaaactgtaggttgtgatctgtgcttctgactggctataaatcagggttcctacaaccccctcctggagtttgattaatttgctagagtggctcacagaacccagggacacactttacttttactcatttattataaaggatattacaaagaatacagatgaacagccatagggtgaggtatggtagaagtggcacagagcttcacaccatcctccaggaacctctatgtgttcagctattctctgcatgtttagctatttcagaagctctctgaaccctggctttttttttggttttggtttttatggagatgtccttctgtagacatgattgattacatcacgggccatcagtgatcatcgctgccttcatctcctctcccttccctggattttgagggtggggttggaagttccatcctgccttgatctttctggtgaattagccccatcctgaagccctctggggacccccagtcaccaatcatcttattagcatgcaaaagaaacttttatcactactgagattccaaggattttagtagctgtatgtcaggaaatgggacaaagacaaaatatatatttcacgatatcacattgtcattttttaaacccatagtgccttgcacagagggaaaaacataattgcacccaatagatgtataattccttaattgctgaataaacctcagtgtaacaataacactgtagggaagtctgggtcattacccttatctatcatgtttccatgttaacttcaatgggttatttgaatcacatcagcagttagaaatgtcattatgtaagtactttcttgtccagttccagcacaagccagcatattactgcttgcatttaaaatcatattttagaacaaaatctggtaattatctcatgaaaaattcatagttgttatttttaaagtattgtttatattaattcaccccaatttagaaacaaaatgtgagtgagttttgcaaaattttacaaaataggctaaagcaatttgtcactgttgagttgatacagtggctgcttaattttcaaatgcttatactgcttctgagtaaaggttacataagtgtgggagagaaggggacgtttttatatatatagtaggagttaaaggttttgtttaagattgttttcctgtttatctgacaacagaaatagttttctgttgattccactagttgttcccttatgaggaggatttttgaggctggagatcaacccaggagtccttgttcaatctgagcatattcagtgtgtagctgacatctcctgcataatcacatgttgtgacatggaaatcaaagtgccagacaaagcctccttttctccttgatgtttttctgtatgaacattagaagtaataatttgtcttctatggtatcaggaaagggtggatgtctgtcattaattaggccacgtcaccagagagaatattgcaacaaaaaaggaaatatttctcaagatggttgatgaagtcagtatttaatgatgagaattacttcactaagtatgaaaataatattataaccacatgctcattatattataactctttttaacatgtgccacgtgacatggtaagtagcatgctttttccattagtaaaacagaggaaaaaaatctaattttatctattttattgaaatttctagtaaattttaagtatctagaaatatttcagatttcagaagaattaaataagatataacaaatat

SEQ ID NO: 4372 - DNA, 6000 bp, Homo sapiens
acccctgatacttccagagtataagatacttgacctctgatacttccagagtatctcttcacagtagtcacagcagggaccaagccttgttttctgtttaatcgtaagtgcaaaactctcaggaaaggatgtaattggctcagcttgggtcaggtggggttaggactgctaataaaatgtcagtttcaattgttgttttttgttttgttttgttttgttttgagatggagtctcactctgtcacccaagctggagtacagtggcacgatctcagctcactgcaacctcagcctctggggttcaagtgattctcgggcctcagcctcctgagtacctggaattacaggcatgcccagtgatttttttttgtatttttatttatgtatttatttactgatacagagtctcactctgtcacccaggctggagtacagtggtgcaatctcagctcactgcaacctccatcacctggtttcaagcgattctcctgcctcagtctcccgagtagctgggactacaggcgcgcaccaccgtgccagctaagttttgtatttttggtagagacggggtttcaccatgttgcccaggctggtcttgaactcctgacctcaagtgatccaaccacctcggcctctcaaagtgctgggattacaggcatgagccaccatgcctggcccagtttccatcttaacagtgagaagaaaggacgtcccaaagaactgggttcgggcatggggaaaatggctgctgttctagccaaggcaaaatggtagatattcacaacagggagtcatgcagtctgcattcgggggaggtacaggaaatggtgaggaagatttggaaaactcaaggtggagtcatcaagaggcagaggaacacattctgttaaacacctaagtgagagacagtgctgactgcattttcctcaagtgagagatggggtagggacagggtccacagtgatgtaagccctgtagagactgacctgctatggggagttcaggaggctgaggagagccaggctagatctaaagaacaggaacctgtaaagtcaagagtacagcagggagaagagggaaacaggactgctcagagctgagcagaacaggcagactatgaacttctgatgccagaggcagtgtcctccttcttgccccaggggggccaactccattttcccacatctagtggttatttttatggatagatttatttttacccgttctagacctcaaacctgccgctgcaagaagcgaagcactgaggcttctagctttccagaaaacacaggcctcagtggtcagctcagtgacagagatcaggctatggtcccctcggctcctctggggtcacattgacccaccccccgacatccctccctcctgtctgcagcagagctggggtgggaatggagtgggagggggattccttttttctcatcccacaaccccacagccggtcaaggggaggatctacagccaccctggaagtcataaacctggcctgcccctgaatcctagccagccagatgtgggacagccatcagagcctcttttgacagcacctccctggcagagcctgtctccctggaatccagggagcttgaggggaagatcttacctttccaataataaccagctatgaaagggtatcatttcccagtccccacaaaacaggcagccaaagcagacttcttctttattgggaccatacatctggcctaaattgtcattcccccaagacaagtttactgaacagttaggcaatgcctccacacacagccactgcagacgagcttaaaatatactttaatacatttaaacagtcatttcagagactggctttcttatgataaagatgcaactgacactcattggtgctaaaatgtcatgttgttgccatccagcagggagcctgacaagccattaaatctgcagctctgttaagctgattcatttcttttcctttctttctcatgtcttccccaacaattgatttgggctcctgaagctgatattttgctagggtctaccaaaatctaacaagggtgctgtgcattgtagggtgtgcccgtagtcccagtttctaggaaggctgaggcgagaggatcacttgaggtcaggagtttaaaagcaacttgggcaacacagggagacccataatgaaaaaaaagaaggaaggaagaaggaaggaaggaaggaaagggaggagggaagggagggaggaaggaagagaggaaggaaggacggaaaaaaggaagagaaaaagaaagaaagagaaagaaagagagaaagaaagaaagaaagaaggaaggaaggaaggaaggaaggaaagaaagaaagaaagaaagaaagaaagaaagaaagaaagaaagaaagaaagaaagaaagaaagagggagggaggaaggaaggaaggtagagggagggaaggaaggaagggagatggaaggaaggaaggggaaagaaagggagaaaggaagggaagggaagggaaggggagggaaaaggagggaaggggagggaaaaaggagggaagggaagagggagggaagggaagagggagggaatggaagagggagggaagagggagggaggaaggaaggaatctaacaaggtactaactgttcttgaaatgccctgggaaggtgggagtgactagaggagttgcaagaggctgaaatgagaacaaaggtcacctttagtgtcctgtaagtgccttgagtgtcagacagtcaatcactagacaaaaaagaccaaacaatccatagttcccatagagggtgaccctaaaatctccccttacccctgcaactttcttcggctgctggcagggagaggcacaagcacaggcaggggcttattttttttctcttgtttttaatttttttgtagagatggggtgggtcttgctatgttgcccaggctggtcttgaaatctggccccaagtgatcctccctcctcagcctcccaaagtactggaattacacggatgagccactgtgcctagccagggcttattttggattttgttttcagatgacagcaggcaatctccagcctcacattgatgaactctgagttctgagcccagcccaaccagtctaaaaacattactggccgggtgcgggggctcacgcctgtaatcccagcactttgggaggccgaggcgggcagatcatgaggtcaggagatcgagaccattctggctaacatggtgaaaccccgtctctactaaaaatacaaaaacaaaattagccgggcgtggtggcaggggcctgtagtcccagctactcgggaggctgaggcaggagaatggcgtgaaccccggaggcggagcttgcagtgagccgagatcacgccactgcactccagcctgggcaacagagcaagactccgtctcaaaaaaaaaaaaaaaaaccataaagaaaaaagaaatagcagggtaagaaaatgaagaggaaaaagaggacccaaatgagagaacattgggaagggtgctagttggacacgggggaaactggaccccgtttcacaaccctgtttctccatgcacatgtggctctgcttcttgggggcagagatgacagcaaagaaggacagggggtggtgtgagctgttgggttagaatgataggatcaaagaggccttttcccaaccctctgtttaaaaggttgggaagtagtggccagtcaccttcttcacagcatagctcatagctataacctgtgagacatatgtcaatgtgccttccataagcatataaacatgagtgtgtttgctgaggtaggtgtgggaatctgtcagtcaatgaagatatgttgtgtgaaccagctgatggtgcatgtttgtgcttgaaagccataaagttctatgcaaaatctatgggtggcactgttgcacaatgctagtgggtgtgtgggtatgggggtgtgattaactgtttacaggctgtgtataagtgtgcatggatgtctgagtgtgtgcaaattaaaacggaaatatgtgccggagtatgatacaaagtacaggaaagtactcgggctttggagtctgtctgacttggtcttgaatcgttggctctgtcattagccggatgtataaccttgggccagacactcaatcttcaattccctcaactaggaaatgaggttaataataagtacctttcaagattaaatgaggactagaaacgataccatatagacaaagcttttggtgtcatagcccacgcatagcaggactcaaaagtaagcagctattttcatgcactgtcagtatacctctggtgggtacagggacaagagggaacaaaatgtgacctgtatataaggtgtaggggaggacgggtgtgtgtgtgtgtgtgtgtgtgtgtgtgtgtgtgtgtgtgtgtgtgtttacaaaacaatttattctccttctccaaggaaccccctattcagacaggagcaggaaggtaggaggggacatacaagtgtccacagacacctcgggtttctgggtcctggatctaagtgagtaaggggttgagaggcccgtaggagctgcaggaagccagccgcctgcccaagcttccttttttttcccctccgcccagcaaccgttgaataccgccacccacatccactccccacctccaccctcacccctcctccacccctactcagctttctattcaacaagtgagagcaagggcggggaagaaagccgacaggggagaggattgcttccctttcttttcccattcccccttaagacgaaccaggaagtaaccgcaagaatcgggccaccttaacagtagagtaatggtttggcctcgcgccaagtcccacctctgttccagctcctgctcctcccctctctcttcccgcactgcttggggagagctggtgagcaagagtctggcccgagttagctagagctgttgccatgacaagcattttcttaagaaagctctgctgttgagatcgtccaaagctgggggctgggagggggggcacgaacttcgtggggcaccatccctccgaagagagcaagatcagagacacccgcccagctctcctgcaccctttttctttcaggaacctgagaggtccttcccattggaggggcagggggaggagacccagcccactccccggccttagccagaaaggcaagagagcaaagccagcgtctctagcttggttgccacactggggagactggtgggtggtcaccccaccctaccctcatccatggaaacccggagggagagtcccgcctgaagaaacctggatctttgctagaaagagaggtaggcttgcagagaatgaattgacttgtgatttgcaaactttgtttctttcttttctctcaatggcttctaaaactccccgattttcctctttctagaatatttcatgcgactgggtttggaggattttttttaaaatatgtgtgtgtgcacagatttgtcaaatactgttttacctattatcagttctgagaaaccatatagtcgaacaagtgatttatctctcttttcctagttcttgtcattcctgggctatggggtagggtaatggagggttctctttttgacaccaaaattgagctcttggaaaaaatatttatctcccctccctcaacccattccgttcctgccctccccttccccccttggcttgggaatgagacgcaggatggaaaactgttgcaaaaatattttccgtgtctgttccctttctcgaaagcccaaaagagagatggaaaaaaaaaaaaaaaaggaaccaaagaaatcttcagcagaaagaggggctgcagcgggaactaggagaggggcactttggggccatggggtggaggtgggctgggagaagttggcaggagtggggaaggagagtgcacgaattaaatttctttagctttgcagagaaacctcagcagtttctctgtgctgcttgcaaaacatcctcagactttcacatgtataattagctgtggaaaaagctgggagtta

SEQ ID NO: 4373 - DNA, 6000 bp, Homo sapiens
ggttgccttgggggagcaggggtcctgctaacccagcataacttctattcttaaggtagtacccagagcagaggttcccaaaacatgaaacacagatgagctccatcaaaatcacctgaaagctccatcaaattcacctggaaagcatcgatagccaaagcctgccccctctgcagcctccacccactgaatcagaagagggtcccggagatctgcatttcactctaaaaggcaacctccagtgctccttagacttgcttagaaaatactgtaaatctgaagacttatacaactctaagtgtctcagaaactcagggtgaagaatcacaagttctctactaccctgccccatttttaatcacactcatcacagaccacagagcacctggcaaacccaggaacggtgggttgaagatatgttttcttctagcagattaagagctgagcagagtttcctgtgccctgtgcttcattagcacattggtggtgtcgtttccggtgactgactctctgtttccattctggcaaagtggtttgctcttttcactctgctttgggtgttgaaggaagacgagcttctcacggagcctctcttgagcctcttggcagtttccccctctgtgcccctcacgtttccaccagaaacgtgaaggcagaggccacagattctccctgagccacctcacttggaagcaccatgtccggatgagatcgcacttcctgcagtgggcattagccacgtccaggtagaaccaaacctgttgcttttgtatgttgggtcaacttggcctgacgtttcagaggtagacacgagatagggagtttgttgcgggggtggggagaagtggtagacatgctggctaactgattatgattaagagaaacttagaagctgaagccagagagcatctcaaaggttcctgatacaatggatggtgtcactccaaccctttcgacaatcagagggaggaccttggagtccagcactctgcatgtgactccccgcagcctggacaggtgagtgactcagggtggtgagctccaccctgccctgatttaggcagaaggtcctagtccacccttaggagcttcttacacagcagtgctgccacctctcaacacccaggctcggtctactaaaccaccaaactctaggcttggaggcatttgctcaggggtgctagggggaaaggaaggtattgaggaaagaaagaaaatattgtggtagaggaaaaactgtgataacactggcccttaaagctagttgcttagactggttggatttctcacctctcggaggccctgaaccctatcatcagtctttcctaggtgtcaccatgacagaaacaaaaggctgagttttccaaggatgtgttttgagatccaaaaacttgtcatgaataaaaaatgtagtgatagatgtaataaagatacgtccttaggacgtaaaatcttacagaactaatcatgggtatgaattactgctactactttcaatctcatacaaacaaaattaaaaatccatccacagttgaaactttaaaaacattggcagctgactgggcgcggtggctcacacctgtaaccccagcactttgggaggccgagtggggcggatcacccccactcttgaaccagcctggccaagaccagcctggccaacatggtgaaaccccgtttctactaaaaatacaaaaattagccgggagtggtagcatgctcctgtagtcccagctactcaggaggctgaggcaggagaatcacttgaacccgggaaacagaggttgcagtgtcatgtcattgtactccagcctgggcaacaaaagcgaaactctgtctcaaaaaataaaataaaattgcagtcgtttggggaaataaatgttattatcatggcaaacacatgtcacttgctggtagatatgagcatcaatgagcaatgaatcagaagcctgaagcatctctccaaaactatttcttcatttatttttatttatttctaattggcaaatcaaaattatatatatttatcatgatagcctgttgttttgaaatatgtatacattgtacaatagctacattaaactaattaagatacacattacttcacaattttcttttgtggtgagaatacttaaaatttctcagcaattttcaagaatatgacacatttttattaactatagtcatcaacactttttttgttttgttttgtttgttttttttatttttatttttttagacagagtctcgctctgtcgcccaggctggagtgcagtggcgtgatctcggctcactgcagcctccacctcccaggttcaagctattctcctgcttcagcctcctgagtagctgggattgcaggcatgtgccaccacccgcggctaacttttttttgtatttttagtagagatggggtttcttcatgttggtcaggctggtctcgaactccctaccttaggtgatccgcccacctctgtctcccaaagtgctgggattacaggcatgagccaccgggtctggaccatcaacacatttttattaactataggcatcatgttatacaacagatcccttgaatttttctttctctctaactgatattttgtaccctttgaccaacatctctgcaacccctccctggtaaccaccattctactctccacttctttttttttttttttttttttgagacaaagtttcactcttgttgcccaggctggagtgcaaggttgcaatctagggtcactgcaacctccacctcccaggttcaagcgattctcctgcctcagcctccccagtaaatgggattacaggcatgagccaccatgcctggctaattttgtatttttagtagagttgggggtttctccatgttggtcaggctggtctcgaactccttacctcaggtgatccgcccacctccgcctcccaaagtgctgggattacagacatgagccaccatgccccgccttggtagttctatttttaatttttgaagaacctccatagtgttttccataatggctgtactacacttaaaactatttctatattaattcatttgtttattaattcattcatttaacaaatatttatcagggccctactaagtaccaagcactgtttaaggcactaggtgaacaggataaacaagtccataacctcctgaagattatagacaagtgggagagtcaaataatgaacagagctgagcgtggtggctcatgcctataatccaagcctttggtagaccaaggcaggaggatcaattgagcccaggagttcaaaaccagcctgagcaacacatggagaccctgtctcaaaattttttttttttaaataaaaaaatgataaacagataagcatatgaatgtataatatcaatcaatcgggctgggtgaggtggctcacgcctgtaatcccagcactttgggaggccaaggtgggcagatcacccaaagtcaggagttcgagaccagcctgacgaatatgatgaaaccccatctctactaaaaatacaaaaattagccaggcgtggtggtgcgtacctgtagtcccagctactcgggaggctgaggcagaagaatcacttggacccaggagggggaggttgtggtgagccaagatcatgccattgcgctccagcctgggaaacaaaagcgaaactccatctcaaaaaaaaagatatatcaatcagtcatcagtgctatgaagaaaaagtggagcacagcaaggggactgcaagtaatagggtgtggccatggaagacgtgtctgaggagatgacatttgacgtttcagaagagacctgaatgagagggactcagccatgcagacagctgggagaggaggattcctgggagagggagtggcaggtctgacacagaactgtgctctgcatgggcaagggatcctggcagtcaaagtcagagggaaagtggtaggaaataaggtcagaggtaagcagaggccagatcatatcgtgccgtcaagtcctctctgaggaaggactatagactttattctaagtcactcgaagccggggagagtgatgagtagaggagggatgtgatctgatttaccatttagaattatcacactggtttttgtgtgaagacaacgaatgttgaggccaagagttaaagcaaggagaccatccaggaaagttattgcaaaggttcctgtgaaatgcacagcagcttagacccgagtggtggcaacagaggagcaagaggtggttgggtttgggataaatgcccagggtaatgcagccagaatctgctggttgactggaagtggggcatgaaagaaaaagagctccaagaatggctccaagatttttgactaagccattagattatgggaaacacctggggagtagcaggtttatgtggggagaacaggagctctgttttggtttgagctgtctgttaggcaactagttagaaatgctcactagaaacttggatgggctgggcgcggtggctcacacctgtaatcccagcactttgggagactgaggcaggcggatcatttgatgccaggagttcaagaccagcctggccaacatggtgaaatcccatctctaataaaaatacaaaaaaaattagccgggcgtggtggcgtgtgtctatagtcccggctactcaggagactgaggcaggagaatcgcttgaacctgggaggcagaggttgcagtgagccaagatcatgccactgcactccagcctgagcgacacagcgagactctgtctcaaaaaaaaagaaagaaagaaagaaagaaagaaagaaagaaagaaagaaagaaggaaagaaagaaaagaaaagaaagaaagttgtataaataagcctaaaactcaaggggacaaaaaccttccctgttaaatgccctggtttctaataattgggggtagcacgtcagttcctgattcccgctgtaacttcagttggcagcttcctgttgcattaggcatagccatctggggttgtaatcatctggatgcatttcaacacccaagcaaaaccgagcagtgacgccagccctgccagggaattgcaaggtagcacagaacatgaattggttaaacttcacacaacagcagtgtgttgcttggagaccagctccacaaattggtgcgggggggggggcggcggggggtggggggtgttattcaagttcatgcaagctggactctgtcacagagccactccttaactgtacgttggctaatcctctcctccaagcaagccaggaagcccacgagtagggaacaagaaggggcaaggccaaatgactttgactttgcaggtttggaggacagtgtggcagagtggaaagagcatggtctttggacgcaaacagacctagattcatattccttctctgctccttcctacctaggtgatctctgacatgttactttacctttctgagtctaaagctcaggttacttggccacaaagtgtgataggattgttaaagattaaataagtttcacaggccgggcacggtggctcacacctgtaattccagcactttgggaggccaaggcgggcagatgacaaggtcaagagattgagaccatcctggccaatgtggtgaaaccccgcctctattaaaaatacaaaaattagctgggcctcatggcacgctcctgtaatcccagctactctggaggctgaggcaggagaatggcttgaacccaggaggcggaggttgcagcgagctgagattgtgccactgcactccagcctgggcgacagagaaagactccatcaaaaagaaagaaagaaagaaagagagagagagagagagagaaaggaaggaaggaaggaaggaaggaaggaaggaaggaaggaaggaaggaaggaaggaagaaagaaagaaagaaagaaagaaagaaagaaagaaagaaagaaagaaagaaagaaagagattaataagtttcacatgtgaatccctggcacccggtaggcatttgaaaggaatagttcccttctc

SEQ ID NO: 4374 - DNA, 6000 bp, Homo sapiens
tgggagttccatttgtaccacacccttatcaatatttgatatgccaatccttttgtaaaatttaacctttctggtagactgccctaaaattatgagtcaaacattgctatctccttcaaggggcagccaaagtgcagtcatccacaactttgctcaagtggactttctcctagcactgggtcttggagattgcttcttgcttccttccccatcagcagcaatcagggtctagctcaggtccggaggctggagctctggctggtggaagaggcagaataagctgtatcctcacactgccaaacctcagcccacctgagagaatcttgggatttggagtgtgtgcgtagtgggggcagagaggatgatcaagggatgctaaaggaaaaatggtaactggatgccgtcttggctgcaggagttggatatgattccagtgtggatggggcttttggagctatgccgagcccttgagaggtcagttcttaggtaaccatgcttccaagaattaagaagctggcagacctgtctcatttgaccttgaaaaggctctttcagctaccgatcctgagtccagaaagggtaaaaggcttttcccagccctacagcaccctggggctggaaactctcaggcctgtgccttatacttgctcagctctaaaggccctgaggcagtgagcactctttccactcacagcttgctgcataggtgaactcaagtttagtaaacattcactgcaagcctgtgtgtgcaatacatcaaactaggcaccttggaagctgcaaaggacataatatgaactccctgactataagtttttcatcatctggtagaggaggaaatatctgcacatatcattacaatgaatctttgcttagtgatggagatacataatgtcctttggaagccagggcaggagagttcatgtcccaccttgagagatttggtgtaccatatccatggttagtgcgtggacatgaagggttggattggcttcctggaggaggtggcattggtactgggccttagaggatgaataggatttgttgggcaaattttactccagagatggagtaaaggaattgtaggcaaagaaacaaaaaaagcagcagtgtagatgttactatcctggacatttggagaaaaacaggtgcagtcggattactgaatgctgacaaggggggacccctagatgtcagcctggaggagctagatttgattttgcagaaacagggagtccctgttggatttgcacatggaagatttatttagtgttgctcctaattggagagcattctggtaacaacagggagaccatgggactgctccacccacacagaaacagaaatacaatacccatatccagataggcatatgtgcccacaaacacacatacaggaactaggacaaacaaacacactgagacctagagacccacatatcaaaacacatagtcatactatcagaactcaccacacacacacacacacacacacacacacactacacaatccgtaaacccaagaaaacacatattcaataccacacacatgtcctgaatacctatagacacatgaaggctgacagatgcccacatgtactgagtcacactaaggcacacacatataagtcagatagatcccctgtgcctgatatacacaaacgcccaccaagcctggcaggtatacatgcacatttagacttatacatacaccaacacgcttacacacacacacacggccagaacatgctcacactcactgaagcccctccccagagacacacatgctatctgcgcactcatggtcacacgctcatgcataggcacagccacaggcagacccacatagcagccactccaagcagagacagagacaggccctggcgggtaccgactcagcccatggctgcctggtggcacctcacaccctcctccaaggctctcttctaaatgacttgtctcttggcttccagccctgggtcatcctggggtctcagccctggacaggccctcgaggcagtcacatcctacctcctactcagtgctgagatttctaagctcctctgacagggttacccagcttctgcttaaatatttcagacaaaatactttgtggtgacaagtttcccgttgtaatagcgttcactttccacgctgggaaatggggattatgcacccagggatgagactggacccttcactgcagtagttacagtcagtgagcaaatccagctggacggcctctggcctgctcagtccaccctgtccccaagtccctgtgggctgcacttggccacaggatcaacagttcccctaagtcattgtattgctgatctcttctggtgtgggagagcaggtgggctggatgtggcacaccagacctctttggagggagctgtggctggcaggggagtaagccttggggaatcggaggagcacgacctggctgccctgcctaggatgcctaggacatgctggcgctctcccccaggcaggccagctgttactagagccactctgcattggcacgggctgtcctctgtgaatgtgacccacattcaggcctgcccagcagctgtcttcccctaccacattcctctttctggctgccaacccctcctggcttcctgttccctatcggcattaggctccctgggttgagaaaggggctgctgtccacaggtggctttgggagatgggctgggcaggtgtggctgcctctatgaggagaaaagccgcaggaactgcaaagcgatggcttccaacactgagctgagctcagagcaggcagagaacaggaggcaggagcatgggggcagctaccctctgggtctgcccacccctccaacccccaggccacccagcagggggtcatctggatgtcacctgattttctcagcattttatccccttttgttccgcttcaatgtgggatcaatctgatctctccattaacccctctgtaccttgctgatatggaaaagggctgcctcttccggggcagaactttgcccctgacctgggctgctcactctgttctggctctgagtcttagggccaacgccttccatcctggttgtgcctttcccctctatccttcccattcccttacaaactccattagccctgtattcattataggcaagagaaatggctcaacaggagcccctgtgaaaaggccagatgggggctagatgtggggctggagggagccagggtgggagtgcgggttgttgacttgaagctcagtatgagccaatagtgggatgtggtggttgaagaggcatcacaacatgagcctgtcccaaagggctgccccgtgcaccctgtgtggggaaattatgccctgccctgggcgccataccacaatgagtactttatcttgttaacaaaagtgatttatgtttacattgcagaacacttagaaaagataaataaacacaaagggaaaaaaagcaaattatccataatttcactgctcaaagatagtcattcttctcctatatttataatctgttttttactcaatcttccatttgattaaaatattttactatattattttatcattttgataaaatatatcatatttcattgcttatgagagtattaagagtacaggccagtttcttagcatttaccatatgtattaggtactgtcatttagagaatctttgtactcaagttgactgtgatcccagttgtacaaataaggaaactgaggcacagtttcccgaggctcgcctgcactaagtaacttgcccaaggcaacatggccaataaatggcagagccaaattttgaacccaggtcgcctgctccagagctcttataatctccacactatactgactttcaaaccatgggcgtgccatagtttgtttatcatttcctgtagtgatggttgtttaggttgtttctaactttttcttatcattataaacaatattctgctgaatatttgtgtgacttaaatattttaattatctttgattatttaagatccattcccagaaatggaatttatgcaatgaagggtataaacatttttaagatgttttcatgtttttccaaactcccttctgggaatgctgttatcaggggacgcctcctccaggagggtaggagagctgagccttacactctaggagaatctctgacccagtgaagtttgtccatctcagaggaagcaggacaatgtggtgagtggaaatagtttcatcaggggaggttgaagggactggagatatttagcctgcagaagatagggacaagggccacacgcatggctgtaatcaaatgtgtaatgggctgtcaagtgaaagagagaggtttgtcctgaggctctcgagcagaagtggaccaggggaccaaagttgcggagagccattgttctgtgcgggagccattgtcctgtgtggggccagcacacagccctggatggaacagggtgggtattacataaaggttacatgaccagctgccacctctggcttgggttcatggaggacgtgtgcatgggggagggccaggaccacccccgccacactgtgctcccctacaaaacatgacgtctctgaatcttaacaggggggtctgctccccaccccacccccgccttggggagcctggcccggcctggtacgtctctctgtctatcccctcaggagcacagcctggcttgtgtcatgggccacacaactcttccattatgcatgagggagacccagcggtgagcgagtgagcaagccggccgagggaggggtgagtggttattaataaacaagtgtattgtgtggcgttccattcacggcactctcagaggacgtggtgggcttgagataataaagccctgtttatgccacggagggctggggaggtggccgatgggggtgacaaggagcagggaagccaggaattattttgattccacccagggcagggctgctgtgttttctctgaggccaactttcagggaaaagaaggatcttgctgggattttgctcaggcctaagtctgccagctgggatggcctggggcctaagaaatgcctagcttccctccccacctgtccccatggagggagactgagaagacgctggatgaaccagaccatggctccttcaggagagaggtaggatggtcaactctgccctccctcttggcctctcatcctcaccccattcctcctgctttggccttcaaagactctgaagcggtgtgtgctaggattgtgcatactttcccaacaaagctaagactgtggttgtgcacaagggctgcaagaatcttcccggcccagggagtggattggttggggttaagatctgaaatatgaagtaggcaggcttgaaggggaaagaggtggtggtactggtctcctgtcctaaatgagctgaaattttaggaggaagagaggccaaggacaaggctccaaagcccctgtgtgggtgggcaggggagctttgatttgaggaatgagggtgtctggaaaagtgagatgccggagagcattttagaggagggagactcagtgttgtgcgtctaattgtgaagcctgtgttaactctgtggcgtgtctctgtcctacgttagtcttctcctgttccctcgtttggccatttgctctgggctccaccatctcaaaccagctgtctccctcctgagtcttggcatttctggatctcaggatctcaggccaggaatgcagaagctgctggttgggaggaagtgagaatagtcccttttgctctcagctggcttctagggatggagagcagtttctgggtcaggagagccttggtttcctgtcacttcatgctaaaccaaaacaagagtgaagacagagcccacacaggcttatgtcacctggtctggctgatgatgttcactttgacctttggaggtggctttggtccagagctaccctgagttaggaaactctttcatgtcaagacagctctgtctacagagatgtgtactggtttgttgttggttgggag

SEQ ID NO: 4375 - DNA, 6000 bp, Homo sapiens
gtccctggttcgctgacatggcaaactgagcatccagtctgtgtagcactgtgaatgcaaatttcactaagaccccatggcaggccaggcgcggtggctcatgcctgtaatcccatcactttgggaggctgaggcggtagatctcctgagatcaggagtttgagaccagcctggccaacatggtgaagccccgcctctactaaaaatacaaaaattagctgggcatggtggcccatgcctgtaatcccagctactcaggaggctgaggcaggagaatcgcttgcgttcaggaggcagaggttgcagtgagctgagattgcgccactgcactccagcctgggtgacaaagcgagactccatctcaaaaaaaaaaaaaaaaagaccccatggcttatgcccattggggaagacagaccctggaggcagccttaaagtaaatgcttggctagagccagcattggaagctgagagggtagaaggaacaggttctgggaaggggcatggcctgcccctttcatcccagagcccattcaggctggcctgtccagggctgcacagaaaacagcctgagccgctctatggacagttgatcatcctgtcccgggggaatctggggcccagcagtctggcctgagtcctgggcccactgagaactccacaaaggggtacctgtggagcagatggcaagtgatgggaagcaagagggagagaaagaaggaaaagcaagaagaaaccatcaagctgggcctactagtgatagcacaagttcattctagtagagtactctagatttgagtacaatagcttaggcaagccacagtgtggagataattccaaactctgcccttgcctctgcctttgaaagcatatttagcaggtcttcatgctatgattaccatgaaaatgggtttgcatttattaggcaaccttcagaagcttgcttagggccaggggactactttgcaatacaaataagcattttctgtcccttagcagaatgcccacggtagccccccaagttaatgaaatgaaatgggttccagcaggccattgctaggttgagcctgtgccaccagctccctccctgacccatgtcttgagcaccttccttgaactacgcaccaacagacagcagggactcacacccacatggccctgctgtctgggtgctcatgatctagtctccaggttctgaggcctaagactgggtcacagggaccaggatgagcaagagaggaacagaatgtgggggccggggcagccctgagatcctgggcttgactactaccccttgggtacccccgcctccttcagatccgctactggaaagctggggacaaagaagcagctgcggaccgagtgaggacagcagggctggacaccagtgcccgagtcagcggcctgcatcccaacaccaagtaccatgtgaccgtgagggcctacaaccgggctggcactgggcctgccagcccttctgccaacgccacgaccatgaagccccgtgagtctgtctgcctggggtgggggtagggcaatattttggagggtgggtgcctctgagatcattccttccccaatgataagacaaatgctctagcccaccagctctgggctgaacagaaattaggcagcgagcctaatggaaataagggaatggaattcatggcccctgaagcgtctcacacttctccaacctttggattttcatgggctttgtttcgtgggcatgacagaatgtgctgggtgtaactgctagaggcaaacatccagagaagggctggttaaaggtgagggggtgcggggtgccagggaaacgtttggacatctctccaattcttcctctctggcagctccgcggcgacctcctggcaacatctcctggactttctcaagctctagtcttagcattaagtgggaccctgtggtccctttccgaaatgagtctgcagtcaccggctataaggtgaggaagcaatcagctaggcccagaatgggaaggaacagctcctctgtgtttccagtgaacataagcagcagcaatttatagcaagaggcatctgagtgagacataagcaaagggtttgtgactgtgagaggaatgaaattcatgaactattctctcagtaacttgcagtagaaactataaaaacgggcagatggtatcactgcagaaaggcagagttcacaggggcagtgatggactatggggatggagtatgggggttcttctagcttaaggagtctacggaaacagttcagtggcctgcaagctttcctccaccaatgaggagctttgtcaatggggaggaggggtgaggaggctggacctcaagagcccagaaccatcgggtctcctcccagtacctaaagctggggatgactcaacgatcagccctggtgtcaggaaactccacctggaaacctccttcccacagatgctgtaccagaatgacttacacctgactcccacgctccacctcaccggcaagaactggatagaaatcccagtgcctgaagacattggccatgccctggtacaaattcggaccacagggcccggaggggatgggatccctgcagaagtccacatcgtgaggaatggaggtgctgctcctcccctacccttatcccctcgagagattcaggatccacccagatacctgagaggatcattcccacccaggccaactccaatctctacccgcaaaggaaagtggaaggcaggcaggaaccaagtgcaaagtagtcttagaactgcctcgccgccacctttctacccagcccccagaacatccccgagggccagggaagggcgcagggtgcagggggaggctgaggaccaaccagcaatagcaaacggcctacaaagcaccgtaggagtcggactgagaagaccacccagccgtccgctcccaggcctgcagctggccctgtgagtctccttaggaaaggtctcaatcttgccacaagggtggggctagggtagtcccaggcccagctgactcagcttgtgctggtttcaggcacaagcatgatggtggagaacatggcagtccgcccagcaccacaccctggcaccgtcatttcccactccgtggcgatgctgatcctcataggctccctggagctctgatcctggaacccctccctctgcgccgcagctggacgccacctccgacggacacagccagccccttcctgctgccaaggtggcctgacactgtgccagagagtggctggttttaaatacctactttaaacagtgccctttttgtaggaggtaggatattttatattctgccgcaggatagaacccacgcaaggattttctttaaattgagaggcaccaggcagtaacttccatgatgacactgacgcctatacctgagctctaggctgcctggagggaaggaacaggcccatgggaagaagggggttttaaaaacatgtcttcaactcagcagagatggccctctgggaccctatacggactccgccacttgagagcagtcctaggcccggcaggaacaccagacatgaacaggttgaagaactggagcgaagtgcacacctcaccatccttcagtctaaggaagaagggcaagccctgggaccaagagctctcccgccttctccctcgagcagcagcaaggaccctgacgctgtccccgataactccctaggggctcctgcctgcccaagcggctgagaaccagcgccccgatgcctgaggctgggagcctgagccccttcagctttgaggggggtgatactccaggctgtttggggtgggagccaaaaagagttgagaggccagggcccttggtggaaaggggcaccagccttggtctgagatagtcacaacccaggtgacgatgccctctcagccaacactgccaacctgaccctgtcatcccgattgacagcgccacttcaggtggctgggtgactaaagggcttgtcttggtggggtctcccacccctccaagacccattctgcacagtccctccagggtttgggcaggagatggccaatcatgcgcccacctctccagtgctgcctgcagtcagctcggcctccccgacctgcagccccagactctgctctcccagcactgactcactcctgcctgggaggggaatgcagcattcatgctgtgtgtcctggtattgggaggtttctgggaagggcagaggataaatgtggccctgcctgctcccaggtatacctaggaccacctggccagatccgctcccagacggccttggactgcttgcatttccccggagaaaaaggggttaataaatgggccatcctttcctgagctctgggtatactaccagtcacagaacgtcagagctggaagaagccttagagctcaacttcttcaagcccctcactttacagatgaggaaatggaggtggtccagagagggtctgggattcccaaggtcacacagcccagaagagatggggctgggttaagaactcgagtcttccacctttctgttcaaggctgtttgtctacccagaggaaggaggcactgctgaatggctatggcctggctaagaaggtgattagtcagtagggtgtgaaaattctacttcaaggggttcggattggtgatcatggggattggcatggctgggttcccgtccaaggtgtgggcagagcttctaccaaacttcaacatggagggctgacttgaagctccctgtccccctcactcttgccccaagaaaagaggccaaagcaagagcagattccctaggcaagagcagcagcacaactaggaaaccccaaagcccatgctccgacaggtggcccttcacagggggcagcgggacaggcatcttgaagggcatatgtcctcggaagctccgagcctgttttctgtagtttatagttagagctctattttgttatggttttttaaacttttaagtcctgctctattttcctgggcaggtttatgttgatgtttacccactacaattttttaaaaatataagctcacatgccttttccctgccacagccaaacccccactgcaccctacccacccacccctagcccaggtcagctttcctggagctggctaatgaaagcctcctcacctcttcccaacccttacaagcaagggtgctaggggctcagctatacgaccattctccctgacagggagtccaaacttggcctagcatccctcctggcccccctctggccacgacttggcctgtgcctggttctctatcagaaaggggatgctgaacaaaacctccttccaagttttatccaattcgttcctcattgcctcgggctgcgtcaggggaagcaggggacaggtgtccagttgctgggccgagggaggagctggtttggcataggacctaaccagtgaagctagaggctacagccactaaacttgcttcaggccaacgatagttactcacaagtaagtaccttaatgctaatgaggtccactaaaaaggggaggaaggcagacctcctgggagacccacgaagggtttttagccagggaaaactgagccccaggaaaacctaaccactgggcaggcagaatttgtttgagggatagaacgacaacaaaataaatgttcctgcagcctgagatttcaggtagagtactgactaaggtttaataagacaataggtgacctgaggacatgcaagcttgtaaaatgcaacagcctcctgctagagtgacttgtacatgagcttgcttgcagaagactagattagatgtttctcaggatcccctcctgcgcaggggttctctgattttcgtgttctctgcccagatgggctgggggagttgagagtgtgcttattttcactgcgatcatgagaccacagttctgggttatctcctctcatacatcaagccccagaggaggcggcaagaggaacagccacaaacaagtactttaccccacagcttagtggccagtaaacaccctggggactaggaaaagga

SEQ ID NO: 4376 - DNA, 6000 bp, Homo sapiens
tgccttggataatctgcaagcttcttactattggcaaaaagagaagccttttatttttcagacctaattgcttttacaaaaagaaagaaaacaaaacaaaaccctactctacactttgttaatcttggcaccttatcctctataatgaaagcttcaaccatttatcaaactaaatgaactgggtgttgacaagagagcaggattccataattctgccctttatactccttgtgtgtatacttattggtttagcaaatttgatactaccagagtgctccctttcattagtttaactgggatttctgttcacaaaaagcattcagcttattgggataattctctttctcatatggtatatggggggcttggacaagttaattatttttgtttcacttagttttactgcacatataccatgtgtcaagcattttcacgtgcattatctaccttcatcctcacaataaccagtgaagatagatagtattagccctggtttatagatgagaaaaccgagggtgaaagaggttaagctcacaagaagtaaccgaactagaatgcttacatgaattttctgacaccaagaccaatgttcttcccactaaatcatgttatttccttgtaattaactaggtgtgccaaaacagaatggaaatgctactcctacatagaaaatataatcacttgcattgtgtatctgcaaacttttgtctaatcttgaatatcaaaacataatttgtgcctatattttcccaaagaaacgtagaatgatagaataatctaatgccgtaaacaaaatttcaaccaaccaaagtactttcaagttctgattttcttaggtgctcaagaatttgctgcggctaatgaaaatttgccattggcttcaaactggtggttataggtcactcaggtctctacacagacttctcagccaaacttctttggcagtagcacacttattccataatatgacactcagtgaaagtcagaaattggtgggacacatttgaactcctgaagatagaagcattggagtgaaatgtgcaacacttctgaaactggatgacatctgtggttatagctatggccctcattctttgctaggcaatgtccaagtgctttacatatattacccaacaccctgtatggtaggtactgtcattatccctacttccaaataattcagaaactggagcatgaagaggttagataacgtgtccccactcacatggtcagtgaagagcagagctaggatttgtcccctatctggccatagagcctgagctcttaaccattatgctatgatgcctctccaaaatggaatgtaaagtattagctgattttatgaaacacaccacagacttttttgctgacctgaatcacaccttgcaaatatgacgacaagtagaaaatgtggctgtcatgctgtatgtatatgataatataaaaatcaaacttaagaccaacttttatctagtatagaaatgaggcataattcaaaattataatgctctctgcttccttaaacgaaaccaaatcccttccttaaaccaaatcccttcactttccttcggcttcgagtcaggtcatgaacatgtgtcaatgcatgctcaccatttgctggccaccgcgtgcccctcaagacttgctcagggtctttggggccgctgcacttatctgggccaagtcaggcagggagcagtatattcctctgcttgaaaccttgcaccatgggaacctgcccccaccggttctgtctagtcctgcccacggtctacactggcatcctgccatcccctcaccattgaaaatgctaaataaaggcttatagctttgtgtttccacattgtgctcgattctttgtggtagatgtggggggtggttccacattcccagcccatcctaaattcctatcttctaaaagtggagctgcctagtttagaaagtagctgcttggctgaagtaaattcttaacaaattagtctcttctaggatacacattaaaatgagtggttggaatgggaagaagacagaacagaaagtcaagaaactccgactagtgagactgaagtgaggctacaatggcatgatgggtgcgaaagagattggtaaactgtaaaatcctttagagaccgtgtggccccttcactgtctaggccagtggttctcaaagggtagtgtgtgtcagaattacctggagggcttgtcaaaacacagatttcttggctcactacttctgattctctaggtctggctggtggccaagaatttgcatttctatcaagttcccgtgtgatgctgaagttgctagtccaaggatcacaatttgtgaaccactggttgctggatgagtaaaatccattgtgtccacaggaggcatacaatagacactcagatggggttgttattattactactctccatatcttggtaaccccaacgtttgctctcttctgcttccagattactcagcacagtttggctgagatttatgcaaagagagacagcattccctttccacacatctatatgtagcaacctcctgccattaataccctttcttatttaaaagctgcttcacagtttgtaaggaactctcacatacgttattgtgtttttatatgaaattcttcccaatttctgagcataaattatgccaagtaaagtctcattaagaaataatgcacttaaagcgggggacggggcgatgaggagagaacgccccctccccttggcatttgcagctctgaatgtaggcatagatttaactcagaccaagtatcctagaggggataggtgtctcccttatggctagaaggtgcaaagttaagagccccaaaaagcagtgataataaacatccctcttgtgctccttctcgccaaataaagcgaatgggtggaggaaatcctgggcgagccctcctcggcagggtccctcaagctggagccgaaactgcgactcccacgcccgccgcccccgcccctgaactgcagcccgctctctgcaatgcaaaaacgcagcagcatcgtcctccagccctctcctgggggatcgcacggtgcaaccaaccccaaaaacgaagctgcgcgacgccccctcagccccgcgggcttcccattggccggttgccgctgtcactccctcctagcctcgccttcccgctcccgggcggaggcagccgggcggggtaggttgcgcgctcgccgcgggctcgggccgcggtcgcggctttgcggcaggctgcgcgtcaggcggggagcggggcgcgcgggccggggagggggccgggcgcgctgcgggctccgcggccggaccatgcggggcaggggccggttgcagggccgggggctgcagccggcgccgatggcggccgactaggacctgcccggccggctgccccgcgccccgcctcgccccgcagcccggccggccgggagggatgcgctgtgccgcccagctcctctccgtcctgcccatgccctgaagcagaaagtttgggggccgggggttgtctcccttctccctcctgcaatgactgcccaaggactcttgctgcccagcctcgactgtgacctgtcttcgctccccaggtcgaaatgaactattccaagctataaccaaggctcccccttctcgcccctccctcacccgcctttaagaattttttttttaattcaagaaattgtggtctgccatctcccctccttgttaataatttagaccccaggcctcatatgaatataagagggggtgcggtcttccccaagacggcgcgctggaaggacagattccccttgccgacccacatacaccatgaagaggtgcagatcggacgagctgcagcaacaacagggcgaggaggatggagctgggctggaagatgccgcttcccacctgccgggcgcggacctccggcctggggagaccacgggtgctaactctgctggcgggccaacttcagacgccggcgctgccgcggcgcccaacccaggtccccgaagcaagcctcctgatttaaaggtgagcgcagaccatccccccggcaagcccagcccgcgacttagctctcgccaccccacgcagaagtgctttaacaggataaaagtgaggggggaagccaggcaaaggtcagagaggatgagcggatgctttgctggcaccccaggggggacgtcaggtaccatttatgcctctgtctttcagctccgtgtcaggtctctgtgtttgttccccattattcagcaagcgttttagtgactcacccatccgagattgtttgaataatgtgtgaagtgttattcgcagacaaagggctggagaaatccaagatgctaaccaaaaagtggacagcaggtgaccattagttttccttgctgagtaagtctctacccattgggatctttgtgtgtgtgtgtgtgtgtgtgtgtgtgtgtgtgtgtgtgtgtgtatgtgtgtgagacggagtctcgttctgtcgcccaggctggagtgcagtggcgcgatctcggctcactgcaacctccacctcctcggttcaagcgattctcctgtctcagcctccagagtagctgggattacaggcacccgccaccacgcccgggtaatttttgtatttttagtagagacggggtttcgccatgttggccaggctggtcttgaactgacctcaggtgatctacccgcctcggccttcctaagtgctgggattacaggcgtgagccaccgtgccgggccccattgggatctttgagcgctttcctggatgaagctcagtttgccgatctgtgaaggggcgggggggggggggtggtggcgggggcggggggggaaggtggatttcctgccgttaggtggagccagaggttaagatagtgcttggagatctctgcctgcctgctgaaccaacccccagggtggagaactgacaggtggtggagcagtgcttgggctggtttggggcctcagttcaagttgcatacatgctgagccagcagctagaaccagaagccgaaagaactgttcacatggagctgtttattttccggcctgaggttgccgagacaattggcgagctgtcttgaatatatctctatcaattaaaacagcagctgagataaataatgcacctttgccggaactgccacagggactgcaggctcaggcttctcaagccagctcaccgtccagctgagcgagatgtcagcccaaggaaggaacttagatgccttggaaattgatgcctcacagttattttctccagagaaggtgcagggtctgggctagggaaacggaaaggactctgttgcatttaataaagcctatatcctatggcagcagccactaaggagctcaccagaataagccaatgccattcctcatttggcctgagcagctcagagtcaggaagtcagagcgcaggtgagtgtgtgtgctcttacctgtgtatgttacctgtctgtgtgccttggggaggagtgaaaagggggacgactaggttattgttgtgtgtgttttttaaactttgcagtaattattcaaatctgaactctggttctgccgccgtccttttcagagcttcgtggctagacttatgtctagaggatctctgtgggataggctctctctgcacaagaagcttgagcttttgccaggcccagggagtccttggtgtttatctctgctgtcacccccgagtccatcccatgtggtcaggaggtgtagttcctgttttaagtgagatggtgagggggaaggggtctcttgaatgctgttgtggggaggaggctagccttctgctgcagacttcagcctcattctgagccggtccagatgagtctggccagcaaaccctgaatctttgaccaatgagaccctcagctgagtctgtgagaggcagctttggaaattccccactctccaactcaggacagcagtggaaactgctttctccatttattcccccagttgccttcatgaggaagatgggttggtcatggcatggg

SEQ ID NO: 4377 - DNA, 6000 bp, Homo sapiens
aaaggttaaagtattctgccacttttctgtttcatagctctcagctgagaacagtataggataccagtgggtccgaaacaggtcccatccacatgctccctccttttcccttcccatttcctttctttactaattcttctaccatactttttagtcttggaagccacagccctgtctttgctactgcttcagtcctgtattgcatggcatgactgtgcttctgaacaacagatgccttttgtttacataaatatttaagtaatggttttttttaaatgcatgattattttttaactctagttaagcatccctggataagtgacagtttggctaagttagtgaaagttatttacataatttatatatttattacctgtgacaaatagtttttccttttttccattaatggtatttattattttgtataacctaaactgacttttaatgttacattaatattgactgacccaattactttattaaaaatagtggtcagttcaggtaattggggcatatagtgacatggggcaaaaaaaggatcaaattaacttaaatgtttttctagttggcccttaaattcttgagcatttaacccttcaaaaatttttgagcaactacaaaaatgttttgtaattagtttagaaagcatccttacaaaattagatccatctcagaaatatgagacgccatgtaatacaaagttttgcaacgatgtctcctcaggttgaaaacagatgtgccacaggaagacacttcttaatgtaaaagtccagagacatctgaaaatacatgatgtcataaagttgatttctagataatattacatggatttgatacatactcaatgtattccctcaaaattgagggtgttaggccgggtttggtggctcacgcctgtaatcccagcaactttgtgaggccgaggcaggccgatggcttgagctcaggagtttgagatcagcctgggcaacatagtgagatgctgtgtcttgaaaaaaaaaaaaaaaaaaaaaaaaaaaatcaagagtgctagagaccggtaccatttctccccaacaatctgttattccttgaaaacattttgacatgaatcacttcatgcaaaatggcttcaaagataaacatattaaacaggaatttccagtctgtttatctgctggatgatctatatgacttcaaagttcaagtagcttctagcacaaaattcatgtttccagtccttcagtgagaatgagaaagtcttaagttatgaacctaattctcagctttcctgctactctcttacactggattttatcccacttgttatgctactcgtttctttttggtttgaagtcactattttattcagccgttttctcttcctctgttcagcacatacctaactgatgagacccacagagaagtaaaatttacttctctctgagaaggagagatgagagaaaggtttgcttttatcattaaaaggtatctgttttctgttgtttattttcagatgtcctttcttttgaaaaatattcagtggatatatagatatcaataacctgagcaaagagatattggcagtaaatatcaaagaggaaatttacattcctgttccctttgctaaattattgatgtgttcttataccattccctttgaaaacataatgtgtactgacaggctttgacgtaggctttaaatagagttatgttcccctagtccttttatcagacgatctcacttctaccttgtaaaacagctgtgaatccaaaagtaagaatttgtgagccaactgggaaataaccacagaatcaactcattttaagtgcaaggaggaaaaatgcccttttatagaaaccaaaatatattttacttagttttgtaaatttattcaattccaacgtataaataactctgtaaagacattttatcagtttccctgggctgggatatttttagcatatcaaaggaaaacaaaaaagtcctcagattttgaaaagtaatggattgcattgccttaaacccttggaccctgtccaccttctgtctttgaactgaactggaattattcctctgtttgtgctagaatgtgtgtccgcagagctgggaagagatggagatacatatcccacctcttataatgtgaggccctaacctaggttataattaaaagtttgggagcaggatctacaaaggccagctggaaggacaatttcttagtaaaagcaaagtgatgtctttggttacaggaggaaagggaaagacaaaacataccaaccagaattggcggtctgggcctacccagtcctatatacagtagttccttcttatccacgggggatacattccaaaacctctagtggttgcctgaaacctgggagagtactaaaccttatatatactgttttctcttaagcatgtatacctatgatcattcaatttataaattaggcacagtaggagattaacagcaataactaataactaataatatcaattataaaaatatgccagcatcactactcttgtgctctgaggccactaagtaaaataagggttacctaaccacaggtactgtgataccgtgacagtcaatctgataaccaagacagctattgagtaacaggcacatagtgtccacagcatgggtatgctggacgaagggatgatttatatcccgggagggatggagtgggacagtgtgagatttcatcatgatactcagaatggcacacaatctaaaacgtagttctgtaattttccatttaatatttttgaccgtatttgactatgggtaactgaaaccgtgcaaagtgaaaccgtggataagggaagcctactatatcttcttagtctcttaggacacttttgagactaaagccaactaggaaaatagtttttagactctctctgagcttcagggtatctgtaaacatttgaagataatttaatgaatgctgtagttaatattttgccatcttcaaaatagcttcattgttatatccaataaatgtttctttaaatttatgttaatgccttttatctttggcatagattggatttttatttaaaactttatttaaagaaagagattctactactatgggaaaaaaatatttacttagaaaaatatagtggtggccagtcctggtggctcacacctataatcccagcactttgggaggccgaggcgggcggatcacttaaggtttgagaccaggttggccaaaatggtgaaaccctgtttctactaaaaatacaaacattagctgggcatggtggtgcacacctgtaatcctagctactcaggaggctgaggcacaagaattgcttgaacctgggaggaggaggttgcaagtgagccaagatcacaccacactgcactccagcctgggtgacagagcaagactctgtctcaaaggaaaaaaaataaagaaaagaaaagaaaaatatagtggtcttggagaattcagtgacaggccaaaccattaagtctgtcatcacaacagtccttagggaactgcaatattataagtatagtaatgacgcagtagagaaccataatgatggcctccccggcaaagaagaaccaacccgtttacgcctgaggttgcaattttttgaatttttgcagtcagaccctggcgatgaccttgagcagtaggagataaattccacatgcttagcgttccagtaatggaacactaggcataaatgggttattaaagtatccagaattaacatgcttagctgtgacattggaaaggcaatgtgtttgctgtggcacacatactagtaaataatgactggtccgaatttggttttcgtttgtctattaaagtcaatttactaaggcagggagggcccagagctgtgctgtccagttcaatagccatgcgtgactgctaaggacttccaaagtggctagtccaatgtcaggtatgctgcaagtgtcaaacacacactggatttcaaagactaagccaaaaaaatgtaaaatacatctcaatattttggttatactcggttaaagaaaataaaattatttttgcctttttatgtttttaaaagtggcttctggaaaattttaaattacatgtatgactggcatcatctgtctttggccagcactagactagaataataggttttataaagatgtctattgttatactaaaagtgtgacgtaaactttagttatttaggagactcttagtggaatacatgattttcttgacagtgaggggtagatgaggcatcacatacttgaacagttagaaccactatctttttaaaggttctgtgccagagctacagctttaaaatggagggatcaggaaagcatgcgtttgtctccagtctttcccattggccctacatcaaaatgaggacatagttactaagtactttgtgtgctactgctctatttcttgttttggaggggatcaaaaatataagacagggataaaggaaggttttttttacagtgagaccagttgaacatttgaaattattttaaaagaataatttatttcccaggttggtggctcattactatatttttttaattgttcattttctgaataggcttctggaatttaatttctgtacttaattatatttatctttgacatgatctttataccttggtttgcaggaaagcagatggtggagctgaatatgccacttaccagactaaatcaaccactccagcagagcagagaggctgaatagattccacaacctggtttgccagttcatcttttgactctattaaaatcttcaatagttgttattctgtagtttcactctcatgagtgcaactgtggcttagctaatattgcaatgtggcttgaatgtaggtagcatcctttgatgcttctttgaaacttgtatgaatttgggtatgaacagattgcctgctttcccttaaataacacttagatttattggaccagtcagcacagcatgcctggttgtattaaagcagggatatgctgtattttataaaattggcaaaattagagaaatatagttcacaatgaaattatattttctttgtaaagaaagtggcttgaaatcttttttgttcaaagattaatgccaactcttaagattattctttcaccaactatagaatgtattttatatatcgttcattgtaaaaagcccttaaaaatatgtgtatactactttggctcttgtgcataaaaacaagaacactgaaaattgggaatatgcacaaacttggcttctttaaccaagaatattattggaaaattctctaaaagttaatagggtaaattctctattttttgtaatgtgttcggtgatttcagaaagctagaaagtgtatgtgtggcatttgttttcactttttaaaacatccctaactgatcgaatatatcagtaatttcagaatcagatgcatcctttcataagaagtgagaggactctgacagccataacaggagtgccacttcatggtgcgaagtgaacactgtagtcttgttgttttcccaaagagaactccgtatgttctcttaggttgagtaacccactctgaattctggttacatgtgtttttctctccctccttaaataaagagaggggttaaacatgccctctaaaagtaggtggttttgaagagaataaattcatcagataacctcaagtcacatgagaatcttagtccatttacattgccttggctagtaaaagccatctatgtatatgtcttacctcatctcctaaaaggcagagtacaaagtaagccatgtatctcaggaaggtaacttcattttgtctatttgctgttgattgtaccaagggatggaagaagtaaatatagctcaggtagcactttatactcaggcagatctcagccctctactgagtcccttagccaagcagtttctttcaaagaagccagcaggcgaaaagcagggactgccactgcatttcatatcacactgttaaaagttgtgttttgaaattttatgtttagttgcacaaa

SEQ ID NO: 4378 - DNA, 6000 bp, Homo sapiens
cattggtctatatatctgcttttatgccagtatcatgctgtttttgttattatagctttgaagtttattttgcagtcaagtagtatgatgcctctagttttgttctttttgctcagacctaaagatttttggtggttacaagttcaataaaagccaacgagggcttataacaggacttctaaaacaaattaatgcttcattagtagaagtataatgtgcagaaaaagagaagagcaggtggctttgttatactttgcattctgtcaagatgaaaaactaagagtttaaatcggactgcctggatttgcttgggtttgcatcttgactctcctatttgtagttctaaaacctgggaaagttatttacacacacactgtctctcaatttacttaaattctttcttcatctgtaaaatagtaccttcctcagggaaaattttgctgattaaatgagttaatacacatagagttcttacagtagtaccttgcatatagcaggctctatcagtcaatgagagctattattgttattgttaatattttaagacaaaccttgaccaaaaaaaatctacttagatttattagagtgacgagggcaaataaaagtccagaaactctatcacatacaaaacaattgaagaacaatagagatattagattcagtagctttacatgacaattgctccaaatattccaagagctgctatattggagaggataagacttatctggctcaaaaatagagaactagcactattaagcaggattacaaggaggcagatattatattattaagatatcagagtaattaaaaaacataatgaattgccttgtgatatatagtaagctccccattaccaaaagcattcaagcaggggttggaagtcatctgccagggatggtataaactggagaggagattcctggacttggaggttgcatccagttataagatgctaggattctgtctaatattaccaccaaaaagcggatgtatttccctttccagcctgtctgtctagatcatccctttctttaaatgcctctttattctttttctcagcatattgataaatatgtttccttttcactcaattactattaaatgtgataaatttaattccaaaaataaattatttcttgattaagctcatctaactaatgcttttgccttttataaaaataccttaacctactggtcaaacctaatagtctcaaatttggtcatagtgaaatgcctattaaagttatcttcctcttcacaaaacaccacaaaatttgatctatttatagaaataaatatatatagttttgtgctatattagatgccatcttgcactatattgtaatgaaaacaaatagtaggtatcaactgagaatatttaaagtttcccacattcttaggaaaatttgattgttctgtagtcatgctaacctgaactagtagaaaacccagtggcttaatcaatgacaattcacctgttaagcttttagaagccaaccaatcagtgataggccctcacttctgagagtcaaccaatcaggaatgaactcatgccattaactgcatctcagagtgctaaccaatcaacaaatagtcatgcttctatagctgatgttagcccatttatgtctgggaaagtacaccagtccctgaccttcatgcatcctcgaaaccctatatgagatcagcagcctgcttttcagagagattgagcagcaaagcttgcccttactataatgagcaataagtttaccatttttgttttattttagaccttaaatgggggactcatcattctttgacaattctggaagctctactgtgattgttttaaagaccttcccttggcaatattccagggaacatgggaccaacaggtacacttactgggctccttgtgcccaagtgcatttgtcctttagatctgctgcctggtgagaaaatctcaatgataacctgagatctgactggtttcattaagttctcattgcttctgtgatttacaagcaaacaggtctttgtataagatcattatgcctagttctttgtattacataattagaaaatttagtcaacaggtgcacattttagtaaacaattacacctagacccttgtaaaaggtcattaggcattttgtttgggaggtacaccattgagtaattggacataggtcttggtataagatcatttgatattttgtgtgggaagtataccactgggtagttcaacacaggtctttttataagttcattagacctttggttttggaggcataaatatttttaccattaaactgtttattcccctcctactctctgtttacttttgcttgtctatattaaaaaatcttattgtattttttctgtattgtcttatttctgatataagggagtgttccagaggaaatgaatggagatatatactccataagttaccaatccaatccaagctagtcctcagcgataacatttggaggtccagtaaactgaaaaccaatttgggaaaaggcaattggtcagatctacaaaaaactttgatgagagcatgccctgtcttgtcagtctgtgataggacacttttagtttgtacactggggtgaaagattttgtcaggtcattaattatgtggtcctttctaacctttgcttagaaagggaacccaagatagcattcacaggcacacacttttactcagtggcatctcttgttcttcttggtttcttccatgtcaaagctgcagtctccactggaagaactcctgctttccatataaaattgccatataatcctaactcttgtacttattttggtaaactgcaaaaattaatgttagaatagcaatggccatcacgtagaacttctgacatgtcaaaatgaataaattaagatatttaagaggaggcccagaaaaattaggagacaaagccccaaagaggcaatagtcagcttctttcattggtaagctaaggcttcaaaataaaattttaacttgagaatggtctctctcaaagactctgataccacctaaaacctaccctcctttcatttctctttctactcagctttacctgaccttcaacatgagacaaccgtttcttctaagttttctctgaaaaagagtaatcacattgtaaaactgctaaaccagaggggagccctaaaaagctgaatttaaaccctggcctggagcaaaattaaaagttatcatgaaagattttcctaagcctcaggggtggttgagcagaaattagttaacaattcaggattttattaggtacttattgttctggattaaacatctgtaccaaatgattcagttaattgttagtccatccaatagagaaaaaaaattataagcagcagggtaagaaaaaaattaaataactcagttgtgcaaaatgaaaaacaaacgccttaagtggacaagaaaaaccttgaaaatccagtacaaaaagcaatttcaaaaaaatctttcttttaaaagtatgttagacaaagattaaaaattgtaaactaaatgaaaatgaaaagagacttcagaaaactttcaaagagcattctggagtacactcaacagctgaaataaaagaaacattgtctttatttttttctattaaagggctcaaatatgaattcagagatttaatgagaaaaaagtaattgaaatatgaaactgacagcttagaaaatatccaatacatagctagatattttcagagagctctagaaagtaaataagctagaaatcaatagaacgtatggttctctacataaaaaaacttgccccgaaataaaaacaaagccaaaaagtcttctattttctaagaattgggaacatatagagaggggtacttgtagatattgcaagcaaaagtgtcattcaaagaaccaatgttccacattggctaagtaacagaaagatgactatccaaaatctgtctaatggtgtttctccaaaggagacattagtacccaacaattacagtccttcctcggagtttgtgtccccaaatctcagaggggccagtcgctatactctccatcagggcatagctacatctagcatggcttaccactctatccccagcctctagcccagtgcctagcatagagtagatgcttattagatatctgttgaacaaatgaagaaatagaggaagaaagtacatttttgttttgacatgctgtagtcccttccttagtccagagatcacaaacctctgaattgggatgtgactctctctgtcattaatcggcaagaatcatggtagaattattgtccctacttacggattctctttcccttatacatcccattgcagattcctgtcttccctttacatccactccaacatcagctgatgcagtcactaaaatggtttataagtcacatatgagattccctaaggagtttataattgagaaatgtgtggacacacaggcctcacagaatgcactggatcactagagtctctcctggtgaaaagggaaaacctgcccaaatccagtttttgtttcagtaacttcctttgagacaaagtcaggaatctgagagtaagcacctgctaagggtgggacaggggctctgtctggtatgcctctcccatgttaagagctaacaatagtaatggataagtctccagggcaaccaggaccacttccaagcattcctgtcttgggctgcctcgagggctcctctgtcctttggggagtactgattgatgcctgatgcccagaactggcccactctggcttctctttggagctgtctctgcaggcgccttctggctgccagctcggtcctagcataagggacttcttccttggcctgggtttcaccttcttgtatcaggtggcagaccagctggtttcagtcccaaatcaggtcttctgactcctcccagaaaccaaccaacttctgagcaggaaatcctgcccctccccaaagagtgggaaaccgcaaaggaagagagagatgaaacagaaggaaaggcagaggaggagggagagagagagaagagaagaaaaagaaaaaagaacatcaataaaaagaagtcagatttgttcgaaatcttgaggtaagacttttaaaaatcacattatatataatagtatcaccatttgtatcagggcctagtacatagtaggtcctcaaaaaaatctgctattgaaataattaatctatcgaaatgaacaggagggctgggctaaagaaaaatttcaatgtgaaatgctggtcagaaaaaacaagaagaaacgcccgatgagctttcaaatgtgtaggagggatgatatgataagatgcagatggaaccagaagtctcttgctggcactgacagcattctgatcattgtgggacagaaagtcaagttggaacaaaaaagttgcaaagatagtataaaaagtgtctgcatgttcttttggaattacagaaagacagcaagaattatagaaatgttgtaagcagtttttaaaatcggctttaaaccaatgacagagcacaaacactatgctgtatcttgggaagtacttaaatgtgctgatacctgcatgttgcagccaaacatcagccagtttaatgttattaacatttagatctagagtgttgaaaaggctcattttatttccagaagtcttgttcagtggaccaagggaggcctaaacgtgtccatcaaaattcttcatgtgctattcatctatcctttaatcctagtccagctgggctgctcagaatactgaccctctgagccctaaacgggccttttcagagaaaatcccaacacttgtttcaggtcaaggaactagagaaacctgacaggaaagggaaataccattccccaccctcaccatttacccaaaccttcacttgccatcaatagaccatatcatccagagggttgtggcttagtgatccactcactttggagagattaaaatagctggatgcatgcttcagaaaacatctacagacgacgatgatgtgttttcacaacagt

SEQ ID NO: 4379 - DNA, 6000 bp, Homo sapiens
aacaaagcttgggcttctatgtgttcccatctcatttttctttccacatcatcacagtaagagaaggggttttctcactactgaaaagtaagctgggaagaggcaggagatgagggggatggtgctcagacctagaagtcaaacaggtcacaataaatatatgggtcatcacctgagggtcatggtgctacatatccaaggaagacccagaaacaaaagtggcaagaattcccattttttaatttgttggaaggaatgaaggaagatcccaatatagtttacattactaaatatgctaaatgtcaaatattttcatatgggattcccactgatatttatcgaaaccagcatgccatgtacccactcagtccgaataaaaatatcagagtgggaagggaccttagagacaatctggcctaatactctcattttgcccatgaggaaactgagcttcataggggtcaagtaacttgcgaaaagtcacacagctaggtagtggcagatctgcaactaaaattcaggcctttgattttagtccattcaatgtacaatattcataggttatgtcctctatacagagcactggactagcactagaaataatgagattatttagatagggttcttgctttgagaaggctcacggttttgtaagaaagacacatgactaaacaatacaaaaacatgaaaaataaaagaaatgttttcaagatataggaaaatacaagaaggaatgagtgactccagagaagaaaagagccaggggaatacttatataagcatttgccaggaaaatatggaagaaggaatagtattttagttggggtacaggcaaaggtctaaaggcaaggccgggggtggtggctcacacctgtaatcccagcactttgggagcccgaggcgggtggatcacctgaggtcaggagttcaagaccagcctggccaacatggcgaaaccccgtctctactaaaaatacaaaaatattagctgggtgtggttgcacatgcctgtaatcccagctactcaggaggctgaggcaggagaatcgcttgaaccaagaaggcagaggttgcagtaagctgagatcacctcattgcactccagcctggacaaaagagcgagactccatctcaaaaaaaaaaaaaaaaaatctaaaggcatgacacagtctagtaaaatggttctccaatttttttatttcaggattcctttatactttttaaattattgaaaatatataagaaatgtttatatttaccatactagaaattaaaacagttggccaggtgccgtgcatcatgtctgtaaatcccagcactttggaaggctgatgcaggaagatcacctgaggtcaggaattagagaccagcccggccaacatggcaaaaccctgtctctactaaaaatacaaaaattagccaggcgtggtggtgcacacctgtaatctcagctactccggaggctgggccacgagaatcgcttgagcccaggaagtggaggttgcagtgagcgatgatagtgccactacactccagcctagatgacagagcaggactctgagagacaggagagagagagagagagagagagagagagagagagggagagagagagagaggaaggaaggaaggaaggaaggaaggaaggaaggaaggaaggaaggaaggaaggaaggaagaaattaagatagaaattgagaaagaattattaattttaaaataatgagagtaaaatttttcatgctaacctgaattacatgttttaagaaaaacagtctgggtgcggtggttcacacctgtaatcccagactttgggaggccaaggcaggtggatcacttgagctcaggagttcaagaccagcctgggcaacatggcaaaacctcgtctctactaaaaatacaaaaaattagccaggtacattggcatgcacctgtagtcttaggaactcaggaggctaaggcaggagaatctcttacgtcccaggggtggaggttgcagtgagccaagactgcaccactgcattccagcctgggcgatgggagtgaaactctgtctcaaaaaagaaaaagaaaaagaaccatattttcaaaaacaaaattagtgacaggagtatcattgctttacacttttgcaaatatttttaatgtctggctgaaaaaaaagacagctagcttctcaatttgcttctgtattcaatctattggtttaaacataaagaaaaattcagtttcacacaaatatgtcattagaaaaagtaagactttgctgatcccttaaaagggtcttggggattcccaagtttcctcagaatccccatgttgaaacctgtaaattagtatgtactataaattcatgtattaatatgagctacaagcagcttgacaccaccaaagcataccgcaccgggtggaaagagatggagcacacaacctcaccggcctgtgtgacatctcaccctaccttgaagatggcttgagcagagaaagaaagatgatgggagagtatggaacaaaactgagaagttgcagtgatgtaaaaaagatttcctaagctcagccctgctcctcacgtcagacattgtacctggatttctcaatctgtggtcagagctcctgattgttaggtcattttcattgacagagcaggaacttggggcagacagctgtgcacgtgaggtggtttctggtcctgaactaaattgagatcatctcactcatttgtttgacagtcatttgataagttccaactctgtgctgggccttgtgctacaggggcaaagagcattacagtcctaactcttgaggagctcacagtccagccatgaagacagagacatgtaataaataacaccaaaacagtataataaggctatagcagcagtgcataaagcatgatgcaggaaaaagagaaagaaggcagcaattattccacctgaggtggaacagggaaggctttaaaggaaggaaacctggccaggcacggcagctcatgcctataatcccagcactttgggaggccaaggcaggtggaccacttgaggccaggagttcaagaccagcctggccaacatggcgaaaacccgtctctactaaagatacaaaaattagctgagcgtaatcgtgcatgcctgaagtccgagctactcaggaggctgagacacaagaattgcttgaacccaggaggtggaggttgcagtgagctgagattgtgccactgcactccagcctgggtgacggagcaagattctgtctcaaaaaataaaaataaaggaaagaaaccattttagctgaatcttgaaggatgagtaggagctaaccagtagagaagcaagagtgatgatgagggaaaaaagcagaaagtagaagagtgtttaaggtaaaggaattggaatgattacaggcctatgtatggcaaagaattgggtatagcagagtatggctgaaatgaaggtatgccagagtagtaccaaagaaaggatctcagacaggtctttagaattatgggtcttaaactttttctgttgaacaaggtatctcaaacttgaataatgcatggacccatttttaaaggaaacccatatatgtatatatataaaatcagagatcctttagaatgcatgctacccagcttgagaaacactgctataggtaataagctgagtaagaatggaactatgctttattgaggtataaagtcctacacttagcaatgtctggctcatccttagaaggtatgcaattactatctgaggaaatgacttgtgaatgatcagatctgtgtcttaaaaagttctgtaatttccaactggatgcagtgtctcacacctgtaatcccaacactttggggggccaaggcagaaggatcacttgagtgatcaagaccagcctgggcaacatagtgagacctcatctctattaaaaataaaaaaattagccatgcatggtggtacacacctatagtcacagctacttgggaggctgaggcaggaggatcgcttgagcccaggaggtccaggctgcaccactgtactcctgcatggggtaacagagcaagaccctgtcttgaaaaaaaaaaaagaggggggagggttcaaggattatctaacttgtagcaataagaaccctggctccaagcaggggttgggggagttgagactcttgtaatatcccaggtaagacacaaccagagcttgaatcaaagcaagctttgtgggaatgaggggggatatattaagagacatttctgggtttgtctccaaggaggagtttcaccccatgctccagcccaagagcagaagttcccttggttgtggtttcctccctcccttcttctcacccctcccaatcctcacccttctcttctttgtccctcctccccaccaaccccctagcttccagttttaaagaaaaacagtctcagactttttcagttaacagctattgtttcccctaaaataaggtaattcaactctctatctcttccatgaaagcctcaactccaataaaagtatagccccaaactgtggtatctgggaaaaataattggaagaaagtggccagaactggttcagacctttatttttgccatttgaccttcataaatttgaatttccaacttcacatgctgagaacttaccacaaactccctattagaatcccaaggatcagctccctccgctggcttcacctccggatgtctctgggccttttggataccataggctctggggcactattgagactcctgaggagggtccaaccttcagggcagaaacagctctactagcagagaaagcaagctttcaatattgtgcaatacaaaaacgagagcagggcagccttgggtttgaagatctgcgtcctggaattaagatcttgagatgacagcgcagcggggattggctgaagccctaagcaacctctactagagcagagagatgagctgtgggctggtgcttctgtggtgaggtggtggtgtttctggagagcagatcagaggcaggggaaaaccacgcagaagcaggagctgaagacctcagaccggcaccaggtgtgtatggcctccgccttgctcctctcttcactggggtttatatgccctctgagccctcggctcccggggtctaactgcctagaatgtcagcagtaggcctgtaaaaagtgcttcttcccacatactgtaacactgggcttcagtgtgggggaccctggggctcagaccaggaaactacatgcccgatttgcaacaacttggctgcgacttttatgacgttttggggagtccagaaaagcagagctgtggaaagaggtttcattcaagctccagacttgggtggcccttcatccccactgaagtggctatggtaaattgtcttccgttgcaacacgaatggaaaagtaatttggggttgggccaatacaaaaacagttgaaagaggcaaaatattggattaaagccatactatggaatggggagagaggaggtaccccaaaagggtaggagactgggaaaattttaagaatattgccttaggcctgctatattcccaaaatacagcaagataaaccttaaatttggtaggtttgattgcattctgcatagaaagagtttgggcaaaggcaaatgtgtggaaccgaagatgtgaaccagaggaggtaggtgtagagccagttgatttcaggacctgtggattgacaatgaacaggccacagtggaatgcagccgttttaccagttacttcaaagctcaaacagtagaagtctttgtccacgtcttccatcggtcccaaagccctctgcttattgtagatgccaaatccctgactctctgctctccctcacatgagacgttaggaaaaacattaatagcaggaggcactttaaaaaattatttttggcaacactttttgcttttgcaagccccagctgagtaacacaggaagctgaaagggtgggggcaccccctggctcccatggttagaagaataagccaaacaagat

SEQ ID NO: 4380 - DNA, 6000 bp, Homo sapiens
gaagaactccctttggcatttcttgtacagggctggtgttgatgaaatccttcagcttttgtttgtctggaaaagtctttatttcttttatgtttgaaggatgtggctcgctgaatagactattctaagataatttttttttccttcagcactttaaacatgacatgccactctctcttggcctgtaaggtttcccctgaaaagtctgctgccagacgtattggtgctccattgtatggcattttttatattttttattttttatttttttatttttttttgagacatagtctcattctgttgcccaggctggagtgatgcaatctcagctcactgcaacctctgccaaccaggtttaagtgattctcttgcctcagcctcctgagtagctgggattacaggcacccactaccacacctggctaattttgtatttttagtagagacagggtttcactatgttggtcaggctagtctcagactcctgacctcaggtgatccacctgcctcagcctcccaaagtgttgggattacaggcgtgagccactgtgcccggccaggaacctttctttatccttgagccttgggagtttgattatttaatgtcttgaggtagtcttatttacgttaaatctgcttggtgttttataaccttcttctacttggatattgatatttctctaggtttgggaagttctctgttattatccctttgaataaactttctacccctatctctttctcaacctcctctttaaggccagtaactctcagatttgccttttgaggctattttctagatcttgtaggtgtacttcattttttaaaattattttttcttttgtctcctcccactgtgtattttcaaatagcctgccttcaagctcactaattctttcttctacttgatcaattctgctattaaaggattcagatgcattcttcagcatatcaattgtatttttcagctccagaatttcgggcttaattcttttcaattatttcatttgcttcattaaatttacctggtaggattctgaattccatctcatgttttcttgaatttcattgagtttcttcaaaagagctattttgaattctctgtctgaaaggtcactctgggattgatgccttatttagtttgtttggtgatgtcatgttttcctggatggtcttgatgcttgtgaatgtgtgtcagtgtctgggcattgaagagttaggtacttattgtagtcttcacagggtgggcttgtttgtattcatccttcttgggaaggctttccaggtattctaagggacttgggtgttgtcatttaggtttgggtcactgccatcatatctgcattagagggcacctcaagctcaggaatgctacggctcttgcagactcagaggtaccaccttagtggtcttgcataagatctgagagaatctttccccagctgctgctgtaggatgagggaggggtagcgtctgcaattcaagactgtcttctctacgcttttcagtgcctctttcagtgatatgaagttaaaacttggtactgcaatggcccacttgatctttggttcttattaaggtgttttttgttgatagttgttcattttgttgttcttgaagggaggacaattggtggaagcttctatttggcatcttgccccacctcccttagattttgataaattttaagttttcatactgccaaattgcttacccaactaaacattgtgtgtgagtgctatcacatagcacccatgccaggctgtaatgttatttattaattttttgccaacttaatgtgtgaaaattgtgtgttcttgttttttttttttttttttttttttttgagacggggtcttgctcagtcacccaggctggagtgcagtggcacgatctcggctcactgcaacctctgcctcccgggttcacgccattctcctgcctcagcctcccgagtagctgggactacagacacccgccacgatgcctggctaattttgtttttgtatttttagtagagacggggtttcaccacgttagccaggatggtcttgatctcctgacttcgtgatccacccaccttggcctcccaaagtgctgggattacaggcgtgagccaccatgttcttgttttactatgcatttcattgagctttttgcaatatatttttgtttcctacttttatttccctcctcctttttctagtgggttgtctataaatgtgtcttgctcatctataattgatttctaatgttttcttattgattgtattaactctatatataattttaaaattacactttgcaaatttcttgcaaatatcccagtctattgcttatctttaaattttggctattatggccaagcatggtggctcacacctgtaatcccagcactttgggaggctgaggcaggtgcatcacttgaggccaggagttcgagaccagcctggccaacaaggcaaaaccctgtctctactaaatagccaggtgtggtggctggtgcttgcctgtaatcccagccactcaggtggctaaggcacaagaattgcttgaatctgcagtgagctgagatcatgccactgtgcttagcctgggtgacacagtgagactgtctctaatacatacatatatatatatatatatatatatatatatatacacacacacataaattttggctatttttatttgatgtttctgattgcctgtgtttaaatctgcctttatctcctttgtgttcgccggtgaatttaaagtgcatatgtagacaggggttaagtgtaaatcacactgaacctatattaacaacagcatcttttagaaataatataggagctgttatcacatccctgtccctgagtttgacactacctgagttgagttcttattctgccactccctctgccaaacccttggatctagagttgacagataaaatacccagttaagtttgattttcagatacccaggatgtaaatttgaatttcagatataccattttttttttttttttttggtagagatggagtttcatcatgttggccaggctggtctcgaactcctggattcaagttatctactcacctcgacctcccaaagtgctgggattacaagcttcctgtaagtacttaaaaaaaataagtatatcccaaatattgcatgggtcatagtgatactaaaaagttacatattgttcacctgaaattatttacttatttttttgagacagagtccggctcagtcacccaggttggagtgcagtggtgcgatctgagctcactgcaacctctgccgcccgggttcaagcgattctcgtgcctcagcctcccaagtggctgggattacaggtgcaggccaccacacccggctaatttttgtatttttagtagagacggggtctcaccatgttggccaggctggtctcaaactcctggcctcaagtgatcctcctgctaccgctcctaaagtgctgagattacaggcgtgggccaccgcgcccagcctgaaattcaattttaattgagtatgctgtatttttatttgctaaatctggcactcctatttggggctagtttactaacacctgcttactgaacaccatccagtaccaggttttggggtgagtgggttggggggaagcagaaagaaaagatagctccagctcttggagagttcatactctggtttcctggagaattctaaaatcattaaaataatcctctcgaccattacaatgactgctagatgaaatttctgagagcacagcttccgagtttccctgctgcctagggcagagttatccaccttcaccttatcatagaaccacctgagacgcccctgccatggacagtctgatgcttttggtttggggagggatccagaagcccgaggttttaatgagagccacgtgattctgctgagataagtctggagaactctggcaagcctgtctcttggctcaggcttggaggcctccgagcagcaacatcgtcccaattataccccgttggagcatcttcagatcttccactcttttcacaacgcaatcaaaatcttcgtacccattttgcagtagtgatctctgtaagttgctttacaattcataaagtttattctatttgatcttcactctaatttacaaagaaaagcagggaagtctatttctgttttacagaggtgtacagggaggctcacaggggctaagttcacacagtaagccctcgaagctgccagggctgcaaagcccaccctctttccaccgcaccgaactacctcctttcgcctacaaaacgtaggtggggaccactggtgttggaatgacggcccacctcgagtttcaggtgacttccactctgcaattaacttgcaggcagccccagacctgcaatgaacacacgggtgggggagagatatgcacgccagggtcagtgggaaccaacagccgaggggtgagcggggctaggggccccgggccgccggcggggcaaacgcggttcagaaacgcaggccgcgctctggcccgccccctgcagcagcacggcctgctcgccatcgcccggagagcgccgcgggttcccgagtccgggcgcggagggcgcgcgggcacggcggcaggggcgtgctcggaggacgcgcgctgcgctgctcctccaaagggcagctccgggggaaagagggtggcgtcccggggaagcccgcagccgccgccgatgtcgctgggactcggaagtgccgaaagaggggtgttgggaactcgcggcgcgcgtgaacgttgccgtcgccgccgcccgggacagcccggaggttggtaactggtgaccatagggggtcctggggaggttagatgctgaattttctgcgtcagtttactctgttaaaaaaaaaatgcacaaaacgctttccgtttcctacccaagttcccgtgtgcgcgcccgagggcgggacagaggaagttcccggtcgggcgaagaagacaaaagcggcgggggccgcgcgcgcagtgcgcccgggcaaaggcggggatctaggcgccgggacaagtccgcgcacggccctgcccacgtcctctctccttggcttcgtccccagcttccggaactgctgcggggagttgcgaactctggtcctcttggcagtatcggcggtgcgcctgcctgcctgctgtgactccagggactctaaagttagagacttcctttgcgttctatcttcaggactcagttttcttcctctgttctgagtctaaccttcaggtggcaggtctttatgcggaaaaaccctcccgctaatcctcaccagaggtactttacgggtagcattggtgttaagaaatgtgctgctacctgtgtacattgctcttggatcagggttgtagggctagggcatttggcatcctcagaggtttgcattacgtgggagtgagacattgcttctctttctgtttttgttgttgtttgtgtttttgaggcggagtttcgctctggtcgcccaggctggagtgcaatggcacaatctcagctcactgcaacctcagcatcccggtttcaagcgattctccagccttgcctcctgagtagctgggattacaggcatgcgccaccacgcccacctaattttgtatttttagtagagacgagggtctcaccgtgttggccaggctggtctcgaattcctgacctcgggtgatctgcccacctcgacctcccaaagtgctgggattacaggcgtgagccaccgtgcctggcatctcattcattctcagagctaaggacctatttcaatgtgattaagtgctatgggaatgcaaggagaggagagggaaggcttcattgaagaggcggtagttcattgaaggagactttgaggaatgatttttttccccttccattcctcatgttccattttccctgtgatttttctccctcctttctcgttgccagtcagtccctaattgtgattgtttgataaggacagctctgacctgagagattcaattaat

SEQ ID NO: 4381 - DNA, 6000 bp, Homo sapiens
aagcaacagttccttctgccaccagagggtgtgcagcaaggatgggcagcacaacctgctaccaactctctctaaagaaattcttttctctttttttttttttttttttgagacggagtttcactcttgatgcccaggctggagtgcaatggcgcaatcttggctcactgcaacctccgcctcccaagttcaagtgagtctcttgcctcagtctcctgagtagccgggactatgggtgcgcaccactgcgcctggcaaatttttgtattttttttaaagacagggtttcaccatgttggtcaggctggtctcaaactcctgacctcatgatccgccctcctcagcctcccaaagtgctgggattacaggcatgaggcaccacactcagaccccttgccctcatttttgacagatagttttgctagacacagatccttggttgataagttttttctttcagcactttgaatacgccatcccactgccttctggcctccactgtttctcatgaggagtcacctgttcatcatatcagggtctccttttcggtgatgagtcattcttctcttgctgtttcaagattttctctttggctttcagaattttattataatgcatgtgggtgtggatctctgtcttgtgttcattctactggggttctttttttttttttttttttttttttgagatggagtcacgctctgtcgcccaggctggagtgcagtggcacaatctcagctcactgcaacctctgcctcccaggttcacgtcattctcctgcctcagcctcctgagtagctgggactacaggcgcccaccaacacacctggctaattttttatatttttagtagagacggggtttcaccgtgttagccaggatggtcttgatctcctgacctcgtgatccgcccacctcagcctcccaaagtgctgggattacaggcgtgagccaccgcacccggcctctacttgggttcactgcatctcttggatgtgtagattaatgtttccatcagatttagatcattttagatatatttttcctttgttttttttttttttgcccttttctctcctctcctctggtattcccatcagctgtattttgatgagctcaatgatgtcccaaatttctctgaggctctgttcattttttatcatggtagatacacataacaaaatttaccattttaaccacttttacacgtacaattcagcagcattaagtatattcacaaagttgttcaatcatcaccactatccattcacagaaatttttcatcatcccaaacagaaactgtatactcattaaagactggctccccactccccttttccccaacccctgttaatctctattattctttctgtctctaacttttatagtttgatcataacaatccccttttcatcaggttttcatggagcgtaggaggggtaattctttgacttaaaaatataatttgaagaaaatgactgcttaggagagagagacagagagaaagaaagtgagagagagaaagagagagagagagaaaagagagagaaagaaaagaaagaataagaaagaaaggaaggaaggaaagaaaaaaaagaaggaaggaaggaagaaaggtgggaaggaggacggaaggaaggaaggagggaaggaagaagtaaggaaggaaggagggagggagggaaggaaggaaggaaaaggaggaatgaaggaaggaggaaagtagagagggaagaagggagggaaaaagaaagctatgaaagccattgaccacaggtcgggatgggaatggggataattcatcaatttttctacgctgacataactcccgagagttctgactattcattggctttaacagatttgccaagaggacaaatctcagcttaattagcaaaggataaaatcataaaattagtggattccctaatctgggcatgccacatagatgaatatgattgcaagggcaggtttggaaaagggaatgatgcctgaatatactggaattcccaaatattttggacctcaaagtttgggcttttaaggaactaccatttaaatctgcagtttgctgtaaagatggttaacagagttctgggccaggcacggtggctcatgcctgtaatcccagcactttgggaggctgaggcgggcggatcacccgaggtcaggaatttgagacagcctggccaacgtggtgaaaacccgtctctactaaaaatacaaaaattagccaggcgtggtggcatgtgcctgtaatcccagctactcgggaggctgaggccagagaattgcttgaacctgggaggcagaggttgcagtgagccactgctctccagcctggccaacaagagcagaaactctgtatcaaaaaaaatagttcattgtgcagaatttaacatatttgtcaaataataggctgaccagccatggagagaagctcctattatagtcacaacctattcaaaaatattaatgtgggtggggtgcagtgtctcatgcctgtaatcctagcactttgggaggcagaggtgggtggatcacttgaggccaggagttcaagaccagcctggccaacatggcgaaaccccatctctactaaaaatacaaaaattagccgagtgtggtggcacatgcctgtaatcccagctacttgggaggctgaggcaggagaatcacttgaaccagggaggcagaggttgcagtgagccaagatcacgctactgcactccagcctggacgtagagtgagattccgtctcaaaaaaaagaaaaaaattatagtgcatttgaagtgcattcaaaaactatgagaacacgattttagctgtgagcttgtaaaaacaaaaacaaacaaaacttatgagaacacttgtacctccctagcctgaggggcatgatgtatagcctctttcaggactgttggtacatgtccctttgaatattcactgtggagaatcttttttagcaagcgtagctaaattgtatctgctcctctaaacatttgccagaagaagaaatagtttattttcaggttcaggctctacacattctctttcttttcttttcttttttttttttgacagagtctcactccttcacccaggctggagtacagtagcgtgatctcggctcaccgcaacctctgtctcctgggtccaagcaatcctccggcctcagcctcccaagtagctgggattacaggagcctgccaccatgaccaactaatttttgtattttttagtagagacgaagtttcaccatgttggccaggctggtcttgaacacctgacctcaggtgatccacctgtctccgcctcccaaagtgctgggattacaggtgtgagccaccgcaccgggccctcttctcccaccctttccctttctttctttctttttttttttttttttttctttgacagagtctcactctgtcgcccaggctggagtgcagaggcatgagcttggctcactgcaacctccacatcctgggttcaagagattcttgtgcctcagcctcccaagtagctgggattacagatgcgtgccaccacacccgactaattttttgtatttttagtagagatggggtttagccatgttggccaggctggttttgaacccctgccctcaagtgatcagctcacgttggcctcccaaagtgtcaggattacaggcatgagccaccacacctggcttctacacattttatgagcaataaataatgttgataatctctcagttttcttctttcttcctgtctctccctccccagtggtcctgcagcagttctaatcccattcccatcaccagttgatcagagacctagtatttttaggaaagtagcagcctttatttattttttatatttatatttatatttttacttatttatttatttatttttgagacagagtttcactcttgttgcccaggctacagtgcaatggcacaatcttggctcactgcaacctccgcctcctgcgttcaagtgattctcccgcctcagcctccagagcagctgggattacaggcatgtgctaccatgcccggctaattttgtatttttagtagatctggggtttctccatgttggtcatttttagtaaatctggggtttctccatgttggtcagtttccatgtggagagagaattttgccatgttgcccaggctgggcttgaactcctgggctcaagtgatctgtctgcctcagccttccaaagtgctgggactacaggtgggagccaccatgtccagcctgcatactttttatgttatcagaaatgctatctttctctttggttacatttctttttttttttttttcgtaaatcaaagtactattttattaaatgagttattttacacaatatgaacatcaatataattacaattgtaaaaaatttttttataacaaggatggactgattttcatatttccaaatcagagtcaactgtacatttacacagaattgtctttgcatgaagcccaaaagggaacagcataaaaaatgagtgtttctgtagcccctttatttttgctgatcaacagtttgttagaaaagcagctgcaggtatgttacctaaggtctgagacagtagaagagtcaaaggtgtcgtgaattcacctgtaaacaaccttatgcctgaacatcagctaattctggaggaagtgaagtcttaggatgcttgctctcaaagtgctgcttgaaggtcttagggtctggcattcgtgtcctacagacagtgcaggtatatattaaggcagctttggcagcagccttttggtcatgtccttgtttcttcttttgtccagcttgctttttggcattattctgctgagactgaattttctgctgtccacgagccatatccgggccaggagaatcttgcgtcggagagacagtgcagcgcgagagggccgggagaggacgccggagggaaaggaagggggagcgcgcccagcatcgcttgggcctcctccacccgctcaggaggggaaacaggagagccgggagcacaacagcctcgcgcgcccgccgccgcctcagccttaggggaggccactacgcctctggttacatttcttgatcatggtatctccccagctaggtaagtatctctttgattacatttcttttttttctttttttgagatggagtctcactcttgctgctcaggctgcagtgcaatggcgctttctcagcgcactgcaacctttgcctcccgagttcaagcgattctcctgcctcagcctcccaagtagctgggattacaggcacccgacactacacccagctaattttttgtaaagccaccatgccccccgattacatttctttctcttttgagacggagtcttgctctgtcgcccgggctggagtgcagtggtgtgatctgggctcactgcaagttccgcttcccgggttcacgccattctcctgcctcagcctccggagtagctgggactacaggcgcccgccaccacgcccagctaattttttgtatttttagtagagacggggtttcaccgtgttagccaggatggtctcaatgtcctgacctcgtgatccacccgcctcagccccccaaagtgctgggattacaggcgtgaaccaccatgcctggcctattacatttcttaactggctgttgctggtgtataaaaatacaaaacattggctgggcacggtggctcatgtctgtattcctagcactttgggaggccaagacaggcagatcacttcaggtcaggagtttaagaccagcctggccaacaggacaaaaccctgtctctactaaaaataccaaaattaggccggttgtggtggctcacacctgtaatcccagcactttgggaggccgaggcaggaggatcacctgaggtcaggagttcgagaccagcccggtcaacatggtgaaaccctgtctctacaacaaacacaaaaattagctgggtgtggtgttaggcgcctgtaatcccagctactcgggaggc

SEQ ID NO: 4382 - DNA, 6000 bp, Homo sapiens
cagtccacaggcaagttctttattgtcaacacacaagtagtgctaacttgcccaatgggaaagcaaccttaattcttcttttggccatctaactgtttttattttagctcattcagtcagaagcaaaaatttatgcagaactgctcaataaaatgtacttgggtattttttttttaaaccccaaacacaccaactgaggaaactttagttaacgaaaaatttccaatccctttgaatatagatgtttaactattttaacttctgtttttatttttcaattttactacagaattattttataagttaacttattaccaatcatcttagtcaacagtagtttaaaatttttaatattttaagtatttaatgaaagaataaaaataatacactacatcatcaatttaaatgaatttgcatttattcttgcttgtttgcacctttaattcacctgaagcccatttctctaggattatattattgtgtagaattatactgagtttgaaaactcttttgtaataagatttcaaaagaaaaaaacacaaggccttatttttatagaaaaaggcagaaaagattaatgtttgactcaattttaaaaaaatcaaaatgtaatagtcatttactaatatttaacaaacagctggtttctctacttcacttcctatttgccttctttctctccccacccccagacaggaaactgcttttgacaacaaatgaatcagctagaagttaaaaagccagcagctagcagctgattcttcatggtttccaaactccagcatttagaaaaaacttatttcctctctccctcaccaccatctactgaagaattaaagcccataagtctaaaagattcattaagaattatgaaagcggctaacaggttaaactactaaattgatcttgtcagggaaataaggccagtaagcagggccaaatggtcaaatctgcacacaaaccctccaccagagtgatacgttattatacaaactttgacactgtcaattcacacaactggaatgcaagaatggaaaatggccagcacacaaatggagttggcttgaattaactgtaattcccaaagattaaaaaaaaagataatgtatcagcttcttaaggctgtatggatatacacacacccaaacacattttctctttaaccagcacattcagtattttaagtaacataataaaagtataatttatctttaactctataaatataaaacctctattagtagcactgaaagcatgaagagctttcaatatattttttgtagagcttaatttataaggttcaaatgacacatttactaagtatgattttaaagaaataaaactcatactttaaaacattatactcatcctagtttacaaattatatgaaatttaactacttttaggccttatttttttataagaggcagaagcctagagttatcaataacctactaaaataagcataaatgtgaaactaagaacaaaagtgtatttaccacaattattcccaacaacgtttgagagatttcaagtgcgcctcttaccacaatagcatgaggagaatgcactaaaggctttagttcattcaggtcattttctgcctgtaaaaattggtataaaagaaaaacagaaatgtcacaaaatgcacatcaaatctgtaattttagcagcagtcacacagctctatatgccctactttaccttatcccagtctccttccatgacatgatttcggaatttggtagcagaaggatgttctaaacgacatcctgactcttgcatgaggagatcaacagtctggctgcaggaaagatacagtgtaaaacagacctgaccaattttagggttttaatccttcaaataaactaatgtccatgaaaacagatgcaaagtttttaagctagcctcatgatgaagaaaaaaatagctttcatgtgcctggttaaacaaactttatttaaaactgacacctacattttttcctagtcaagttaaaaacctttcttgaaaccagaatcaatgtaagttcttcctagtttgccatttaatgcctcaatttaatgcataaagtataaaatttctaaaaatgtgctgtaaccaactagtcaaataaatgaaaaaccagaatcaacatactacgttacattttgaaagataaaaattattagcttcacacaaggttaacagagatgaccgtatcagttaagagcttatatatccaggtattatattgcatagaaattctactaggtcaatctttaaaattaaaacaaatccagcatcaaaaatcattccctttctctctatactaaaaatagcaaatttactatggtgtaggttccaaacagtcacgagttatttcctcctgctgctgtcagcttgcttcttgtctcagtaatatgttctgttagcatttacaaaatctgttttcatactaatccttttccctagggaataaagtgaattcttcctaccacatatttgtctttgagcacttaaaagattcatcaactgtattttcttccctcatgtattctggtatctaagaaccttcatttatcagtctattttttgtgcttatgtttcaatgctttcttattcagctttaaaacttaatttttagctaaacagtgcaatgatctgcctgaaaaccgaaatacttgtgccacttttaaaaagttctgttctcctccccactccccaagaaatccataaatgcaaaagtacacatcggctagcctgagagcttaatctacactctgaatgtaggaaactgactgctgctgcacgtcctccccccttcatttcattctgactccgtctcttgcacctccttcatcaggcactcccaccaatcctaccttccacccccttagtttttctttgtgtgtatacaaaacggtggtttttgtccaaggtcgctgtctaccttcaccctatgttaggtatacaaggccacctaaattgtatttgaaaacaaatggttcaccagatcagatgtccccttttcagaggcgatcatcttcttggtattaaactgagatttcagactagttagggttaggcctcttgtacacacacacaagggcctttaaacgacatcaacactgtatcttcattattcgcatcagatttattcaacaacctctttccaaatgatcccagcccctccgttcccataaacacttgtaggtgattgtctttcctgattggtagtttgcttgggttgttgtctgccacggttgggggtggggaggtgtcccacaaagatgcctccaagatacacttgaaaaacaaatcctccaaggttcattatttccaccagctctaatccacccctcccccaacacatacagaaacacactcccgcatctgtctttattgacagacaattaagctctgaaggtgcgtggggagaagtcattctttgggtttctcctaacccttcctaacccctcaacgcctgtctcgtctcacaatttgtcagactgattgattttcccctatttcctttcaggtccgctcctcctccccggtcgccctgagccgcgtcctcctgtgtactgggtcctgcgtgcccagcactcattctctttgaccgagctctttcaagcccccctcccccctccgccccttcccctacccccctggagcctccgtccctcggtctgtccatcaccagctggcggtaagggatacttacttgagccctaagccattcaagtgctgtcctattagcctaatgacatcctcatctgactgggagagccgcttcttcttcttgaggctgctgcccagttctggggtggccaaggaagaggaggcggcggtggtggcggaggcagctgcgacggtggctgaggatgcggcggccgccccgccgggaaccccgttattgacattcaggctgttgctattgttgctggcggcggagggggcggaaggcaggagcccattggcgtgggccaggtcccccgcggacgacgacgacgagggggacgactccccgttctgggccgacaagcaggcgagttccggggtctgtccctggcccccgccgccccctcctcctccaccgccgccgccgccacctcctcctcctcctcctgccccattggcctgcatgatgctgccgctgaccaggctgtggccgctacttcggtgggggacagcagcggcggcgggaggggcagcagccgggggaagtcccaccactaccaccacggaggaggaggaggaggaggaggacgaggacgacgaggacggaggggagaggcctgctctgcctgccgaagccccgggctctcctactccctccgccgccgaggctcggggtttcttccgcgggggcggggaggctccgccggtgtccgagtcggaggaggaggaagcggaggccagagtttcctcgccgagagaggccgtggtgggaagccggtggggcgaggcgggggaggggaggcgggggccggggagagggtcggggtgaggggggccggggaggcggggagggggtcagggtaggagggtgagggtgagggtgagaggagggggaggaggaggagggggagaaggaggatccgggccctttcccccccccctcccggaggcagctcggggtgcgcggcccgggggtcgcgccggggggcgccgcggggcggctgcgggggcgcggggcccgccgctgggctgagccccggcagtggctgcggcggcggcggcggcgggcggcagcggaggcagctgccgcctctgtcctcggatccgctccgctctgctccctggtgtgttgattcttcccccagctgctgcctaatggagtccaggcgctcgcgtcacaggaaatgcctatactgccctcctcactcacttccggtggcaggtatggaacctatagggggcctgtcacccagcacgtgcatcgggggctgtcccgggggtcaggggagggaggccagcgggccggcggggtccgccccgaccccatccacgaccccgactcctatccgatcctatccccggccccgctcgggcctttccccttgcgccctggctcggctggctcgacgagcagtaagttcgtagccgccctccgaagccgggcgtgcatgggatggcagagttggcgtgcgtgcgtgagtccaccagtgtggcatgggcatgtaaggtgcgcggagggactgcaccttctccatcaggtgcagaaggtgaggatggggcagggggctaggagcttcgacaggcaggaacttccaggcacagggctgtggtaggcccctctcaatggtaaccaggaccgaaatcgggtttcacaacctacttgttttagggtggaaaaacttgaatttccacagccaagtgccacacagttgctgtacccggggccatcccgggagctgtgagataatgagccggtgagactctgctccaccctgggaaggggagttagtctagaggagcatatcttatggggacaagaagtcacaaaaaggctgtgtggtgtgtagagaaggggagggactctgctgttgaggcttcactcttttttagcacttgcccagcacctccttctctcttccagctgcctcttgagtcactgcccagtttagggagcagtaacataaaccaaacagttgcctccaaaatatgcattctgagaaggattcaggcacccattcagatccaggcttgaaatttttacgtggcatgtgagccttctgtgtcatcatgacttaccaatttatgtgaatgtagaaatgcagcaacaaagactgggctgaatcttaatcattggcaaatggtgtgcattatccccaaacaattattttcatgtatgtggttgatagcatctatactcaatatgtataaagattttctcagaaatttaaagtctttctctgaagtagttttcctgtggggaggggaaaaaaaacaccttagtttctaattaatacatcatacatcgctgatatttattatagtaataactgaaagtaa

SEQ ID NO: 4383 - DNA, 6000 bp, Homo sapiens
aagggtaatctgaattgtaaacacgatttctaagttaaaactcctgggtcagctcgtgatgaagtagcaatttataaaagagatagtatagtaataaatgagacaactacactcggaaatgtggaatcatcaactcttatgcgaaaatagcctatgagactcttgtgttttttcattcatgccatgcgcttcctcacttccatcccattccattccacatgctcttctttctgcctggattattcccattccaccattatttttctcctggtaaactcctattcatacttaaaaaccctgctcaatgaccccttctctgtgaaaactttgtggcaaaacctaaccacttctgcttgtgcacacttctcttccatctgtgtgcatatagtatgtgtctataactggaagggtgtttatctgttatccgtttgtctgccctgctaaagtgtgagctcctacagttacagggttgtgtgttagtcctggtgcctgcacagtacccagccagtagttacactcagtgttgctgaaccaacctctggtccaaaaacatgtttatacttgcttttccaaggcgccaatccaaatctcttatttactttaaaaaacaaataacttcttggcactttaaaaaccacattcaaataacagaaaaagagttcatttgaactttaagtatcaatcttaaaatgaattgtatgttttaaaacttgacttagtgacatcacttaagagaatttttaaaaagcaaacttttatttttaccccagtgtaacaaatattaagttccattaaattattaaactgatctaccttttcttttttttttgagatggagtcttgctctgttgcccaggctggagtctagtggggcaatctcggctcactgcaacctccgcctacccaggttcaagcgattcttctgcctcagcctcccgagtagctgggactacaagtgcacactaccacacccagctaatttttgtgtttttagtagagacggggtttcaccatgttggccaggctggtcacgaactcctgacctaaagtgatctgctcgccttggcctcccaaagtgctgggattacaggtgtgagccaccatacccagcctgtttttcattttttggttcttttttttttttttttttttttttgagacaggttcttcctctcaggctggagtgcagtgatcatagctcactgcagcctcaaccacctgggctcaagcaatcttcccacttcagcctcccgagtagctgggacctcaggcatgcaccaccatgcctggctaatttttttttattatttgtggagatggggttttgccatgttgcccaggctggtctcaaactcctgggctcaagtaatctacctgcgttggcctcccaaagtgctgggattacaggtgatttaccttttaactgtgccaaagaacaaagcacctactttatttgctctcctgtatttaaaatggtcctttatacctcagatccagaaagataaacacaagtaaactaacaagtactctacttgtatcatttgttgttttctaacagtttacatttagtccatctttgaagggtaaagaccattgattgctcatctaacttcttcaccttgaacttagtgagattttcttccacctttcacaaatgcatgcccaaaatttgacttcagtgtagaattggaattaaaatgtatgcaatcccatttcttacagtaggagccaaatgttcatcaagttcccctctgagctcagtatcttgtagctaaatgaccactatcttccagtcacgtttttaaaaaaaatcatgctggtttgcaacaaaaattgtattttctttactaggcaagtgaaccattttgttgggaagagtaccttggcttcgagaaaaaaatgatttcattctgaaaggcttcccctccaaccccctcctgcacaaactctcagcccagtaacttgtcagtattctggaaaagtgcattacaaaacaaaaactcgaatcagataaaatatatctctggaacttttgaggcagatcaatgaagctctgatttcaggtgctagcaaaataaagcaggcactctcattttgtattgttttacttctcagtttttcatggtgtctcctaaactttgatgttttgaagaagttctaatgtttgctacatcagcaggagctgaccacagggaagagataaatatagctctccttggaaaggtgaaggcttagccaccagaattctgccccttgatgctgagaatgcaccttctccgaacagatggaaaagaggggtggagattaccccagggacatatcttgcaaaatgctgatacccgaagatgtacatagccttgtgctttggtcatcctcccaaatcatgtccttggtgaaggcacatggagaggagagcagatgctgccagaccacggtgcctgacgccatgcactccctcacgtccagcctgtttatgtgcacacggctgcagcgggaccttggggtgtgggctaaataacaagaacaggggctcctctggggtctgttacaaggcagagatgctccacggtaattagggatttaggggaagaggaaggaacacacatgttgataataagtagttcaacattattatccccattttacagatgcagctactgagcttagagaggtttcataacttgcccagagcccctcaactagtaaacagtggagccgagatttgaacgacccaaagaggaaagcaaacaagcagcccctttattacttttttttttttttaagatgagggtcttgctatgttgcccaggctgatattgaattcctggccacaagtgattcaccaccttggccccacgaagtactgggattacagtcatgagctaccacactgggccaaagccctcgtattgtaacctccaagatgttttcatttctaaagtcaaaggttgtcagagttgctgttttgcagggagccatgggatggggagtctccgggaaacccaggctggctccttaaatggcatcacccaagttggccatcaagcttccccagactcagtcactcggccccctctttccctggctgtagagcaggggtttggactcgaggctgctgagttcctctccagcttccatgcccagtggcagtgacttatcaactggcccacccggtggatgtaggggtgatgcagccctgctctgtcctcttgagtgctgggtggccatgagagagggaggccatgagagggaggggagggttctcatctgcttagtgccaccccctccccagcccaccccaggtcctctgccgccttgggttcctgcgtgagcagtccttctcactctgggcgatgttcgctttcaccagcccaaccccaagaagtccaccctggggaggacagagggagtctccacggctccacacccccatgctttgtcggagatctggccaggcagagtggtgccctcttgactgagcctcgagcctttgctttccccttactccacataaagccgcagccctggcgagggagcccagaggcctgaggacagcctgctgggtgcctggcactctctagatcctccctgcctgggcggtgggcatctgcaattctccctgtctcgaactgcagcagaatgtgtgggcagggttaggcagatagagagtgggtgcctggactcattggtcagactctaagaccgcccacccccgccgcccccgcagtccttcccaggactggctgacccaccagataggggagggtgttgtttcttattattacattttttgagaaaagctatgcaggcctgggagacgtctgtgccctaggagtcccttctggcctgaagactcaaggctgcaaacaggtgctgagagggaacaagaaggggagttggggtgcaacacacccagtgacagaccaggagtgagtgctgtggccacagattctaatcctcacaactgcagtgtgatttaggctaagccccttgcctactccgattcttgccttaaataagtgaaaaggaaagtcaagtttgatgagttgtggctctttagtgggtggatttgcatgtaccatggattacatttaccagggtctaggaattgtcaagcgcccagcaggctgccatcaggcctccgagctccttcgccaggcggctttatttggagtaagaggaaagcaaaggtttgaggctcagtcaagagggcgccactctgcctggccagctctccgacaaagcagacgggggggtgtggagccgtggtgaccccctccgtcctccccagggtgggctccttgggcttgggctggtggaagtgaatattgcctgcagcaagaagaaggactgttcatgtgggagcgcaaggcggcagcggggttggaaacccacccccacacagtcaacacctgctgtcacaccaggctaatcaagaacacttttctttggtgcattaaccacctgctattaaataaagggctgttactaggtggcaaagtaacacactgcagtagagcctatttgtaatctgagatcagtggctgtaaggcaccatccttgagccaagcaagtactaatattcttgttatcttaattagaatgcaagagatcgtgtttttaaaattctctttgaatctgtcactttgccctcctcttcctgggtgatacacctggtagtgctggtgggggccatcataatgccccttgtcccagattcccttcttttagatgggactcgagcactgatcatttcagccctgtatctctcaggtcagcgtggttcagtttgctgtgcagagtccaggggagataaccacgctgtgcacacatgagattggctgacttggcaggactgtgcaattgtcagaaggccgtggggagtgggggccagtgcctgcagcctgccctgcctctctcacaggcccttagagcatcgccaggtgcagagctccacagctctctttcccaaggagtaatcagagggtgagaacgtggagcctggtggacaggtgaaagcactgggatctttctgcccagaaaggggaaagttgcacatttatatcctagagggaagcgacagcagtgcttctccctgtgctgaggtacaggtaaggagggtggtttgtaaagttcactggggagggtgatccctctttattgttctaatattatgctcgcagcctccttgacaacatcatgcaaaatgtgtcttactagcttctagtgcataaaatattggtggagctcttcgctgtgctgggccagtcaccagtgctgggcactgtgggtcaaggcagtgcccaggacgggcacagccctgccttcccaagctatggtttattgtggtaggatctgcctgcccagtgaagtgtgttcagctgctcctgttgctgggggaagctctgctctctgccttcggctgcctcccacacgctcccatgtgtctcccagtccctaacccctagtcctgctttcaataccgcaggggcttttagctgacttttctccatcttcttaaagggcaggatttcctggcagagacataacgtctttctggaaatgaaagaagctgatgcatgttttttcttttctgaattacttaaataagaggaactcatttccaggtattccctgccttgtttttattgtgggagtgtggtcccagctgcccatctgatcagctgacatagggtccttggggcccaggcactgttactgcttgggattgaaagatgaaagccacagggccaggcacagcagctcgtgcctctaatctcatcactttggaaagccgaggtgggcggatcgctggaggtcaggagtttgagaccagcctggccaacatggtgaaacgctgtctttactaaaaatacaaaaattagcaggaggtggtggtatgcacctgtaatcacagctactcaggagtctgaggcacgagaatctcttgaacccagggacagaagttgcagtgagccgagatcgcaccactgcactctt

SEQ ID NO: 4384 - DNA, 6000 bp, Homo sapiens
ttctcccgactcagcctcctgagtagctgggactacaggcgcctgccaccacacccggcttttttttttttttttttagtagagatggggtttcaccgtgttagccaggatggtctcaatctcctgacctcgtgatctgctggtctcaatctcctgacctcgtgatctgcccgtctcagcctcccaaagtgctgggattacaggcttgagccatcgtgcctggccttactgattcaacctcttattggattcaatctctttacttttcctagcttgttcagatttatttcttcctgagtcagttttggtcatttgtgtacagttgttcacagtattcacttaaaatgcttttttttttttttcctgtaaggtccatagtgatgcccctactttcatgtctgattttagttatttgcatctttactctttatttctcagtctagctaaagatttgtcagtgttgttcatcttttcaaaattttcatttcagctattgtacttttcagctccagaattttgatttggtttatttttcataatttgtctctttgctgatattctgtttatacatttattgtttacctggcttcctttagttctttgtccatggtttcctttagttagttaagcatatttaagaccatttaaataaacgtttaagtaaacttttaaacatttaaataaaagtctttgtctagcaagttcaatgtctaggcctccccagggatggtttctatcaatttctttttcctgtgaatgggttgtacttttcttttttcttggtatgcttcctattttatttatttatttactttttggttaaaaactgggcacttcgggcctggcatggtggctcacgcctgtaatcccagcactttgggatgccgaggtgggtgggtcacaaggtcaggcattcgagaccatcctggccaacataatgaaaccctgtctctactaaaaatacaaaaaattagctgggtgtggtggtgggtgcctgtaatcccagcaactcggaaggctgaggcaggagaatcgcttgaacctgggaggtggaggttgcaggctgctgagatcgcgccactgcactccagccctggtgacagtgggagtctctgtctcaaaaaaaaaaaaaaaaacaaaaactgggcacttcaacctgaaaaagctgattgaaagaaaaaaaaacctgggcattttgaatattataatgtggtaactctggaaatcagatcctgttaatgcttattaagggctgcagtcttctgtttgtttagatcatgccttagtctttctggccaccagcccctatcctgaagctagtcaggggtccccagccaccagtcatttcattagcataccaacaacattcatcacacctgagattccaaaggttttagaagcttgtgccaggaacggggataaagaccaaatatttatttttattatatcacaacttcctaactcatttattgagtcattatgcttcaccttagggcatatgcagcctcttcacattaggggaaattcagcctatcaagtgcaacactgaaagctaaataacaacaacacaacaacaaccaatcagggatgggcgcggtggctcatgcctgtaatctaatcccagcacttcaggagaccgaagcgggagggtcacttcaggtcaggaattcgagaccaccctggtcaacatggcaaaaaccccctctctactaaaattacaaaaattagctgggcagggtggcacatacctgtaattccagctaacttgggaggctgaggcaagagaatcacttgaacttgggaggcagaggttgcagtgatctgagatcgtgccactgcactccagcctgggcgaaaaagcaagaccctgtttcaaaacaacaacaacaacaaaccaggttggggagttatttcccaggaattctgtagcaagggctcatatgcatcagttagagttggactttgtgaccttcaggtgtccttccttttccaagaatcgattatttttataattctgttaaatgtaattaatttctcaaatttatcaaagatcattatttggaccattattttcttagccaaaatgctggcctgccccagttccatccagggttaatctgcatttaaacagctctttgaaaatatttggttttccccatccatctatggccaattgatttttgacaagaagccaagacaattcaataggaaaaggacaatctcttcaacgaatggtgctgggacaactagaagtccacatgcaaaacaatgaacttggaccctaacctcacactacatacaaaaattatcttaaaatggatcaacaacctaaatataggagctaaaactataaaactcttagaagaaaacacaggagtaaatcttcacaaccttggatttgacaatgatatctcacacaggacaccaaatgcacaaacaacaaaagaaaaaacagttaagctgaagttcatcaaaattaaagttttatgtgcatgaaaggacatcagaaagtgaaaaagacaattacagaatgggagagaaatatttgcaaagcatatatctgataagggtctagtgtccagaatatataaagaactcttacaacccaacaacaaaaagacaacccaattttaaaatgggcaaaggacttgaataggcatgtctccaaagaagatatacagatggccaacaaacacatgaaaaggagaatgcttaatagcattagttattaggaaaatgtaaaccaaaaccagaatgaggtaccgctgcacacctactaggataacaataaaatggaaaataacaagtgttggtgaggatgtggagaaattgggatcctgtacattgctggtaggaatataaaatggttcagccatcgtggaaaccacttggggttccccaaatagttaaacactgaaggctgggcacggtggctcatgcctataatccagcactgtgggaggccaaggcaggcagataacttgagttcaggatcaagaccagcctggccaacatggggaaaccccatctctactaaaaatacaaaaattagccagatgtggtggcacacacctgtaactccagctactcaggaggccgaggcaagataattgctcgaacctgggaggcagaggttgcagtgagccaagattgcggccactgcactctaggctgggcaacagagcaaggctctgtctcaaaaaaaaaaaaaaattgaattaccatgcgatccaacaattcaacccctatgtatgtaccctccccaaataaaaatgggctctcaaacaaatacatgtacatgcatgttcatggtagcattattcacaaagccaaaagatgcaaacagccccaatgtccatagatgaataaactgtggcatacatgatacacacacacacacgcacacacatatacatatacacacacaaacactattcagtcataaaaaggaataaagtctgttacatgctacctgaggatgaacctcgaaaacatgctaagtgaaagacacaaaagtccacacactgtgattccgtttatatgaagtatctaaagtaagtaaatatagagacagaagtagactggtaattgccaggggctgggggggaagagggcattgggaagaaacttctcaatgggtatggggtttttctttcggaatgaggaaaatgttttggaactagacagaggtggtggttgcacagcattgtgaattcactaaatgccactgaaatgcccactttaaaatggtaaattttatgttatgtgaatttcaccttaagttaaaaaaaaaaaagtaaaactactcagacaacgccaaattattgacaatctcaacctaccccacagaccccaaatcctggaaccacaaccccctaggccaattctcaggtcaggcagcaatttattcctgttcaattttatgcagagctcctggtggctctgaagcgccctagggaacagaccaggaacattctcatggtgttagctcacattgggccattagtgctcctttaatgtgagaacaaccgggaggaggaggggatgtggacccaaaactacaagaaagagtgtcctcgaagcctatgtcctaccgccccacgctgctgccaggcccgcaggaagatgacaggcccggcctccactccttctaaggtcgtcgcttagttccgacgtcgggatgaccctgtcatccacgcggcgtgaaggccaccctccccgcgcgcccgggactccaggtggggccccagtggacgagggaacgcggcgtcgcccaccgggcgtggcctgggcgggcgtggggcggggcctgggccggcgccgggtccggccgggcgctcagccagctgcgtaaactccgctggagcgcggcggcagagcaggtgagcgggcggtgccggggggtgcccaggccagggccctgtcgcctgcggcgctgagggcccggggtggggctgcgccctgagggccctgccctgccctccgcacgcctctggccacggtcccttccccggctgtgggtctgcggcccctgcgtgcgcagcgctcctggcctctgcggccagcgcgggggcggagagaggagagtgcccggcaggcggcggctgggccggcccggaactgggtcgtggaaggatcgcggggagcggccctcaggccttcggcctcactgcgtccccacttccctgcgcccgcctgccgccgagccccggctgggggtgggcgcggcgcgagcggttaaagggccggtgcatttaaaggagcggtgcacgtgggtctctgaggcgtgtagcaggcgggggcgttttgttcttcttctctctcgccggagacctccgttgcgccgagtccattcggcctctagcaccgggtcctgggcatgctttccccgggaaggaggcgcgcgggggctctgcccgcacgtgaggggcagggccgcaggctcaagcctagagccggtttctgttagcagcggtgtttggctgttttatcaggcatttccagcagtgaggagacagccagaagcaagcttttggagctgaaggaacctgagacagaagctagtcccccctctgaattttactgatgaagaaactgaggccacagagctaaagtgacttttcccaaggtcgcccaggtacgatatagcagagccaggcttcgaccccagtgtcctggcttctagatctgctgtccatccctccgagcagacctcacccctgtttattgccttaataagtattccctttgaaaggtatgaacggtgttgagtgaagtaactgcatccctatttacaaatggagaacctgagagcattccatagagacgattgtagactaacttaactcagaagcgacagcctggggttgccaaggctgtctacgaagtaacttgattaggaccgaccccagcttccagtaaggaagcctctgatgcctctgtagccaattctgcagacacctgagcctccaaggccttcagccaagacctttggcggtaattggagtctcgggataagctgcttcaggtgtgtgagcctcaggttcttctctcctgaatgtggttgtgggcagccggtgactggcgcaggtgcagaaggggcctggttcttggccccacctcagagctgcgtcctcacgacgcccacgttgagccttgggttccagggcagagactggagtgagggcttgggggcatgttgctttgaagtgggatggatgtatcaggtttttggggaaaactctgtaccctttggtgttgaagtgcccatgtgccaagtcttgagtccagcatgttcacatgtggggagtgagtggcttgttcctgtctatttgaaagagcagcaaggaggaggaggagcaagggctaggggctgctgctggggtgcctggagctgtggtgcataatgtcacacctgtctcccctccgtagctgctcaccgtccccccaaggggggtttgcctcttgcctactttggcctttctctgttatcgatgttaa

SEQ ID NO: 4385 - DNA, 6000 bp, Homo sapiens
cacgccacatatatacatatatacaaacaccacatatatatacatatacacacacacaccacagatacatacatatatatacatgccacatagatatacatatataaacgccacatatatatacatataaacacaccatatatatacatatagatacatgctacatttatataaacaccacatatatatacgccacatagatatacaagcacaacatatatacatgccacatgtatacatatgtaaacaccacatatatatacacaccacatatacacaccacatatatatatacaaacaccacatatatatacatatatacatacaccacagatatatacatatatatacatgccacatatatatacaaatatacatgccacatatatacatgtatatacatgccacatagatatacatatataaatgccacagatatatacatatataaacaccacatatatacatagacaccacagatacatacatatatacatgccacatatatatacgtatatatacatgccacatatatatacgtatatatacatgccacatatatatacgtatatatacatgccacatatatatacgtatatacatgccacatatatatacgtatatatacatgccacatatatatacatatataaacacatatatacatatatagacaccacagatatatacatatatatacacaccacatatatatacatatatacacacacacacatatacacacagtttctttaaacatttcagaatagactttctacctgccttgtaagccggttttctctgacgtattcccttgtggcagcttgtggacacaccctttctcaaggcatggggtaacagttagtgtcaggaatagaaatgcaagcacaaaaggtcctccctgtatgcccatacttggagtgcctgcccctgttcttacagtcggtccttagagatagatgggatgtagggaaactgaggcacagaacctactggagccaagagcctaagccagcttctagtctaaccctgatttcacaacagaaaagtctcagaaagtcattgcctccaccctggagtcatctgggaagaccaaggccaggaccgagtccccggttctgaccccagttgtcagggagacgcctgcagagggccctctttcacctgtctgtctccaaacccctgcgccagctctgggtgctcctccttccctgctctgcagagtcccagcctgtcctggcagtgggagcccctctctagggttctgctcacaatccgcatctctaaatgtccatctgtgttgatgacttgataccaaaatgtgtaagggagtgcctgttaaacaagagaaggctagcaccgcttggacccaaaccacctagaaattgcctcactcattggcccctcgagaggaagctcctcgagggcaaggctggcatctgctgagccaagtactgggtgagtctcaaacacattcccctgggatgtaacggagcagagatgtctttggatgtaatggattgataaagtgatgactttagttgacacctttttaaaaaacaaatattacttcaatattgcttaatttcaagaattgacaggtgtttctgcttcagtcccagttttggggaaccataactgacacggcttaggacctttgtgaagcatgaaaagacctataaataataagtttttctggatgtatggcatgtataaatggggatctgttaggttttaaaccccaagactcaggctattagagaggatgtgggggctgtttcagtagagtctgactgccttgaaaatctgcgctccccacccccaaccacaatcccatcagacagacagatcagagcccacaaggccacctgtgcgagacggagctggggttttgttgttgtttttctaaggttcttgatttagctgatgctttgacacatgacaggcagtccctccagtggccagaatcagattccgttcattccgaattctttgttgagaagattcctggctgctcagagtaacagggcagcctcaatacatacacactttacatgacaatggggaaaaacagcatgaggggtgattgacagcaacgagggagctggaaatgaaagaggcaatgacaggcacttagcaaaagcctccccggctcctctgattgcactgtctttccctgctggcaagaactccaggtgagcaggtggacggaaataaggaaagcagggtacaagtgacaacatccttgtggtgtttcgcgcaggtcgggtccccagcactgggctcctctgcctgcaccggctcctccctgcctcactcactggcccctcaagaggaagctccttagcaaattttatcttggaactgaactggctttgccagttggaacatttggtttccaggcacgtccatgttttcatatgttgtgcatatttgcagagtcaaaggggaaagggaggcaggagtgagaaaatttaattctgcaatgtcaaaaggatttgcaaaaaatacttaggtgaaggagctttcgtgcacacagtataaaaaattaattagaaccacagacttcattatttgaaacgagctttggggaagaaaaaaatgttactttttttttttaagaacaaacattagagatttttaaagggggatttttctgtttttctttctttttttttttttttttaagagacaggatctcactctgttgcttaagactggagtgcaggggtgggtatgaccatagctcactgcagcctcgaactcctgtgcccaagcgatcctcccacctcagcctgcaaggagctaggacaacaggcatgcaccaccatgccctgctaattttttttaaaaaaaatgtttgtagagatgggttcttgctatgttgcccaggctggtcttgaactcctggcctcaagcgatcttcctgcctcggcctcccaaagtgctgggattagtgtcgtgagccgcctgcactcaggctgaaaggggtatttatgttacttgctaaacagggctcctcagatttccttcaggctgggttgtgcactttgattctggcttagttggtgggtaacgggtatgtgggttgagtttggttgttcgcttgatttgagtgttagtaaagaggcatcgtaccctgtactttacaagcggcatgttcagaactcagcaaacattggtccctgccatacagagcaccagggggctcaagggtagcagagacaagtttctcatatccaccaaggagcttgcacaccagtagagaacagactacatagaaataggcttctcaatgctatgttctgttcaaacaaccatctctcttcctgacatttggcctgacaccgttcctctggctcccccgagcagaaagccctaagtgggagcatggaggtgcccagaccaaggcctccaggcagggctgctttccaacagccaggggaggatctggccctgcattgtgtggatcccttcttggggtgaaccatcactggatcaagctttcatacgaaggcatgcaaattcccctacatcaaatcctgtgttaatgacgaaggggtgggtgcccagagctctggggctcagaggaggggacacccacagaaagtttggggcaggagacgttctgagttttgatccaaggcagagaatatgtttccttcctgggtcccagcagcacctgtggctggtttcctgtggggctgctgcaagctcctcggccgttcagatgagaggctgggaaaaacgtgtctatctgtgagtttttaatgcagccacaaggtcctgaattcacacgaatctgtttgtactcctttgcttgtgcccacactctaaggcactctcctgtgtcttgcagaaatgggaacagatcgagggcaactccaagctgaggcacgtgggcagcaacctgtgcctggacagtcgcacggccaagagcgggggcctaagcgtggaggtgtgtggcccggccctttcgcagcagtggaagttcacgctcaacctgcagcagtaggagggtccgggaggccctgccgtcctgtctcctgcaccattgggtggagtctggtgatcacattattgattatgtttcttaaactttccgcgaaactaatatacctcagtattccatcatggtctgaaagtcaaacttcggcaaggcacggacgactgtgcagacacagcagcggcaagaagcgagaactgccctccccctcctctcggtgcagcccagccgggcccccttccccaggccggagcgcccctcttccttccagctttcacttctgccggctccgcaactgagtgacacccagcgacaaccgactggggagtggtagaagcaactgaacggatgcgtgcgagctgaggacagggcgggaggagggggcacacatgccccaggggagcgaggagaactcttgaaatctccattttcaatcccttcgaaatcacgtatggtttccacaaagccgagtcgtgtcacgtggcaggtttacgtcaatagtccctctctctgctcctccattcgcaagtgtcttcctgggccagactcccctccacctcatgtacttgctatattgaggatgaagttttctatggtgggacactaaatataaagctatatagagaaagaatgtacggtcagttccctatggtttctgtagatcatcgtcatcttgtatattccccacaaagccgttcgcagcttccgggagaaggggccagagcccggtggggccagtttctcacagagggaggaggtggcctttgtcccctggagcccgatcagccagttggtgctactgctgtggccagctggggggcttcctccagaccaccggcctcggccccggcatccctgttgggcgtcagcctgagagtccctactgtgcgtcagaatccaccttgcgtgctgtgcgtatctgtgaacctggagcggttacttattttgacagatatcactttgggtctttttacattaaatttcttttctctaaggaatataagacataccccatagctctgtgtgagccagcaataccgctgccccctggcgacagggcagaccaatgatgccaggcagctgtcacacgctagtattggcttcattgtgatctgagccctgcacgctgggccttcagaattaatggccagcagtgtcagggatgagcccgtcagccagggcacaggcctggctcacagtcctgcacacctgctggcctggggagctccagccaggcagcgagtcctgccccgcccgcagctccctcccacaccccgcctggccaagatgactgcttcagggggctttggggaaagaattaggaagggtcagaaccaaacaatacctgctcatttacactgaggattcagggcgggagacaggagccttggggtcctgttaaaccacagacagttatgaactgaaagtcataacggggagaggtgcctggcttctacctgggtgctcaggaatgttcctcgtcacccctgccactctgtggtcggtgccctgcttcctcctccactcctggccgccttctccagcgccgcacacacagatgctcagtctcagagaggctggcacggcctggcagtctgagaaaagcgtcagttaggcacacctgcaggcccctcggtgggacagcggcggccttggagttaggagccaccctgggaggttgtgccggtgccatgctcctccctgtgtcttgtatgaaaggggccactgtgtgtcttcctccccggcgggagccccacatgtgtgcactgtaggacagcggccccgaggtggaagcctggctggagggctgccctataggtcttctcttcccgcctcccctgccatgcaaccagatgtgttgtgagtgggcagcgtgcccccacgctggagtaactccgcacgcttctgtctttcacggtgggcgctcggggggagcctgaggaaaacccccttaggtacctgtgcgaggctgtggagtgcaggccagagcaggg

SEQ ID NO: 4386 - DNA, 6000 bp, Homo sapiens
cttaggaacccatacctcctgatctgtaggggatacattccaagaccccaggggacgctcaaaaccatggataggactgaaccctatgtatgctgtgtttttcccctatacatacaaacctaggtttaagtttagtttataagaggcacagtaagagatgaacgatgataactagtaataaaatagaacaataataacaatatgccagcatcactactcatgcactttggagtcattatgaagtaaaataagggatacatgaacacaggcaccatgataccgcgatagtcgatttgattattgaaacagctactggctaacggtggggagtacagaagagtggatgcgctggacaaagggatgattcatgtcccgaatgggacagagtgagatggtacaaggtttcatcacgctactcaaactggcacacaattaaaaatgtaggaattgtttatttctagaattttccattttaaattttggaactttgagtaactggaactgcagaaagcaaagctgtgggtaagaggggactacagtaataagcaaacttttcgtcgggtggggacatccttctctgtgatgtccagggctcctccgatgccaagaggtagatcatgtgtactttttctatctgcatgtagttcagtcctgaccctggaaatcagaatactaattgtagtttggggcttcataatttggaaaggaactaatacgatagtggtgaataaccttcaagtcttgaaaaactgatttaccctaagaatccaaactgcggagaaaggcacaaattggatattatttctgaacacatagtaatctctgtctctttccagaacttacttggcattccaagagctagcaggacctgctttggcctgaaaccagggacagatctcccggggctgccagagccttttatagttcatgctagtctagactcttttttgtgctttccgctttgggatggaggtaggggaggagtataagtcctcggacccctgtgtcaaaactcagcagctgcatactcttggccaagctacttaacttctttaagtcttctttcctgtttttcaaaaatgatattgctgcgaagacgaaaagaaaaaataaaatgcaagtgctcggagcatagtaaatgctcaataaatgaagtttcatcaccatcgtcatcattcgtaatgtaatttctggccatcttgcattaatgcagagattcaggccatgtgacctgaggactggcttgtggtgaatttcccagggatttatttctaggacaggtgctcataagaattatagtattttagaacacatgcaataaggatgtaaataaaatggaaattttgtaaaatgttggtctgttgagttctgaagtgggataagaagataggtatgaaatgttccttagagattttgaaacaggaaatctgagttaacaagaaatgggctaaatctcaggacgttagaggctctctaatcctaattttataatgattcgatgacaattccagaggctttcaagtcagtaataaagcctttaatgtatgtaatcttaattgaaaggagctgaattaaaatgataacattgagtattttgctgagtttccgtagaaaccttgaggaagaagttaattttttaagctcatgtacatcattggggagcttagtaaattgtaagtcaaaatgaaaaagcttacatttgtcctaatttttttcttctttaaggctgtctagcatcctgccaagtgaataagtgggctacgatggcccattcttaattagatgactgcagaaaaactcttaattaaaaaagcaaaaatataatttttccctctcttgcagaatataaaattagtcataaagaagaatacttcccaaatttggactaagaaacatagaaatgtcatcctctaaactttttattaataattttatgattaataaagatttaaaatgtagtatctattgaatataaagattatattataataaagcaatattaagataataaaaagcaaaataagctattatacataacacgaatttagaaaaagagaatttttttttttttttgagatcaggtcttgctctgttactagggtagtggcttgatcatagctcactgcagcctcaaactcctgggctcaagcaatcctcctacctcaacctcccagtagctagaactacaggtttgtgccaccatgcctagctaattaaaattttttttttttttggtagagatgaggtctccattgcccaggctcgttttgaactcctggcttcaagcaatcctcctgttttggcctctcaaagcactgggataacaagtgtgagccattatgcccagccaataaatattttaataaaaattacaaaatatatagatatcaaatactattttctaatgaaaattgtaaataatttttttctatttaatgaactatagttttgtgcctagaaaaaggtctacttgttaatttcttttagtctgagtctacaataagaattaaatacagtaaacataaactttaagctgtatccaaattttatgtattttttctcaagtacacttaaaattgaggttagttagtatcctatgatctctgcactggaattcttactacaattgtccaccagaagaagaaactagggaattataactaaattatccaaaagggttaaattttttttaaaaaagctataagtaaaaagtttccatagctttcactgaagttgctttcttgtaaaaattattttgttatgtaattatgaaatataacagaatatcagagtaccaaaaataatattccaccaatatgcccatcaccagtattaaaacacttgttatatttgctttggttttctttttaaaaataaatgttgtatatcattctcaaacatatttttatacttttagaacagactagagatctataaacctcatagttttgtatttttgtgttttaaagtccacatacacggtgtgttttataaatagtctctgctctatgtctacttgctgttgaagactgtatggggtgaataagaaacatcgagtgtctaggccttttagcattattccacttacattgagagaactaaagaaataataaccataactcttgctagaacagtttacagcctagttaaaatgccaaaatgaagacgtggtaagcgtttttatattattttacctaccatctgggtagaatggagtaattaagaaacctgtctctgcatagttctgaataaaatagtttaaaacgtcaatttgatacgttctaaatttggaagatcaaatcatttaacattaaatcaggagccaatttcagaatatagtcattgctcatggaggactcttacccgactttttgggagctcactggttgttcctttagagactcgtaagagtaaacattcacataaataataacggtttaagagttggttagtcgtcatggctacagggataggtcaagtttttaggtaaggtgactggtatacttccatgagatagggcagaacattactagttctaccacggacagcgagtatttatacacatattgtcattctcctggaaatttacaaacctaccccagtaagtacaaagttaatgaatgctaaaaataaaatataaactgtatagaactcagtggtcgattttaataatgagttagatgccgcagaatgtaagatgtaggtaaacggacgcaaaaatccttgttttacaatgtctgcatctccgtagtactgacatttgaaaactttactttgcacatacttattttaagtacgataaatgaaagcgctgtggactaggaacaagagacaaattgctttcttgtccaaattgtctcagaccctgtattttcttagtcatagccgtttgttaagtaggcatttggtagactattgcatggaggattgcgagagcaagatattactatctgcggtggaatgctcgaatttcttctctcagcaaggataatgggtagcacagtctgactttagacccatccagtggttcagacttatagatagtatcccatactttaccgcaattccttgttgaattaaggcttgcacttcgaatacagactacacacttctgggtctgtcttgtaccacattgtctggcataggcgctcactgtatatttgttgaatgttaaagttctgtgcaccaaaaccgtgcactttgcatcgattatctgcgaaaagcatggtacactaaaactagatcttgaagaattcccatttgatcatgaatagaggtaatccacgtttaaaataccaggtgttgcgtaatctctacttggagattagccaccccgtgcgcccaggtgaaagatatcattcttccgtgcgatccgaagtgccgtggaagttagtgccctagcccagtccaggaggaaggggcgtcgtgccggcggttttaagctcggaaggggcaggggaatgagcccagggaccccagcggggcgcaggtaggaggctgtgcgctcgccgggtgcgctccggccccgattcccagcgcagccagtaagtggcgctgggcctcgggtttggcggcccggaggagcgggctgcggattacctgcagcagcggggagccgccgagctcctccccgcccgcccccacaccccacccccaccgctgcactaaccccggctcagctggctccgcgcacttgctcggaggagccggggccgagcggaccgccggctgcaggcagcgagcgcggctgggctgcggggctgcttccccgcgtcctccgggcccgggccgccctcctcccgcacagtgcggagcagggaggccccgcgcctcgaccacccgcgcccgagcgtccgcgcctcctcctccgctctgcaggcggggaccgcccggcgctcggcacccggcagcgcggccccctccagcccccggctcccggcagcagaagcagaaggcagcgccaggggccgccgccgccgccgagctccgcggggctcgggagccggccccggcgaggaggcgcggaaccatggccgatgggggcgagggcgaagacgagatccagttcctgcgaactgtaagcgccgtgcgtcgcgtgtgctgtcaggggaagggggcgtcagggcatccactagcggggtccgggcagagtgacagcgggcagcggggactcgcgggcggggcgagggggtgccccctgaggatgcgggaggagcgggcatcaccaagtgtgtgcaggtgtgcgtgttggggcgagggaaggcaagggcgcgtgtctgtgcgcgcgtgtggaaagctagaggatggagcgcggctagccggcggcaggcgcccgggctcggacccggggcaccggggacaggagcgtcggagctgcgggaaccgggagaggaggggacggccggtccggcctgcctggtggcacggctgggacctcccgggcggccgggggcagggtgcagagcagggtggcccgtgggggcgcggggagcggcgggaactcgggctgtttctgggaataccgccgccgggaggtttcttgggctttcgggctggacccgcgcgttgtcacggagcgaagacgttggttcgcttactccgtgtagcgtgcggcgcagctgaccgggggcgggggtgatggtgcaggacgctgcgcggaggtttcccccaagtcaaggtgctgcgaaagcggaggaggagtcgcctccgtggtccccgcggttcccggggctggtgccatccgtggtggtgctgtgaccgcttgcaaagcgtggaaggcatgggaagcgagcgtgtgtttgcgtgtgtgcgcgcgcgcgggtggtggtggggagaacatcgtgaacgtgtcgttctctaaatgctggcttattgcatgccaagtgaagcaaagtgtgtgtgtgtaagtgtaagggcagggtggctgcccgggaaaggttggctccacactaatacaattctttctccttaagtacctcttggcactgctccttcctttct

SEQ ID NO: 4387 - DNA, 6000 bp, Homo sapiens
gagccgtacctggcctttttgtgttttgtttttgagatggagtttcgctgtttcacccaagctggagtgtagtggcacgatcttggctcattggaacctccgccttccggtttcaagtgatttttctgcctcagcctcccgagtagctgggattacaggtgcctgccaccacgcctggctaatttttgtatttttagtagagacgggtttcaccatgttggccaggctggtatcaaactcctgaccccatcattcacctgcctcggcctcccaaagtgctaggattacaggcgtgagccaccacacccggcctaggtttttaataaatgaatgagtgaataattttatcacaccaaatactctattaaagaagtaaaggccctacattaaaaattgaaaaagtctgcttctcccttaggaaggttattttgttgtcatatttatcttttgctgtaattcctaagggcataaacttaatcattgttggccaggtgcagtggctcacacctataatcccagcactttgggaggctgaggtgggaagattgcttgagcctaggagtttgagagcagcctagacaatgtaggagatgccatctctacaaaacataaacagccaggtatggtggcacatgcctgtggtctcagctacttgggaggctaaggcgggaggattgcttgagcccgagaggttgaggctgcagtgagccatgattgtgccactgtactccagtctgagtgtcagaatgagaccctgtccctaaaaaacaataacaacaaaaattggccaggcacggtggctcacgcctgtaatcccagcactttgggaggccgaggcaggcagatcacctgaggtgattttcacctgaggtcaggagttcatgaccagcctggccaacatggagaaaccctgtctctactaaaaatacaaaattaaccaggcatggtggcacgcgcctgtagtccctgcttctcgggaggctgaggcaggagaatcacttgaacctgggaggtggaggttgcactgagccaagatcacatcattgcactccagcctgggcaaaaagaatgaaactccgtctcaaaaaaaaaaaaaaattagtcactgctggtggaagtaggctggctcgctgccacaatcctgagtgtgttgctgcacctcctgccagttaggaactgcagttgtagcagagagggctttggacaagacaacatagaacaggggtcgccatacctcaggacgtgggccagtactggtccgtggcctgttaggaaccaggccacacagcaggaggtcaacagcatgtgagcgagtgagcatttctgcccgagctccacctcctgtcacatcagcagcggtatcagattctcacaggagcgcgaaccctgttgtgaactgagcatgccagggatctaggttgtgcgctccttatgagaatcgactgcctgatgatctgaggtggggcattttcatcccaaaaccatcctcccacccccatctgtggagaaattgccttccatgaaatcagtccttggtgccaaaaaggctggggactgctggtgttctcaagtccagtgtcttctacaattagattgtaagctctagtcttttctagagctctagtcttttctccaccacttgctagccctttggcattgtgcaaatttaattttgttgagtctgtttctttttcttttgttttatttatttatttatttacttattttttgaggcagagtctcgctctgtcacccaggctggagtgcggtggcacaatctcggctcactgcaacctccacctccagggttcaagcgattctcgtgcctcagcctcccaagcagctgggattacaggcacgctccaccacacctggctaatttttgtatttttggtagagacggagtttcaccatgttggccaggatggtctttaactctgacctctggtgaccctcctgcctcagcctcccaaagtgctgggataggtgtgagccaccacacccggccctgagtctcagtttctacttagcacatctactaaagaagggtatgtgggcgagatggtgtcacataacccattgtgagggtcagaccgatggcactgggatgaggaggctcatggtgagcagaaggtgcagtgccccagtgagtctcttctctttttccacagtgtaatgttattgtttcccttgaaaaggtcagattttgaccaaagtccttgactgattcagaagcatgccctgaccattagcccttgaaacctacagttttttttatttgtagccaggtctgatgacaccctaattttcttgataactgagctggggtattggcaggtggcaacggcctgcctctcctgaactcttccatttgttgaatcaggaccaggtgatgccatggactccagcctattccctagaagtaggacagaattcgtttgaactctcagaatcaaaccatttcatgctttctctgtttcataccccttcttcccttggctctattttttttctggattttgctacaaaatatgtttcaactttataattggagagcaaacagacgtctggtattgtttatctcccttctgcctgtcttgtcccatattgtcaaaaaaaaacacccaagtctcttttattttagatgattggttttttgctttattcttaggatatggaagaatcgacccaaatccctcttttaactttctgttatctccacacttgaatgaaaagcagtgaatagcttgtttaatttttgacttcatcatatgaatttcatgaaacaaggtatcagaaacaggaaattttaaagtagggcagaattgggtaaacacacatacacactctctgtctctctctcacactgaaaacaagcagaaaaatatttttctccctccctttgtccagagcaactgttcatattcaggtgaacgacgtgaatgagtacgcgcccgtgttcaaggagaagtcctacaaagccacggtcatcgaggggaagcagtacgacagcattttgagggtggaggccgtggatgccgactgctcccctcagttcagccagatttgcagctacgaaatcatcactccagacgtgccctttactgttgacaaagatggtaagaatcgaggagccggcttttcagctaggtagacagtccctgctaaccccactgactttacaccccagcttctgtgcttcgtcagaacttcatggaactcacaagttggagacctaacctggtgtgtgtttgcttttaattgtaaaaacatttaagtttctactttgttccctgacaacttcttctctggaacctgtaagtcctgtgttctcttgtggggctcacctcttttttgctttcccaccaaaatcaaataaaaatcctcctacctgacatggctttgtttttttaatcttcttaactttcagtccacatgcatctgaatgagactgacctttacatttagtttgtctcattttctgttctccattaagttttttgtttttgtttttgtggtttttttttgagacagtttctcactctgttccccaggctggagtacagtggtgcgatctcagctcactgcaacctctgcctcccgggttcaagtgattctcctaccttagcctctcgagtagctgggattacaggtgcccaccaccacgcccagctaattttttgttgttgttgtttgtatttttagtagagatagggtttcaccatgttggccagactggtcttgaactcctgacctcaggtgatccgcccaccttggcctcccaaagtgctgggattacatgtgtgagccaccgcgcctggccatgttctccattaagttagaatctcctgtgacatcttttttttttttttttttgtttgagggaaggtcttgctctgtcgcccaggctggaatgtagtggtgcagtcactgctcactgtaacctcgaactcctgggctcacgggatcctcccgccacagcctcgctagtagctgggactgcaggcacacacctgtagtcccagctatttgggaggctgaagtgggagaatcgcttgaacccaggaggcagaggttgcagtgagccgagatcaggccactgcactccagcctgggcaagagaacgagaccctgttccaaaaagaaaaaaaaagataatacagtgtttccattgttaatcaatgcacggtctagaatctttgatggaattatggacattgcaaacactttccagagatctatactcaccacgttcaaaaagcaggcttctgttctaagcaggtgggggtaggaaatctctctttcttttaatatagtaaatgtttgatcagcgatcttatatttaatatttgaggtacttgaattattattattttttaatcctctgaatgtatgtaaacagttaaatcttaatgtaaagcccaatgtaacactgtgagagtaagtggagactgagctgtgtagctccgtctcttctgttgaaactcttcaggatggatttagtgcgtgttagggctcagggaggacaggttgagggttaagcatcccaagcatatgtttatttctggctgagtatttacagggcttaaagcctatgcattttgtctttccgcctaggacaacaaaagtaaaaccagcatgggttttggctctcactgttgtttttgccctctgtaaggttatataaaaaacacagagaaattaaactacgggaaagaacatcaatataagctgaccgtcactgcctatgactgtgggaagaaaagagccacagaagatgttttggtgaagatcagcattaagcccacctgcacccctgggtggcaaggtgagcttcattctctcccctgcgctcacatctgctcttaaaactgatgtatgcggcagcaacctagagtgtgtgttttccttctctcttcccctgctgacttgtggaccaacacaggatggaacaacaggattgagtatgagccgggcaccggcgcgttggccgtctttccaaatatccacctggagacatgtgacgagccagtcgcctcagtacaggccacagtggagctagaaaccagccacatagggaaaggctgcgaccgagacacctactcagagaagtccctccaccggctctgtggtaaggagaccaggcgttcttgcatccggctggctttggtgaaggtgggagggacctttacaactggaaatacttgtgtgtgttgtgttcataattataaactgtgacagagaatctgcatttctgaagtgaactttgctgccttgctggctagttttcatactggatgggcttcgggggtggggcagggggtggacatcaactcctaaacgtctattcaacatgttgtgtatatgtgcattttaagaaccactggtggccagatgtggtggcttatacctgtaattccagcactttaggaggccgaggtgggaagatcacttgagcccaggagtttgagaccagcctgggcaacacagcgataccccatctctacaaaaaattgaaaaattaactggggatggtggcatggacctgtagttccagttacttgggaggctgagcgggaggatcacctgagcccgggaggttgaggctgcagtgagccgtgatggcaccattgcactccaccctgggcaatagagtgagaccctgttttaaaaaaagaaccactgatttgaaggaagtatttctccagcatactctgagaatcatccaaaaagggcttctataggagtacatggagtgagttttacatgaaatgagatgtttacttacgaattgaagacaaaggccagggcatgggggctcatgcctataatcttaccactttgggaggccgaggtgggcagatcacctgaggtcaggagttcgagaccagcctgaccaacatggagaaaaccctgtctctacaaaaaaaacaaaaactagccgggcatggcggtgcacgcctgtagtcccaactacttggggggctgagggaggaggat

SEQ ID NO: 4388 - DNA, 6000 bp, Homo sapiens
cttccaggcatcagcgctgcctcttagcggatggccatttcacagtcccctctcctgagatggactgggctgcctgccaccaatcctcctaccctccaagctgcttaggccagtctcccatgcttgacgggacctcatttccaaaagaaacgtaagaaaccagtcacatctccccatgctgtgacctcatctcacggatcccctccacagtcccatgaaggaggctgggcaggtgcgacagggatgcaaagaagagactcagccgaggccagcggccattggaagcagatcggtgccctgactcacggcccagccctttccattgcacccaggaattggccaccctgccctggagaggcctcctgatcctggcctagtacctctaggtgacttctcctgccccagggtgaggcatctggattcgttctgcctttagagacaaggcttatccagaaaccatgaggcccgtagccgatagtacaagtcaagcaaagaacaagacaaaggttaaaaactccattttcaaactccatttgccattcttgcctggaactatgaatttttaattcaattctggcttaattttaatttaattttgcagtgaacaccatctgtttagattcagcactttgcatcaaacagtgagggtcagctccacttcctgtggtaggtctgcggctgccagtcctggagacgtgggttgcctcactgttctctctcctctctccttgccttcatgccccgacttcctgggtttcttctggagctaacgctaatacctactcttaggaatgttgtgaagataggctgggtgcagtggttcacgcctgtaatcccagcactttgggaagctgaggcgggcagatcacctgaggtcgggagtttgagaccagcctggccaacatggtgaaaccctgtctctactaaaaatacaaaaattagcccggcgtggtggcggacacctgtaatcccagctactcgggacgctgaggcaggagaattgcttgaactcgggagacagaggttgcagtgaacagagacctctccactgcactccagcctgggcgacacagtgagactctgtctcaaaaaaaaaaaatttaaaaaaaattcaaaaaaaggaatgttatgggccgggcgctgtggctcacgcctataattccagcattttgggaggccaaggcgggtggatcacgaggtcaggagattgattgagaccatcctggctaacacggtgaaaccccatctctactaaaaatacaaaaaattagccaggtgtggtggcatgtgcctgtagtcccagctacttgggaggctgaggcaggagaatctcttgaacccgggaggccaaggttgcaatgagccgagatggcggcactgcactccagcctgggtgagaaagcaagactccgtctcaaaaaaaaaaaaaaaaaaaaaataatgttgtgaagatagaattgcactatcaaaatagaattaatatgatcccaggcccttagcactcaagtatttatttgctgccattgttcttttttccctttcctatccctctgtttctttcatcttccccttctgttcctttcttctctcccttctctccgcagatggctttgctccttgctcttagctgtctccttgtcgcccacaccatgacatttccctgtacatttaaggtgaggttttcctgcatcccaagcctagtggctgcatcctttggctccctggagccagcaccaggcacaggggtacctcttttcttttcttttctttcttttttttttttttttcaagacagcgtctcactctgtcacccaggctggagtgcagtggcgtgatctctgctcattgcagcctccagctcccagtttcaagtgattctctcacctcagcctccccagtagctgggattacaggcatgagccaccatgcctggctaatttttatatttttagtagagacagggtttcaccatgttggccaggctggtctcaaactcccaacctcaggtgatccgcccacctcaccctcccaaggtgctgggattacagtcatgagccactgcgcctggcctcttttttacttttttgagatagggtcttgctctgttgcccaggctggagtgcaggggcacaatcatggcttactgcagcctcgaccttccgggctcaagcaatcctcccacctcagcctcccaagtagctgggactacaggtgcatgccaccatgcctagctaatttaatttaattttttttaagagatggggtctgactgtgttgcccaggctggtcttgaactcctgggctcaagccatcctcctgcctcagcctcccaaagtgttgagattataggcatgagccaccatgcctggctgatgggtacctcttaaaccaaggtctcatccaggtgcagtccagcactttgggaggctgaggcgggtggatcacgatgttaggagttcgagatcagcctgaccaacatggtgaaaccctgtctctactaaaaatacaaaaattagccgggcgtggtagcacatgcctgtaatctcagctactcaggagactgaggcaggagaatcgcttgaacccgggaggcagaggttgcagtgagccgagatcgtgccattgcactccagcctgggtaacagagggagactccatctcaaacaaaacaaaacaaaacaaaacaaaacactgtctcacggcctccttgtgccctgtgagctgagccatgataatggggacatgagaagcctaaaggaggaaggatgaaacaaattaggggcagcaggacacatacgtcagtgtccctaggcaaggcagtccctgcttcaagtccttgggacccctctgagtaccagagaccaaggtaaagtgtgtgagataactgattactctgaaaaagcactttataaacatttgagtacagtgtacatgttagcatcataccaggctgtctctctctgcaccaggccctcacagcctgaagttttaattcatggtctgaaactttcattgctcactttttcagaagagattcttgagggatttgagcgggcggcatccctcccactgcctgacccagctgcttcagtgtctgagcctcctgggcctccacggaagtgtctctaagccccaagatcctttgctcagttttgttttgttttgttttgttttgttttgttttccgagacggagtcttgctctgtcgcccaggctggagtgcagtggcgcaatctcagctcactgcaacctccgcctcccgggttcaagcgattctcctgcctcagcctcccgagtagctgggattacaggcgcctgtcaccactcctggctaatttttgtgttttttagtagagatggggtttctctatgttggccaggctggtcttgaactcctgacctcaggtgatcctcccacttcagccttttaaactgttgggactacaggcatgagccgccgtgcccggccccttttctcagttttggaacccagtttttttttttccacagaaagtgcttgtgttcctccatctctggtgcagcaattcccagtcatttcctgcccagtaaatacctaaccatggccacgtggcttctcagtacccttccctcaactgacccacttcagatccccgagtgccagggtgggactccctcagggctctgacccggcaccaggggcacccctcaggctgttggtggggccgttgcaggtcagagtctgagtctcctcatcttccctgacagcttcccctcttcctggcaagccttgctccctccaccctgcccttcccaaagggtaaatctaatcatgtcactccagtcctcaagaggaagtccaggctcttaacctggctttctgtgccccttaggatctaggccctcctctcctctccacttccattccttcttatctggccagctcctacttattctgactgacccaggccagacatcacccgttccaggaagccctccctgattgaacccctgcccaccccagtctgtttctttatctgcctccctgctgggctgtgtatttccagcatggccctgagttggtgctcagctgttagcacatgacacggtgtcactgaacacgttaccccaccttcaggagacccttcctgtcttgtgggtgtgggttttgcaggaagcatctcttggaacagaggagaaccccaagctgccttgggtgtgagaggcctgggctgtcggcccccattgctgctggctggtgtgtccctcctcgggcagggagggccctgccacaccctgcacttcctctcattgtgcctcccttcctgtttagctagactgttaggctggagggatttttcctccctttcaggacctgaatggagctatttctccttgcatctctgccaacatctcccaggatccacctctgatccactggtgggctcgggcatcaacagctttgggttccaatcccagctgtccccattcagctgggtggtgagaagccagggtctcacctctctggacctcagtttcctcacttgtaaaaagaaaaataacaaggtggctcgcgtgtttttgcgtgggattatgagggtttaatgagctaaggatgtctgtgcttctgggaagtgtgagccatggctgtgtcacccttgtccctgaccccgctgatgtgggggctctgcagagagcccagctgggtactcactggatgcctgcaagtccaaacatcctgttcttttttgaactcctcactggagaaacagggaaaagctgtagttttttccttccactcatatcgagtgacacaaaaaaacaagcctgtcggggccgagctgcttgactctctgatgtttgggagcagatccgagcagctgagcagggtggctgttcctttcctggattagggctgaatctgtgggaaccagaccacccctgagacaggaggcagccctgatgcctctccagggcctgggcctgcagcggaaccccttcctccaagggaagcggggcccggggctcacgtcttccccgcccctcctgcctccttccctgcaggtgaacttccacagcccccggagtggccagaggtgctgggctgcacggacccaggtggagaagcggctggtggtgttggtggtacttctggcggcaggactggtggcctgcttggcagcactgggcatccagtaccagacaagtaggtgccttcgtgttgcatggtgggcttgactcactcctgcacccggctccgtcagctcgggcgaggggggcttccctgcttaagccggggcagggctctgaggctaaggagggagccaggcccaggggggtctgggtgctgagatagaccaagacccgggaagtgggcagcgtgggtgatataaaggtctcgcacttgagtccacatcctgtcccagcaacttactggctgtgtgacctcggacaagtcacttattccctcagcctgtgtcttctctaatttaaatgggaaaacagtacccaactgggggatgggtctgcggactagagataacatatgtcccatagctggtgcctcgtaggacttcttcaactttagctctgggtactgttgttgctagaatgtggggtaattacacacataggctgacattgtctgctatctctagttccaataaaataacaataatgccctctgtttactgaattatttcctcggaccaaatacccaaataccacacccctcgcttcagatgcaatctcatttcctcctggaggcagccctgtgaagtgtggttacttttggccccttttccatattaggaaactgaggcactgagatagagtgacttgctaatccaatgcggaagttggaattcacccacaggctactgggctcaagcccaggctccacctccctttgtaatccaagtacgctccagagcgcattacacccccaggagagctgcccttccagatccagctgcccatcgtgttccttgatcggtgcctttgtcccactttgaatggtga

SEQ ID NO: 4389 - DNA, 6000 bp, Homo sapiens
gtgtttcggttgagagaattaattcagtggtctggcagctggattagaatctttccactgccacttcctagtcacgggacctcaggccagtccctgatcatttctatacctccgcttcctcatctacggaaaggagaaaacaatagaatgtgtatcatttcattgtgagcgtgaagtctcctgacatccacagtgcttagaacagcgcctggtgatggtacagccagtgggttctcagctgctgtcgtcatcacggttgttattatcatgggtctgagggtggttaagagctggtgtatgagaaggcatcactcgccttgtggagggctgcctgggtgtgggtcagtgctcagcactttacctgtgttagccccagccctcatgcccaccccacgggcagcactgtggtcatctcattttacagacgagcaactgtgggtgcacagggaggtgaagccacttcccaaggctccgcagccagcgatgacagtcaggatttgaacccaggcagttggtgccagagccgggcagtctcgcagggccagggctgcatgtgtgtgcatttgggatattctggatggggcaggggaattgatgggaagaggatgaagatgtcaggagtgccagggatggatgaatcccaaggacatgagagaggtggtctggtcccagctgggtgcactaagtaagatggagaggtgggaacatggactgggtgccagagccctctgcagctggcctcactgtggaaggcccttgggccgtggcgctgccttggggtcagtgtcagtccctctgactccccagccagctctagcaggatgcaggcccttcccttgcctcctcaagcagctggggcagcctggtgttttcacacagacttggccaagcaggaaggggaaacagtgatggggcacggagcccaggagaaggtgcacagggcccaggttgctggaggagccattgtgcacgctgtgtacgctggggcactgctgcagcctcttttcagcctggacatcaggcctgcctttccatgcccacctttgaagtagcgacatccctgctctgatggctcccacagcccccactttggtctcatcattcccagctctgatcctgcctccgagtggtgggagccctagagattgtcagtcactgagctggtttccgggacacctgcccctgaggccatcatagtctgcaggttgtgctcttggactggcctccaggctacagaatgctcccctgccttaggcatggactgggaccaggcccacatccatagcatctgcacccagcagttcccaaacagcttctcggcaggaatcccccaaggattgttactaaggcagctggaggggacatgagggggacaggatgtccagagcaagaacagaggcagtgtgttagtggttagaaacacagactgtggagacagatagatctgaattttagttctgtcccccacttactagctgtgtgtccttgggcaggtcatttatgctctgagctgacttcctgctctgtaaactgggggcattgttacactccttcatggggatagtgtgtagcacagtgcctggcatgtagggagtgctaagtgttagccccccagggcagtaggatggtggtggggggttatgcatgcatgtgtggttgtcctgggctcatgccaccctctctgcagaccccaactccagagaccttcctgaccacaatccgggatgagccagaggttccggtgagtggggggcccagtggagacttcgagctgccagaagaagagaccacacaaccagacacagccaatgaggtggtagctgtgggaggggctgcggccaaggcatcatctccacctgggacactgcccaagggtgcccgcccgggccctggcctcctggacaatgccatcgactcgggcagctcagctgctcagctgcctcagaagagtatcctggagcggaaggaggtgctcgtaggtgaggcttggggtctgggccaaggggagcctgggaggataccagagtgagacagctggctgggcctcagtttgcctctaggaacccagaaaggagatcagggcgtggtttcctaggagccagataggaaggaaacttgagaactcaaccccccaggacctgccttctggctcctcccaactttcctccttcccaatatccaaccctgacttcatgtccatctctaggtcttccctcagtgtcctctgacccctctgtggactctgactttgatccctgctttcctgggccacactggctgaccccctgggaccttacttcctagatgctaatctctgacccatccttcagcttgaccttccccagtttttgaccccagtccctgtggacctgccctggccgcatctagggagtctgtggactcctggttcaaatcctggctttgcactcaaggcaaggtacttcacctctccagtcttccttctcttcatcggtagaatggggatagtcattttgcccttaatcaattctaagaggcacatctgttcacatgttaagtcttctgtagttggggtatgtcatatttagttagcagagctttttctttcctagcagttataaaatactggggcatcttatgagtggtggcattttaaatttgatgaagccctcagatgacccctccctcatagggctggtgtgagggttcagtgagttagtgtgttgggcgattagaatgcagccagtgaaggcctatgatggtacccagtgctggtagtagtagtattgactccatcatcactccaactcagatctgggactcccagccctctcctcaccctggcccccacccctgaggaccctttgccctggttctaccctgcctctgggccttgacctgtgccctcttcttccacagctgtgattgtgggcggggtggtgggcgccctctttgctgccttcttggtcacactgctcatctatcgtatgaagaaaaaggatgagggcagctacacgctggaggaacccaagcaggcgagcgtcacataccagaagcctgacaagcaggaggagttctatgcctagtggagccacagtgcctccctgcagcctcaacaccaccctgctgtccagtccccagcctggccccaccagcccaagcctgggactgggcctggaacctggccccagttcttctctgccctctctcccaaggtctgcccaggctgccagcctcacacagatcttccccgaggaagaggggctgctgccatctgccccagactgtgcccttacgagctcatctcttgttcccctcatccctgccaccagtctggggcttcaggacctcatgtcagatggatgggaggaagaaagctcctgattggctggtggtggaagaaagggtggggcttgagatgagcctgagccctgacttggcacccacagtgctcactgagatctcctttttggggcagagaggcactcaggctggtttccaggacaaacatttggtaaacacagcccttgaaatcatctagacactgcaacctcttgctcgtatcccagggcctctctctagctgggtgagagggtgtcccttgtcaccagcctgttttgtcctggtctctctggggttgttgaatctctcctcttgcctgccaagtacacatgtacccagacttcatttctttctgcatcttcccccaagaaacagcttcctgagggtgctggggcagccactggtgaggaggggctgctctgatgtccctcctatgaggggactctgcacagacaccattgcccacactatcaccatattttcactcagtcacacacaagacaaaagcatgcaatgacaaaaccatacgcaatcctgaccgcccagccaatcaagacatatcacagaacacacgcgtccttccaagaatgtttatcctcatgcatcacttacacacccccagacacgtactgcaatgcaagtcactagtcatggtcacatgacagtgacagtgtggcctcctcctaccccaaatacacccacactctggcaccacacacattgtctccagctttcaggcttactggggagggtggaatcgagccagaacaatcagcccatattgggtccccctaagttgccccgtcatactcagtcccatgccatggtgcccacaccaaccatgcagccgccaaccccagccagtgtcagacacaatcccatgtggatgcacagtctcactccacatgacctgctctcaatgctggagggaaacaggcaggcccttgcctttctcggaaaaagtgtggggccacagcccttttagggcattgcatgcaggtgggcctggcttcacccctacctgcttcctccccaccgcagctggcagagggggaggtttggggccagacccccactagctgggagcctgggggctcctctaaggctgaggaaggaaatttggccccaggttgttggggggtcttgggtctcccaggacggaaggcccagggcagggagggggcatgtggttgggctcctttatctccctgtgtccccttcctgctttgagctagggggctgactctgcctcccaggacacaagtctccaaagtgcctgtgagggcgggccctccgcaccctctgccctctgcctggcaggccaacctcagcccacctgcccagaggccctccctgtggacaccccctcacctatttggccaaacaattctggctgcagcttcaggggccatggctggaagcagcccctgcagatccctcaggccccgaggtcagggtttgagggatgagaccaggtgatagtgggggaggggttacttcctttgttacctagcaagtagggctatttccatcggtattttaaatgtggggtcacagatcttttggggagggtgtgcttggcagggggcctcttggagccaaagggatgtggtgtgagttgcgattggctggcactcacacccccacccctcacccacatcccagattcaagtcaggaaggcaggttttatttcagggcccttttcaagatgccctggcagcagatttctgcaggatgaggggtagcggtgtgtaggcagtgagggggaggttccaggggctgtcccacagcctgtcttttccaggctgggctccatcttccagtcccaaaaccctccttcacagggcccagaggcttgtgaggaagccaggtggacccagccttagaagagtgggcatggggggcccctgatatctggagggggcgggttggcctcagtcatctttggagcagaagggctgggtcctggggccacagaccacaaggctcagcctccctaccctgctccctggggtgctgctgtcttggagagcacagctctggtgagacggcctgggcaggccgaggctgagaaaccagggaggatagaggagaaaagggcttgggcccccagccccagaagatgctggaccccaggtgggagacccaacagtgggtgcagtttctcagtagggctggagccaatggtgggggtggccccggcaggcctggctcctcacatcccaggggttggcttctgatttggggcttgggctccaggcactggcttctcttctctgtgtccttagcatttgagagaagaggccaggggccttgttcatggatccctggacccaaggcagatgtccaggctttatcctcctgaggatgaggagtctgaccagcccaaatctgccctggccggcctgaccggggcaaggcagtccaagagagttcagtgaggaccagctaggctctcccaggtgcaatgtgggtgcagggccctcatgtccccctacccctgcctgtgatggagtgttctgaggggctttggcatttgctggaagcacagggagttccaaatgagagggagcttctgtggcttgagagcctctggggccttggctgccagagcacgaggcaggccaggacctggagagcccagaccctgtctccaggaggccaggaggccagatggg

SEQ ID NO: 4390 - DNA, 6000 bp, Homo sapiens
tccccagggccctgccaccacatccccaggtgtcacatgagccaagcctgggctggcctagcccctaccccccaaataatcttaaaataacagagccaagtgtattcctgctttggggcagggctacagctgcttctgtggtagagaagcccctgacctcatcccccagggaaccagcagagagagcccctgtgcactaggctgttaggtagtctttaaaagccaacaggtgctcttttgagtgcccctttagaggagaagatatgttgcccactgcaaagttacatgctggatccttctgatctaagaaagagattctttgcctctctttggcatatgcatcaagataaaattcatgcagagtaagaggatccaggaaaaataatatctcattattatactgagaaaggggcagagttggagctgaaacccatatcctgttttttaactgagtccataagtaatctagaagagtgtcactataacatctttcaaataagccttacatcctcattcaactttgaggtggccatgttctacagtttataatgttctttgcattttcactgattttagctatattatctcaaggattctacatagctactatgtttttaaaaaatcaaacaacaaaaaagaattcttgtcataactctcagcaattgggcaaatcacccattttccctaagcctttcttacctccaaatgttgctaatagtatgtatcctacccttcttctgtttaatgtggagattgaatggagttgtgaatgtgtaagcagtttatgaattgaaaagtgctagaagaaaaaaaatatcctcatgccagtagaacatgagctctatagggcaaggacttctgttttgttcactgcctaaaatggggcgtggcatgtagcaggtactcagtaacaggtgttgaatggatgacggaatgaatgactcattgaatagcataccactccaatgccagggagcccagacaccagctgtgcagagaggcatagaattatcaagtctgaggaccaagggaccctgcccatctgtcgtttcagaattccttttgagaagccaggatgacaatgccttttgcagtggtgggatctggtccctcctcaagaccttttcactagaggaaggttgttctcttagttctcaagagatgatgattgtttacatgaacatgccaagggtggagaagggctggttttgacctgagggaagtttgtagctgaaaaagtgtgttcatccttttctccagtgatttggacccactgaagtctgagttctctgctgcattgtaactaagcattgggctgggctttttcacgtggtcatctcattccatcacctgctactgtaaaacaacaggaaatcatggtacaaatccaaccatcatcatttttagctggggcccttgggccagtttcttcacctctctgaatctcttttttcctgccaaaaagtggtgataatagaacattacttcgtggggttactttgaggactagatgaggcagtccttgtttagaagtgatgccagtacgtctgtgagacttacgtgcacacatattcagcttaacctgctgggcactgtccacataagcttcctcaagccctggagcaaacctcagcctctagttgctgcaggttcttttagaagctgtcttgtctaatcctattgcaatcatacagtttgggagtcacatggactttgatctagatcacaactctgacaccttttagcttgctggccctgggcgggttccttcatcttttttagccacaggccttcatttgtgaacaaggaaaacaaaatcttccccgcctactgattatgaaatttaaacaaggcattttctagaaagtgaccagccctgacggtggtggagggtacattctcaacacaggttaatattcctgccttcttctctcttttttctcccctcctataggccattgtgaaggagaaagagagactgctaagtctcctgggtttgaacttggatgatatgtcctgggcttccctgaaggcccagggctgagatagatattagagtaaagcgtctttttattttggcaattttaaggtttttattttaaaatattttgttttcaattaatcgcaatcactattctgtgatttttaggacagtttaggtgaaccccaccttaagaatgaaaacgaacaaaactctttccattccaagaagttccactaacaagcaggttaccaaaagatcacattctaaaaaggattttaccataataatggtattattttttctttaatgcagttaaaatatgatttgattagaaatactcattttcccacacaattaattctactaaaacatggggcctggcaaataataggttctcagctaatgtttgaggaccacctgaatgaatcagtgattgaaatgaatgaacaatatgggactgtgccctcattttgagatatgaaattaggcgttcacaggcctttcttttctttccctcccatcagaagaaataagcttctaatttgactcctagaaaattttcatcacacaaaggagattgagggcaatgtgaaacactgttaaactaattctgttcagccccagatacaggcagagtccatagatatagagcttttcagacttattttacatatggagcccaatattcaaaaataagtttttgcagaaccctaataaataaaacagatacaagtggagcatctctgattaaagttgggtcaggggatttctagtctcccctccatcaccattttcagtagcctttgagtcctggtacccctggggccccagggaacactgtaaaccactggtatagtgagaggaccaaattaacaaccagctctgatttcttgtgatcacaaattggtgttgatagagtttagggactgagtaccaggcccagatgaaactcttacagttactgattcacaaagtaaataattaacaggaacttatatatattatttttcctttgtggctaaactcatatatatgtatatgcctttgggtggctagaataccaagcttgggacttagagacctaagttaaagttccgactttgttattaaccatgtggcacagggaaaatcactgaaacactatggatctttttcctcatctgtaaaagggcagtaaaacaggagaaatatggcacaaaccagggtgaattaaatgccatgataattacaggtggctgtcttcttggtggatttcattagatcagctttctggttttactccttaaacataattgttatccagagttctattttcagatctcttctcttctttcctctcttctcctctccacttattttccctggatgacacatactgattgtactagagtacatgccccattgctccagccctgagaatgtccctcagtcccttacctatatgtgctaatgataaagctcttatttattaaattatgtatacttgtatatagcattgcactaggcatttttcataatttctttatgagtaaagtggcaataaccatattttatgtttagctgaagcttagagtgggcagccaacttgcccaagggcacaaagctacatctgttgagttgaatttcaaaccctgactccaaaggctgaatcctacttctacttgaaaattgtacctggacatccttcggagtcaatagattggatggaaccatgcagagcaactccccctccactccccactttttttgggtaacttttaattttgatatgattttaaacttgcagaaaagttgcaattaatgtgcaaaaagctcccatgtaccctttcctagatttaaacaactgcttttaaaaagttagtggagaagaagaaagctaagaagaaattcggtcagaaacgtaggagaaaagccaaaaagcgtcactgaagccaaagaatgtgagtttcacaaagagagaaagatcagtagtgtcagatactctagagaggtcaagtataatcacaactgaaaagtaaacattggggttagtgactcaaccaagtgttgaatatttgaacttgtttctgcaaggaattggtgaaggaagacatgggaaatgatagacttgggctgaagtttctattgtgatggcaaaccatgaatctgtcgtgataccacagttctcctggtagccccccagcccccaggattagagatggaaaaggtgagtggtagaattgatggaaagcaggcatttcaccaagcagatatgagagcgatgaggaagatgtaggtattggtgagtggtcttgaggtccagactggatagtgagggaagaggggtcaggcgaggatcaatagatgggatgaaatgtgggagccagaaggctagaggggcctatgatgtaggacaatggtgcattgagacccaagtcattctgctgggaacacaggcagtgggggaaggaatggaatgactgggtttaaaatctgtgagttggactttcctggctcccaggatagcaaggccctgggtgtggctataaacatggttgatcatgagttggaggaagagcagggtgtcagatctcataagagggcaatgccctccaaaacaagggacatctctccattgaaacaggagggaaaaaggaattgagtacacgtgcagatagaattgcattcttagagagtgggacaaaggacccgcctgctatatggcttctgttccctccaaagagaaagccaaagtcatcggctaagagtaaggggagataagaggaagaggaagatgttcaaggaatgtctagaacatgtgaaaaagtctttgagcagaatgagagagtgagctaatagagataaatggtagggtcactgggcaatagctaggatttttttgagatgagtaatcaggagtttataatagacattcatcttcctactagtgatttttttcacagcaaagctcaactgtatggtggcaggtatggagaaggcaggtagagagattcattccaaactgatgtcttctaggcaactgatgaaaggaggaagaagaaagggacttggaacaagcaagaaaatgagcctaatggtggcccatgtgatcaaatttgcataaggacagaagacaagaccgaaggagctgatgggtagagaggagatattgctgtcaacagagtggaggtctcagtggggaaagatgaactctactggaggttcagaaaacaactgtgaaagaaatacttgagggtgggagcaagatcttgactacagagggctgcataggaggcagtggcataggaggggaagatgggcttcagtcaggacagtagtgggagtaggaggttccgaaagatgttgcagctacaagtaggatttgttttccttagaactggtagtgggaggtggttccagaggactgtggaaagggttgggagggaggccaataggagaagcaagggaaggcagcatggaacaggatgggaatcagatttggagagaagatatgagaccagaggcacttgcacccggagcagttctcttctttggcaccaagttgtttcagtgtcagaactggctgtgggtccaggtggtagctccctatggtcccctgggatactgttcccattatatgataatgtccagaggaaaaatgggagtagctgcagagctcaggcatggaagatctcagggaagtctctcctgaaagcgatccagaagagcatttcagggaaaaaggcaaatagagaaacaaaatgatatgttcattcatttagtgagatattgagcacctaccattctgccagcccatctgggtcactgtgatgaactttctatctgttgatgggatcccatggagctggctgctcagggtgatgtctgtctgtctgtccacagaacccctgactttgctcagatagcagaggaaaaaagtagctaatgcttcattttgaacctagtttaaggtgctctatgctatctgcagactgtaatattttaattaaacccctctaagcccttaaagtggtaac

SEQ ID NO: 4391 - DNA, 6000 bp, Homo sapiens
aaggatttaaagtccttccttaattgctccctccagagaagtccctgatccatttctgccaccttctcaggggaaatggctcctgtgtctcgccgctccgcctgtcaaaacatttccccttacatttcacctaaacacctcctctgctgcagtgtgagcccttgactccagagccttctccttgttgccatggcaaacaagcagcggctgtactccctcctcccttcaccccccacacacaacccccccttcctagcactgcagcttctgctctgctgtccccagcttgggttcctccaaaaaggctaagccccaaactagctcccattccttaacctacctactgccatcctggccttcccctaggacccctccccagccacttccagccctgctactctctccaggcccagaacaaccatccccagccctcaagtactctgcactagttactacctgctgctgttaccctatgagtcagcttccatctgctctgggacgccccagaaaacagacccaggcagcccctagtgccacagccttattcagtcccattctcctctttgcccccattctcagggggagcaaaaaagagcacaaaggtaggggtcttgggccttcgttggtgcctccagggttgctagcactacgtacatatccttggggactcactgaccccattccttgggggcccaaccacccagcccttcccacctcccaattttcagccagttccttactagcagcagggctgcaaactgctcgctgtcattcttggcctcacggagggctcccaggtagcgctccagggtggggtttcggccctctgcctggttcagagctggctcgcaatccgaggccatgatgctcgccttgcccaactgtgaacacaagagggactgagcatccctctgcagaggagggacgggggtggggtgggggtgagagtggaggatggagggagggagggattagcacagagggaggggaggagagaatctggaggggtggactcctcaggactgacctccccccagaagcccctttaaggggctggatctgcaaatccttagggataaagaagggaccctggtccaaggtcacctccagaaagcgggaaagaaggaccatgcatgctgctgctcagccggacagctctcctcaccagtctcctgggggtgggcgggagctggccccactgctcagctgtccccctggcaccggaggctgggttttatctccctccacagggacacagagggagtgagtggtgaggacagacagggagaaatggagacatacatgggtgaagttcgattatccggactcaggctgacatgggagaaaaggacaccccaggcttcctttcccctcccttcttcagaggcagagatacgcttcagaagtgagaatacaagacgctcaacagggaaggcttggaggcccctttggggaccccacccctccagccagggctctcagtcgcccccgcaggctccttgcctcctctcctttccctccctcgggtagaggctgcagcagcagcagcagcggcggcggcagcagcagaattaaccccttgcgctccctcttctcgccctccccgtcccgctaccagcctgtggatgccggcaggggctggagaagcaagagggggtcccggatagttcccaggacaacggagaatccaaaagccggataatcgaagcagggctgctgagatggggagatgagaaggggaggagggttcctggcggtcaccacctgtcccgccgcagccaggtcacaacacgacattgatgaagtcacgacagggcggcgatgagatcacacttcacgatggcgcggtgatgtcacggagagatcacgtcaaaatcacgacatgggagacagcccccaaagatgacagggcaaattaaaaaaaaaaaagatatatattgaaaagggctgtgacaaaatggagtctcgacagggcacgatggtgtcgcgatatggcgcgatggagtcgcgatagggtccccggggtgtgtcggcatcgatcagcgccggctcggagaggccccggctgggatgcaggggagggcccgaagggggctgagctcaccaggctgcggccccgagcggcgaagtcttctcccagcgcgatgctccgggagcctcgggccgctgctcacgccgcgttgcccactcctggctccaggctgctgcagctccacccccacccccgcaccgctcttgacgaatccgcggctgcttcactccgggctctggccaatggcaagtcagggtgctaagcagtagggggtgccgccgttgccgccatcttgcttgtgggtattgcccgagtctgggggctggggctcgagcgaaggaggcaaggtgcagactgcctctggagagcgggcggcgagaggctgggggcccagattccttcgcttgtgcgtagttttacccgcccagcactgcccctcctcccccttggtctcgcggccggcattgcccttcccgggggaggggcgggagggcttggttagcatggagagtgtgtttccgggtcggtcccggggaggtgggaggaggcggtgtttccggccgccgtcgctgtccagggaggctgaggcgagaggtagctgtccgggtggggagcccgcactaccttcttcctcttcctcctcctcctccgggtgaggggagcgaaggttgggggtccccgagcccatggaccaggaggaggcggaggccgccgagagccggggccccgctatgtggccctgagccccggtaggtggccgggggcggctggctgccaggccgaggaccatgggctcaggggaggggcaagcgggacgggcgatgtcagcggctgcgctggccggatgttgggtccggaggtggcgcccctggctcggccagggcagccagctgcttctgtccttgcaggtgcgcagcttgggtcccaggctgaaccccgcttctctcgggcctgggcctagtcatgcagctccctccatcccctgagagccaggcagacagccggggttcggggcgctgccgtccttcttccaccttcgacctctgcagcctagtctttagttgctgtctctgatgtttggtctctccaccgagatagaaagttggtgcagaatgaagaggggatggggttgagcacgatgtgtccattataatgtgaaacctgcctcatccacgattttgaaaattatgccccacagagggtcctgtagtggctgcagtgagcacaaaggtgaaatgaaggaagtcaaaattgataacctctggcgggattccaggaactctttggcttctggtctcatagtggttgtgtccaactgacagtagttgcagttagtgaagagcattagctgactctccttgtgctctctcctgtgattaacagactgaaaactaggaacaaattggaaagacgacctcccagaacaatctgttcatttttccagctatttggaaaacagtgtctgcaaatataagcaaagctattcatggcagtctgttctgtaactttcccaaatatctgagactttttaaaaaagagctttattctcgattactcataccaactgaatagattgtttcagacgtgctccatcgttgttcaaacatatcttatcgctgtgtacataaatggagttccacgtatgtagttgacagactgaactgtgatacatcccccatcaacctgaagtattaagtaaacattaccccctgctctgtctgaacagctgctgcaacagagagtgcttttattttgggtgtacttgtaacgccctaaatgccagaactattgtgagcttctctagattttcatttgtcaagtattgtgggggtgtgtgttctctccctgggttgttaccctttgattcagtaacaaactattcggatcttggtgatgtgttgttgttcttgcgtttggtcagcaagcctttaactggaccctagcagtgatttgtgcccttaggcaattataggtttcagaggaatgactggttaggagttcaaatgaaattaactctgcctttctcttagacgcaagatttattagacatggcacttctaatcagcttgttagtccagtggtgtttattactccatttttcaaaagctattcatttcttttctgcttctcccacccacctgtcaggctattgatgacagctgttgagtcaccttgagttttaaatccttttgtggtaggcagaaatgtgttgggtaagattcatacacacccatacatgcacacatgcatactcactcgttccctcttgggaggctagagaaattgctggatgtactttctaacttaggctccatttcataatctcttgaacatgtctctggcccacacacctcctttctgccccctgctccctgaaatacaactacaaaacaactagaaataggaatggatggaagtgaatgagaacgatgaagtccttcagatgcatgtggttctgcaaaagccttttcttgggtgggctgcaccttagttttgcagctgtgtgtatgtctgtggctgtttcttggtattagtcagtattggtatccagcccaggcaatgctgatctccctgtatgctggccgtggataggagttaggggttggcagcctgtgtcgtttgctggatgtagatgacaggtacatagttggacagaagtttttgaattgcttcttcagaactcagtcaaccctcataatgttgccaatatttacgtactaatttagacaatatagcaaagttttatatgaggggagaaatttatggtaaatgagtttttctgctggaagagacctaaataatccagcccctagattctggagtagccagcatagtgcctgacgtaagtatctgttgaatgcagggattggggtgggtagcattgaggtgtaaattgaatagattttcatgataatagtggtgggcggagacagtagcagactggagagtgcatgccctgcctaaagacatttgcattcagaaatttaaaaaatactgggccagacataaccctcaggttactttacctctgagggtgcaacctcttctcctcaaaagtaagaaagtgtgtttggtcaaagtcacaaagctgttagtagcagaactgcaactaaaactcagagatcttcttgtctgcgggctggtactctttccattctaccacataggtgatttactgttagattaaaaaaaaaaaaaggaatataaagtttcagttttcagtggattcatttgatatcccttgctgtgttgttattctgataattataggctacctcaaagcccaggtttaaaatttataggcagggttgagccgttaaagacaaacttgaaatttttctttcccctaatctgtcatattttctagcattccacatttccaggaattaattattaattactcggcatgtaatttcttctctttctgtccttctagtgtactggttctgcctgtctggagggccatggagaagaggctgggagtcaagccaaatcctgcttcctggattttatcaggatattattggcagacatctgcgaagtggttgagaagcctgtacctgttttatacttgcttttgcttcagcgttctgtggttgtcaacaggtactattttctttatagatttaagatttttttttttagaaaagggcattttatgtgagtccctcagttcattttaaggactattaggaggcagaaaaaacaatctgctaattgacagaaatggtcatccttttggtgactgaggtctgttgggtttatttatttgttttgttttggaaccagagtttaaattggattctttttcataagggagaattggcacaaccgttttaagacttgataaaagtcaactgggtatttccacttaatgactataaaaccttgagcaaattacctattatctttgaggaagggttattatctacctcatggtttgatttgagggatagtataattaaagc

SEQ ID NO: 4392 - DNA, 6000 bp, Homo sapiens
tggctcatgcttgtaatgccaggctggtctcgaactcctgatctcaggtgatccacctgccttggcctcccaaagtgctgagattacaggcgtgagccaccgtgcctggccttattctcttaatatcttttggagaggagacgttataaatattaaatctataatttttatttttatttttattttttttgagacggagtctcgctctgttgcccaggctggagtgcagtggcgcgatctcggctcactgcaagctccgcctcctgggttcacgccattctcctgcctcagcctcccgagtagctgggactacaggcgcccgctaccacgcccggctaattttttgtatttttagtagagacggggtttcaccgtgttagccaggatggtctcgatatcctgacctcgtgatccgcccgcctcggcctcccaaagtgctgggattacaggcgtgagccaccgcgcccggccaatttttatttttaaaaatgttttactatatatatagtacacatattatatatatatataaatatatatgtatttttttatttctgtagagacagtgttttgccatattacctagactagtctcaaactcctgagctcaagtgatcgtctgcactggcctcccaaaatgctaggattacaggtgtgtgccatgatgcctggccttttatacattttcaaactttaggaattgtggcttttagtgtcatatcaaataattttttttttcttttttttttgagacggagtctcattctgtcacccagactggagtgcagtggcgcaatctcggctcactgcaaattccgcctccgggttcacgcaattctcctgcctcagcctactgagtagctgagattacaggcgcacaccaccacacctggctaatttttttttgtatttttagtagagacggggtttcactacgttggccagactggtctcaaactcctgaccttgtgatccacctgcctcggcctcccaaagcgctgggattacaggcgtgagccactgcgcccagcctgtataaaataatttttacctaacacaaaatcaccaagatttctcctagaatcaccatgttttctcctagaagttttattattttaggctttccatttaggtgtatcatctggtatttttgcaaggggaaggactgaagtgtcatttttttgcatatggatgtctgttctaacatcatttgttgaaaagacagtcctttctccattgaattgctttagtatctgttgaaaatacaaattgcttttgtatctttgttgaagttgttgtttgtatatatgagtgtgttaatttctggaggttctattctgttccacttatgtatttgtatatctttacaccaataccacatatcttggttactgtagttttcatgacttttggtcatgaaatcaggaagggctagcactccaactttattctttttcacaaattttttggctattctaaatcctttgtatttccatataacttggtttgtgcgtttctaaaaaaaaatctgctgggatttggattgcattgaatctatagatcaacttggggaaaacggacattttaacaatattgagtcttccaacccatgttgaacaaggtatacctttctgtgtatttaggtctttcaaaattcctctcagcatgttttttagttttcagtgtttatgtcttgcagagtttttggtcagatttatctctatgtatttcatatttttgatgtattagaaagggtaatgtttttaaaatttctatttctcggccgggggtggtagctcatgcctgtaatcccagcactttgggaggctgaggcaggtggatcgcctgaggtcaggagctcgagaccagcctgggcaacatagtgaaaccccgtctctactaaaaatacaaaaattagctgggtgtggtggtgggcgcctgtaatcccagctacttgggaggctgaggtagaagaaaggcttgaacccaggaggtggaggttgcagtgagccaagatcgcgccattgcactccagcctgggcaacaagagcaaaactctgtctcaaaaaaaaaaaattatatttctcattcttcattgttacagcatgaaaatatatactttttggtatattttgtatatagatcttgtgttttccaaccttgctaaactcacttattacttctagaagctttttgtagattccattagattttctacatagattattatgttgtctgtacttgctaatttcccttttgatgttttctttgacacatgggttatttaaaatgtgttatttagtttttaaatatttgtgtgtttttccaaagatgttctgttgttaatatctagtttaactgtggttaggggctgggcgtggtggctcacgcctgtaatcccagcactttgggaggttgaggtgggcagatcattgagcccaggagtttgagaccagcctgggcaacatggttaaaccccatctttaaaaaaaaataacaaaggctgggtgtggtggcttatgcctgtaatcccagcacttggggaggccgaggtgggcggatcatcaggtcaggagttcgagaccagcccgaccaacatggtgaaaccccgtctctattaaaaatacaaaaaaattagctgggcatggtggtgtgcacctgtaatccaagctactcaggaggctaaggcaggagaatcgcttaaacctgggaagcagaggttacagtgacctgagattgcgccactgtactccagcctgggtgacaaagcgagactccatctcaaaaaaaaaaaaataataaaaaaaataaaaaaataaaatgaaataaagtaaaacaaaacaaaaacaaaaattagcttggtggtgcacacctgtagtcccagctattcgggaggctgaggtagaaaaatcacctgagcctaggaagtcgaggctgcagtgagctgtgatcatgccactgcgttccagcctgggcgacagagtgagactctgtctcaaaaaaaaaaaaaaaaaaaaaagaaaaagaaaaaagaagaaaacaaaactgtggttagagaacaaactttgtatgacttgaatccttttaaatgtattaagatttgttttatggtccagaatatggcctatgttggtaagtgttctttgtacatttgaaaataatgtgtgagatcagttgttgttgggtagaatattgtatacatgtcaattaggtccatttggttgattgtgttgtttgtcttctgattttctgtctactttttctataaattattgagaaaggattattgaaatctctgattataataatgcatttgtttgtttctcctgtggttctatcagtttttgttttatttatttatttatttatttatttattttattttttttgagatggagtctcgctctgtcacccaggctggagtgcagtggtgcaatctcagctcactgcaacctgcaccgggttcaagcaattctcttgcctcagcctctcgagtagctgggactacaggcatgtgccaccatgcccggctaatttttgcatttttagtagagacggggtttcaccatgctggccaggctggtctcagactcctgacctcaggtgatccactggcctcggcctcccaaagtgctgggattataagcgtgagccactggcccatttatttatttatttatttttaaatttttctttcttttgttttctttctctttttttctttccttctttctttctttctttcttttttttttttttgagactgagccttgctctatcacctaggctggagtgcaatggtgcgatcttgggttactgcaacctctgcctcctgggttcaagcaattctcctgtctcggcctcctgagtagctgggattacaggtgcctgccaccaagcccagctaatttttgtatttttagtagagacagggtttcgccactttggccaggttgtcttgaactcctgacctcaggagatctgcctgccttgtcctcccaaagtgctgggattacaggtgtgagccactgcagccgaccatatgcctgataatttttgattggatgctacacattttatctagttggatggtgcatatttttgtgttcctgtaaatacttttttaatttttaaaattttatttatttatttatttatttatttatctatttagagatggagtcttgctctgtcacccagattggagtgcagtgatgtgatcttggctcactgtagcctctgcctcctgggttcaagcggtgctcctgcctgagcctcccaagtagctgggactacagacgtgtgccaccacgcctggttaatttttgtatttttagtagagacagggttttgctatgttggtcaggctggtcttgaactcctgacctcaagtgatcctcctgccttggcctcccaaagtgctgggattacaggcatgagccactttgcccggccaatgctttttattttttatttttatttacttattttttttgagacagagtctcactctgtcatccaggctggagtgcggtggcatgatcttggctcactgcaacctccgtctcccaggttcaagtgactcttttttttctttttttagacagagtctaactcttgtcgcccaggctggagtgcagtggtggatcttggctcactgcaacctctgcctctcaggctcaagcgattctcctgcctcagtctcccaagtaactgggattataggcatgcaccaccatgcctggctaatttttgtgtttttagtggagatggggtttcgccatgttggccaggctggtctcaaacttccgaccttaatgatccacctgccttgtcgtcccaaagtgctgggattataggcatgagccactgcactcggcccagggggttcttgtgtctcagcctcccgagtagctgggattataggtgcacaccaccatacccggctaatttttgtatttttagtagagaaggggcttcaccatgttggccaggctgcttttgaactcctgacctcaagtgatctacctgccttggccttccaaagtgctgagattacaggcctgaaccactgctccaggccataaatactttttagatttgttctgtaactcagttatgttacttgaaagcagtttgattctttttggtaagatggtaattattcccaccactggacccttttgtgtactctgagcattgccccattaattatggcattttccagtacacatccccacactgcttgcaggaaaggacctagagaaaagtcgcagggcagaaaagcagaggaggacggccctggatttggcttatcagtccttggggccctcctgccccaggaagggcagcgaggaccatggtgttgctgccatcattatcaccctggccatgagattgcaggactggggcagacccagaggaggactggaagggccagagtcagccaggaacacagcagctcagctctcggctgttggcaggtggccttgatggcttttcaaaggcaatcactccacccaggacaaagctcacttttctctggggcaaaacacattggttcatttgttcagttcattaattcaaccagtctgtttctaagggaaacctggctgtggccagtcctgctcccacatccctaggtgcccagtgttcccaagggacctgaattccaaccccagttaggagttcaggggtcagcatccccatgccccacatgcctgttagggaggacagtgaaggctgagcactcttgggctcaccaaacaccagcattgagaaactgccccccatcttccctaggtaaggtgaccttgtaggacagttcatgctattgggatggtctgggtaaggtggccacgagggcaggggaccaaggtctgccccacctttgaccttagcgacatgcccctgattgcctggcccccctctggttgtcgtctgagtcccttctctgggggtacctgggccttgctgcacttcctttgtatgctaacttca

SEQ ID NO: 4393 - DNA, 6000 bp, Homo sapiens
ggcagtggtctagaatcctagatcaagggttggcaggagggccacatccagccagcagcctgtttttgtgcaacccatgagctaacaatggtttttacatttttacaaggttgagaaaaaaagaacaatgagtgacagaggccatatgtggctcacagaccctacctaatggattctagctagccttttacataaaatgtttaccccagtccggctctggagcactttgacttgcatgctccctacttacagggaactcaccacctgtaaggtgggcagcctcataccctgaagtctataaagctcttccttcccctgagctggagtctggccctggcacctctgccctctggggctacagagtgctgggttcctctgccaggagcagccgagcagggtctggagactagctttattccctgaggcaggcccgtagttccttcaggttcctccttactcttacattcttagggtaatgatttctggcaatttcaaaatggaaaaccttgtccctaaggctcctccgaaagtggtgacttcttttcttgagagagcaacagtgacagcagtaacagcttacccatgtgccaggcagtgttcgccgcctcatgcccctctacaaaggggaagtgagaagttccttggcagatgggcagacatgtagtctcacccacagttgcctcgactggcgggaggtggtgtggggattcccaggtgtccttaggcttgggcaggcctccccctcaccccaggagagccaccgggtgaggaatagcttcgcgtaccagaagccatccggttcaaaggatctcagctgcccagagtcaacctgcttctccagggtggtctccatggtgggtgtcctctaggctcagtgaggcacctggacagagatctgtagtagcccctcagctctaggctggccgacaccatggcagtccccccaggaactaaccagaaccgctcctccctcctcaacacgcttgccgccacccagactccacagctgggtgaagagactgggctgggaagggagcagagaagcgggtggatggccgagcctggcacatttggtgtgcaggactccgactgcattctgaggggtggttcactgtgggaaatggggtctgactttggtggataggaagagtcgggagcagaatccagatgagacccagggcaggctgcctgggtagagaagtaggacagactcggaggcagaatcgagaggacctggtgatggatggatgtggggtggtggcagcatcaagtgtttaaatcctaagcttgggacgggcatgtgaggtgggagcgttcagaacaggcacgtgccaggtctcacctcacacatgacccagggttgcggaggctgctgggagccggcgggattgggcctgtgggatcctgtcagggcataataagtagactcttctttcctgaggtgcacccagacacttctagggaggatgtgaccccagagcttttccccatgtagggttcttctcattctccagcatccccctgcctttcctgggccaagagtcagcgtggaaccccatacgaatccccagggaggagagggcacagagcaccggaaccagcagtaggaattggaaaaccaggcgtggcttcttcccagaaatctcaggcatcaagaggcagaaacccactccccagcctcagcttggccaggaagtgctgctgtgggctggagaggatgggtctaggccaaggtgaacatgcagagagctggctgctcacccttcctccaccccataaagtggtctgagtaacagagcagctaggcagcgtccaggagccagccctggacaaggttgggtccctttgactgtgtgaccacaggcaggagacgtaactcagggtggagctctggtcacacctcacttacacacagccctcttgtcagttgccccaacatctcaagagatcttcaagcttatttaggtagtttcaagccttacttagcacctatttactctttctttgtatacaattcaaacaaattccatttgctgacttcttggcaaatttcaaaagaggtgtggagagttgtacaagacaagcctctgaaccacagagggttgggggaataccttagaactatggaatgcagaaatttagccatcaggagccagtctgcacagggacaaacacctctccttgcccctggagagagccccaagggcagacaccattgccctgcagccctgcttgtaggtctggttgctcaggagagcaaagtgaaatctcttcacattttcaccccataatgggtcaggaaagattggaccctcagaagggcaagcgccatttatctggaccgttcccatatccaccctcattcagagcagcctgttcttggtggagcctgataaacggggcattaccgttcccaaccagtcctcctctggggttagtttcgtccacagaagaacactttgcattttgttactctgttttttgtcaaaatctgccttctgtctgcccccagcagaatcaaggggttctaagaggagagcctaacacctttggttcgattcctccatttcctcaccaggtatccctggcactggctctgggacagaccatggtgtgaatcaactgtcttcctcagggaagacaaactcctggagtcagggaaacctggatctcgaaaggtttcagcaataaggccaggggtaccttccaggcaggagtagtagcatctcaaaggcgtagaggggtgggagatggtgtgtagtgagtgcaaaggtgtggtaggtagggagattggattgatacctggcaggagccccgattttgagttacgggttgaaggcttggggagactctgttagtggtctgcacagccttcaggccaccagtgtgcagtggggtgattttagggatgatgacaccaagcactgtttcactgattccctgcagcactgtgaagcagctcctgctaatgtctgcactttagaaatggggccatggaaactcacagatgaaataacttgctcatggtcacactggaaataaggggtggagctaggacctgaatttagttgtgtccagaatcagagttcaggtttctattcactgccctgcatggcgtccttggaacggacaagcagatccttagggcttgcctctgccctaccaactgtcctcgccccttggagcctggcctccatcagatgcctgctgacttgggacaggttgtgacagggcaggggaaaagatggctagaggctgagcacccacagcaatgggaaggaaggcaccaggaggcaggcccagcatatttgaataggtgggcatttctgggactgcaggctttggtttggcaagtgtgcctgcccacaccttcttcttctgctagacctcagtgggttggaagggatagggaggaccaacagcagtgatggaggctgcagaggctgcataccgctgtgtgtgcatgaacctgtggcatgcacacacacggaggggtgttgggatgggttgggttcacatggaattgagtttgagctgtaagtggtaggggatgaggggcatgtgagtttgtgactggctaaagcaggaatatttagattctatgagcacgggtatgtgtgtgtgatggtatacgtgcataagaagccgtttctgggtaactagggcctgcactctgctatacgtgtggctgggtgggtctggccagtcccatggcactgagagtgtggtgagtgtgctcaggcagaacgggtgctgcctgcctaccacatccgtgggagctggccagggtgggggcagggctggtgggcagggctgccctaggacgggcgtttccagttcctggaactgcttccttgtgtggaacctttccccatacctcctagctgggcccttgggagaggggaggaggccgtgggtccttcaagggggtgctcgcaggccagacacaagggagctaggcctggggaacagaaagccacagcgtgagtctttcaagcacttctgaagggtgacatgtgtgagtttgtcacaccaggccctcagtgcggtcagggagtctgtacttcctggatggcggaacctgtctgtcaagccctgcttcctccccagcaaggggttggggggagggcctgatggcaggagatgggcccctggggctttgagacatggtgaggagaaaaggggcaagtgggaagacccttttccttctgtatttctctttttttttttttttttttgagacatagagtctcactctgtcactcaggctgaagtgcagtggcacagtcttggctcactgcaaactccgtgtcctgggtttaagcaattctgccttagcctcccgtgtagctgggattacatgcttgcgccaccacgtccagctaattttttttttatttttagtagagatagggtttcaccatgttggtctggctggtctcgaactcctgatctccagtgatctgcttgccttgatctcccaaagtgctgggattacaggcgtgagccaccacacctggtcttgtacctctctgttctatgcctgaacttccaccactgatcacttgccatcatcccagcaagtcacactgagcctgtgaaaccacagggcactggaaaccacacgttaggggaagtgggagagttggcggggctctcagatgaactccaaccccttgtttctcgcctggggaaagtgaggcccacaaaaatagagggacttggctcaagaacatgcagtgaatctgtggcagagccaggccctggccctctcttagggaggggtgcaaggggaaaggaaaaggaagactgggtcctggcccctggcttgctcacccaggctgcatctccccctgcaggtgatcgaggagttctacaaccagacatgggtccaccgctatggggagagcatcctgcccaccacgctcaccacgctctggtccctctcagtggccatcttttctgttgggggcatgattggctccttctctgtgggccttttcgttaaccgctttggccggtaagtaggagaggtcctggcactgcccttggagggcccatgccctcctgcccagggagtcccagatggggtgggaggtaggggagacttatctgcctgttccagggtattacctctgacccagcccctcggagcccaaggaatgtgggcactggcctgacctgtgaccccgtccccaggcggaattcaatgctgatgatgaacctgctggccttcgtgtccgccgtgctcatgggcttctcgaaactgggcaagtcctttgagatgctgatcctgggccgcttcatcatcggtgtgtactgcggcctgaccacaggcttcgtgcccatgtatgtgggtgaagtgtcacccacagcccttcgtggggccctgggcaccctgcaccagctgggcatcgtcgtcggcatcctcatcgcccaggtaagctggggcaggatctacctgcctggcacggcccctgcccacagcttcagtggctctcggatctgtgcccagcagggcagagtttctcttccgcccagcccccacagccttgcagaggacaactatggtacacaggtccagagaacacagcaccatggcctcccagttgacagcaagatgacttgactcttctcagtccctttcttctcactctaggcttccaaccacagggcccgccttcccccaacatgccgcaggctgttatgcacagtaccctctctccaggaggcttccccttccctgtccccaaaaccctcttgtggcagagtagcagcccccattctctgtgctggacacatctgtggccttgtcatttgtcctcccagcaacactgtggggtaggtcctacttttcccatgtgaccgatgaggaaactgagaaacagggctcatgctagtggcagagcctctagaactggggcccttccctgaagcagcagctgacacaaagtagggaaggccactctggcaggacggggtgggaaagggggtcagggc

SEQ ID NO: 4394 - DNA, 6000 bp, Homo sapiens
ctgtttaggaaagattattaaaagaatgctcatgaatctacatataagtatgtaccttcctgatactttgggcactttcccaccttgtccattaaatgttgagacagaaacagtgctgaacaccttacatgtgttatctctttcagtctttacagcaatcctatgagataggaactcttattgctccaattttatagaggttcagcaacttacataaggtcacacaggtactaattggaacatttaaactcatggctttggagtcaggtgtgaacctgaagtcattagagtatacctggaacacaggctttcaataaatatttatggactcagtgatactgttcccaagggaaatggaaaggctttctaattcttattgtcctctccacttgactctggttcccttggcctctcttcctttcccacgtcatcccattcacactaacattcattcaacaaaggtagagggccaactgagtaccagataacgggccagatgctggagatacagagatgacaaaacatggcccatgctgagaggagcttatagttttgcgatgcagataagcatataattacaattgtgggagcaagaggagggagtgatttactgcctaggagacctgactgttccttgtgctgagccagggggcaaggtttgagggttgaggggggtatgaaagatgctgacatcctcggggaatggttaaagcactgggtggggcccaggagagtgtcacaggtagaatgagaggacaaggcagggaccagatcagttaggaccttagtgttggagccttttaaacagtgaattctgccatttcctttcaaggatgggtactaataggctgggtcatatctgtactttggctcagacctcttacctaaactctaggactaaactttcacatagctatatcccaccatttgtggagttatttatttatttatttatttatttagagacaaggtttctatcactcagactggagtgcagtggcgcagtcttggcttactgcaacctccacttcctgggctcaagtcatcctcccacctcagcctccagagtagctgggactataggcatgcatcaccatgcccagctgattttttgtattttttgtagagccggggtctcacgatgttgcccaggctcgaacttgtgagctcaagtgatctgcctgcctcagccttacaaagtgctaggattacaggtgtgagcctccatccccagcctatcctaccatttatgaacatcttttttttttttttttttttttctggagacgagtcttgctctgttgcccaggctgtagtgcagtggcatgatctcggcttactgcaccctctgcctcccaggttcaagcaattctcctgcctcagcctcccaagtagctgggacaacaggcgcacaccaccatgcccagctaatttttttttaaatgtattttagtagagatggggtttcactgtgttgcccaggctggtctccgaattcccttttttttttttttttgagacggagtcttgccctgcactccaggctggagtgcagtggcttgatctcggctcactgcaacctccgcctcccaggttcaagcaattcttctgcctcagcctcccgagtagctgggattacaggcttgcgccaccatgcctggctaatttttgtattttcagtagagacggggtttcaccatgttggccaggctgttctcaaactcctgacctcaggtgatctgcccgcctcagcctcccaaagtgctgggattacaggcgtgagccaacgcacccggccttttttttttttttttttttttttttgagacagagtcttgctctattgctcaggctggagtgcagtggtgcgatctcggctcactgcaagctctgcctcccgggttcacaccattctgtctcagtctcccgagtagctgggactacagacgcccgccaccacgcccggctaattttttgtatttttagtagagatggggtttcaccgtgttagccaggatggtctcgatctcctgacctcgtgatccgcctgccttggcctcccaaagtgctgggattacaggcgtgagccaccgcgcccggcctttttttaaaaaaatgtgtttattttccttgcggagcagggctgccccataagcagtgtgcccagagtagcccaaattccctaattctgtccgcacttacaccatccaatcatacaagcagttgttagatcgttgtgtgctactgttccaggggccgctggaggtagaaattccatttcactaaaatctagtctgtcctttgcccccactagttgagtccagttagtgagtgtggaggtgggggctggaggtgtagaagagataaataaatatatagagagccagtccagctgtctggaggacattgtccgcctcctccaatcccatcagttgccacatcttctttggtcaggctggctttctcacctggtctcctttctgtgccctcctcacactggctgccaaagtgattcagccagatagactgcaagccccgtgagtgcacggacggtgggtggtccataaacgtctgatgaactaatgatacaagcttgaatatagtctcctaaaaaaatctttagtttctcctctgcttctagaataaaaatcagatcgccccatttggccttcaagacctactacattcagccacagtcagcttcatttcccttttttcctttcactacctcgaaggccagattagccagtgattcactatgcttgccccgggccacttgtatcctctcacctccgttccaggcagccctcgcagcagatcctaacgcttagggctcctccaagtgtacaggctcgtgaggcttccctcccgctaagaccagtgcgccctcagcacacgcagtgtggtctcgcccgccgctctgcgctcgccctgcaggagagggagctctttgaaggcaaggccgaacctcccccgagccctgagctgggcctgccgccacagatgtgcagtcctgccggggagcagtcacccggggacagggccgggccccgggctgcacgtcgggaagagacagcgtgctcctgaggtggccaggccgctgcaactggccagggcgggcccgggcggcgagggaaggggtgggaagcccgggccgcggcgcttcctgctgggacccggcggcacgcccctgcccccgccccggccgagcctgcgctgccggcctccggccctgccggccgcccaatcagcgggcgccccccgcgcggcccgcccctccccctctggtgacagaaagtcggcccagcagatgaggaagtggcaggcaggcaggctggccccggggacttctctctggccctgctccctccgagcgctccgccgttgcccgcctggcccctacgggtgagtctggaccttccacggactctccacgtgccggcgccccctgcctggccagcccggcccagcccggcccagccctgccctgccctgcccaggctgtgggcgagggtgttcccggggccagtgggtgggaggtcccagctccctggggccgggcctcgccagcaccctccctcccccacacccccgtctctggcccccatttgcctacacccgggccttcctccaccacccctgcatttacctctctccctcctcctctcccctccctccccccgctaccctaactttgccaggcaccttttcccttccatccatcttaaaggaaggaagggacgggctgagttccccgacgagagacacacccagattttcctgcagcttggggagaggtcctcccaggagccttggtccctcctggcctgccgggtgtgtgggttgatattgggggctggtggttgagagataacaggctggctggctcccatgtgtcagggaggaacctgtgttggcgccctcgccccggcctgggccctgccggcgatgggcggccagcaagcccgatggtgggggagcaagtaaggaggggatccgagcgtggccaggcagcgcgcacacgtgtgtgagtggccccgcgggtgagcccgtgcgtgtgcctgggcggtggccgagctgcgtgagggccgggagccatgcgtgtcagcccacggaggtgttgcgtggtgtgtcaggcaggagacgtgtgtgccagccctcggcgtggcaccttcgctgttgggggtggagagctaggtgagaggtgggtgtggaccgcaggcttggggcctgaccacggtgggcctaaagaagccgggcctcctggaggtgaggggtgtgcggggcagggaggtgtcagaggtgcgcctcttcacttggcatctgcagaggtgcttctctggaagcagggagtctggggcacctgctgccctgggccctgctctgttccaagaatgccttgtccctcagggactgtcagtaccatgctctcctgggtctggccagaggcttttgtgtccctgggagccttcccccgacattccttcaggccctgagggggagggggcctagcccaacggggcccctccctgagggaggggaagattcctgcgacctcccccactccccaaccccttcacatgccactggcttccctgcccttcccaggaagggaagagtgattgtacccattctgaagtaggacaaactgagcagttatggccggcttaggagaggatgctgggtgtggattttcagcagtgctttgggccagggctggggctggggctggggtcagaggaggtttctggctcagaatctaggaccttagctcatcaggctggtcccacgtgggtgggtgggtggcgagtctggggctttacttggctttcccaatcctggtgggtcctgctcccccaggcactgacctgtggcccggacccaccctccaccccctgcacagtacagcaggggcgggcagagggcggggctgctgccagatctagtcagacaggtggagccgccggggcaggagtctcaaagagccaggctccaggagaggaagggctctgcgagaggagagaggagagcgctggagaggagaggctggaggtgagagtcccaggaaaggcagaggagaatcgtagggacataagtgtcccagcacaggcaaggaggaatccgaggataaggttctggagggacagaagggcccagagaggtgagagtcctggcagggacaggagggaccctggggagaagagagttcaggaagggtccagagggatgggaagaggagagggcaggagaggagagattgaaggggagaatccctggagagaagaaagacccagagctggggaggtgagggactcgggtgaggaagggagacggagttcaagagctccctgttggtgagaaggtaagattctccagtaagagacctggaattgagagttatcttgtggaggaagaggggaagggaggccaggaagtaaaactgtggagaggagaggagagtaaggtgtggagaggaagggtggaacagctcttcccaggcaagcaggatgtgtggggagcagatgcctcaaccaaactgcctcctccccctagttcccagtaattccttcctttcactgttctgtcctttctgcaatgaggcattgcaggtgtcttgtctggttctgtgtcttatctctgtgggatgggggtgtgcagtgggatctgtctgacatccgccctctgtacctccccagagtccttagccaggatggaggctgttgtgaacttgtaccaagaggtgatgaagcacgcaggtaagacgctatccaccagccctttccttccttctttcccgggatccctggatctacggctgtcttctaatggagagttcctatgaaacccttgatcctgtgacctgacctcatgtctgtagacccttcaaatgaagacccttcgaaccctgtgactcttcctgattcctttgacccttattcatagatccccggatccagggctaccctctgatggggtcccccttgctaatgacctccattc

SEQ ID NO: 4395 - DNA, 6000 bp, Homo sapiens
acatttgccttaaagaaaatcactctggattttgcaaggagaaaaggataggaggagtaaaaatctagagtcaaggagactggctggaaagcaagaaactgaaatggcctgcactggggctgattgtgaggtcaaagaagaattagactagaatggaaggctctttaggaggtaagactgacaggactaggtgactggttacattcatttatagtggcattcaataaaaatttgttaaaaaatacaaatgaatgatttcaacaaatgttacggagagcttactatgtgccagcctttgtgtgtggtgtagagaatacaatggtgagcaagacatacctggactggtcactggagacagacaaggagtcaagggtgactcccagctgtttggcctggtgcagttcactgaggaggggaacccacaggaaatctaggagtgaaaggaaatgattccagaagttgtgctgttgcgttagaggggcctgtgaagatgtcctgctggacatcaggcagcctggagctcaggaaagaggttagaactgccaatgtcagtttgggcatctagattggtaacagaggtcatgagagaatgagatcatccatgaagagtcagtttgaggagaaaagagggtcaggaaggaaccctgagggacatcttttaattatttatttttatttttttattttttgagacggagtcttgctctgtcactcaggctggagtgcagtggtgcaatctcaactgcaacttctgtctcccaggttcaagcgattctcctgcttcagcctcctgagtagctacgattataggcgcctgtcaccacgcccagctaacttttgtatttttagtagagacggggtttcaccgcgttgggcaggctggtctcaaactcctgacctcaactgaccaccccacctcggcctcccaacctgctgggattacgtgagtcatggtgcccagccgggacatcttttcaaatgtaataaaatgtgttgggttttcttccattcttatacatacttactaggaaaaatcatgtatttctttaactcctaagacaagtactgttaacatttcattttgggggatattaccccaccattcaggaagcagatggaatacagaaagctcaaaaaaatctaactggtcttctggcttcctctgtctgcttccaacccattctccacaaaaaaagtaaaggttctcttaaaacagaaattggattatattgctcccctgcctaaaactgttctatggctatccacttcaaacaagcatcaacatcacctagaaacttctcaggaatgcaaaatcccaccctgccccagaccactgaatctaaaactctagggatggggcccagcacctctgttttaagaagtcatccaggtgattctgacgcaagctaaagtttgagaaccattgtgttaagctaactgctttctatgtatgatgttatttaaacctggcaattcttatgtattgttgccagcagagtgcagtggttaagagcagaatctggagctaggctgagtttcaattccacctctcctagctttgtgatattaggtcttatttctttatctgcgacagggatagtaatagcgcctatagccagcacggtggctcactgcccataatcccagcactttgggaggccaaggcgggcggatcacttgaggtcagaagttcaagaccagcctggccaacatggtgaaaccccgtctctactaaaaatataaaaattagctgggtgtggtggcgcacgaccgtagtcccagctactcaggaggctgaggcaggagaatcgcttgaacccagaaggcggaggttgcagcgagccgagatggtgccactgcactccagcctgggcgacagagcgagactccgtctcaattaaaaaaaaaacaataataatgataatagcgcctacctcatggggttgttgtggaattaaacatcatcagtaaggtgcttagaacagtgacagaacctggattttaatctcccttggcctccaatagctgtgcatgccccaggactaggtaacggccttgcccaggacgggtatggggcgggtggtgtgtgccctgtgtccaagggttgcagcccctctgaccctggcgtgccctgtgatctggtccaaggtgctaggcctctgactggagtcgggcttgccatcggcggtgctggggagcgggctgctctcgtgcaggcagccccaccagccagccgggctgcgaagctgcctagcacggtctgagcattcgccttactcgctggctgcttacaccccgacgccgctgccgccaccgccgccgccgccgccgccgccctaagcaccgcccgtcgccctctcaccccgcggcagcggcggcggcggcggcggcggaagcgggggggcgggccaggccggggcggggccgcaagcggcatggaggaggcggaggccgcggcgagccgggccgagcagtgagggccctagcggggcccgagcggggcccggggcccctaagccgtgagtgcctccgcgtgggtgtccggaacgggtagcgctgccggtgcaggtctcctgagccctcgggcggctccgggccctgggaggaggagagaagctggggcagataggatgggacgagggttgaagactggggcaggagaggtcgctctttgctcaccacaggcttgggaaggcctggaacttggtccttgtaggggctaacgaactttgagccgattatttggcctccacccttggacagccttgattcagagagttactccagtctcagggaatttccaggtgatccaaccccactgaagggtttcctgccagcccagagaagttgagccactttccccatgtcacacagtatgggtgcttgcagggaagagttgctgggaggtcctccctcatctccccagaaggcatcagactttgggaggagcatcttaccccatgtggccctctggtcccttcagattcctgaagtcatgggctggccaggacattggtgacccgccaatccggtatggacgactggaagcccagccccctcatcaagccctttggggctcggaagaagcggagctggtaccttacctggaagtataaactgacaaaccagcgggccctgcggagattctgtcaggtatagagatgtcccaaaccctccccaccgagcgctccctcccagcttcctccccacctaaatcaggcactgggacccctgttggccagccccagtgggaaaggggcagcaggttcctagaggggagacctctatgtgtcatgtccctataggtaatgatttgaacccaaagttctggaatcggaacccaagtacaacttctaagcttctgacggaagcctgaagtctgatcaggctggctttgcagagaggcacacccctgtgaggcagttagggccaggacccaggtctgatcccccgcttgggtccctgggcctggctccatctctagaaaccaacaatggaggggaccaaggaaatcaaggtctcaaatagaagaatacaggagcactgggtagggagggccctaatggagggggaagtgtcaggggaggttccctggggaaagtggctgtgaaactaggccctggtcaggggagtagagctaggcagacagaggaagggacaggacccagtttctctggatgtcttcactgcagccagggccctcctttcagaaagaccctctaggatctgaaggaggtgctcctcttaatcatccctacccctcccctcagacaggggccgtgcttttcctgctggtgactgtcattgtcaatatcaagttgatcctggacactcggcgagccatcagtgaagccaatgaagacccagagccagagcaagactatggtagggctaggctaaggatggggtagggggccttggatctcacagctggagtggcaggcagaccctaagcggtgagactctgctgaggagactatctccatgacctgttgtaccccacagatgaggccctaggccgcctggagcccccacggcgcagaggcagtggtccccggcgggtcctggacgtagaggtgtattcaagtcgcagcaaagtatatgtggcagtggatggcaccacggtcagtgggccagggtctggtgtacagtcactctattctgctcagggcatggtccactggcagcagggtctactgcctaagtgggaactgcaactctgccagtttctagctgtgtgactttggagtcctcgattccttatctatagactgggactaatgatttctacttgtcaggattcaatgaaaagtttgtgaagtgtcttgtatgtagtgggatctcaaaagtaatcattcataatagtaggcagtcaattcattgatttattttataaccatcccctggtcctttctttggcctcagccttgtgctgggcactggggacctgaaagtaatcagacctggccctaccttgaggggttcagtgtggtggaggattgtgatacttccaggatgaagcagagacagcagaggctctaagagccatgaaagtcatggaggggagggttgtagaaagacgtgatctcttctgatgggagtgctatagaggctttctggaagaggtggccttcgagctgagttggaaaagaactgtgtgaacagaaacataggcaggaggtgatgtttcaagcagctggtgttttaagtacccctaagacagagacaccttgaatgccagagtgaaaagctggactttgtctctgccactgtgtaggtgctggaggatgaggcccgggagcagggccggggcatccatgtcattgtcctcaaccaggccacggtgagtttctaggggtgggtgacccagagggctggagctgggctcttgctgatgacaccaactcaccagaagtatatcccctgccagggccacgtgatggcaaaacgtgtgtttgacacgtactcacctcatgaggatgaggccatggtgctattcctcaacatggtagcgcccggccgagtgctcatctgcactgtcaaggtcagttattctgtcctgaccctgacccctactccctagctccaaccctgcttctagccccggcttctctgcccctcatataacatagtgggaagattctctgaaggaaggttactcaggttccaatctcagccttaacatttgtattaattcagcaaatagttattgagcaacagctgtatgccaggtacttctctgggtgctgaagatacaatgggaaacaagacagagtccccaccctcatggagcttatattccagcagtgggaggtcaacagaaacagccaagtaaatgtggataatgctagtaaatgataacttgtataaagaagaaaataaagcaggggataatgaatgatagaggggaggggacattttagaaagagaaggcccctgcaaggagatgatatgtgagcagaaagctgaggaattgaggagtgagccaggtgagtatctggaggaagagcattccaggtggaaagaatggcaagtgcaaagcccctatagtgggaaggtacacggcatatttgaggaacagcaaagatgctagtcgaggtggagcagaataagggaggagagtaggagagtggttggaaaagaaggcagagagtggcgggagagagaggtgcagatcgtgtgggtttgtggaaaggacttattagctggatgaccttagaatctctaagccttcagttattattttatctgtgaaagagagtaaccatagagggttattgcaataatgtaatgagctattttaagtaaaaggttgctacatagttcgtgctctgtgaggccaggtctcctggaaccatgccagtcaggctaactgccttctctggtcccccaggatgagggctccttccacctcaaggacacagccaaggctctgctgaggagcctgggcagccaggctggccctgccctgggctggagggacacatgggccttcgtggg

SEQ ID NO: 4396 - DNA, 6000 bp, Homo sapiens
cccagatttggagtagccagggactactgtcctactaatccctctcttctctctcgtcgtttgcatgacacaccaaagaggagtacgtacacacgtgcttgtgtctgtgtgtggcctctgtctctgtgttggtgagaggccggtgtctgtatccatgtcttcttctctgagtaaagcaggggaactgcattcatgcatctatgtgtgtgaccccatgtatgtgtgaatgtatctatggagtccatgggactgtttgtgctctgcacataagctggtatgtgtgcatgtagttgtgggcatgctggtgtgtgcatgtaggtgtgtgcagtgacaccacttcttccttccatggaaggaagccgcaaatactactctggcctctctgcaccactctaccccatccccctcctctcctggctccccagcggaatcacacccaggctaggtagaattaagaaggactgaagacttccctgcaggcatttggggaaaggttacagggacagacaggtgcagacctgctctcctttctcttcccctcacccacctgagccctggaggactctgtgccttccttcatcagaagccagtcactttgagttctctcctttccccttccccctttcagggccatcccacctacacatgccacttcatcaagtgctcagtaaatagaattgttgagttgttgctagctgcaaaaggagaggaaggaggcgagtggatgcatgatgggggcagtgggtgagtgggaggacagatgaatgaacggtgctcagggaataacacaggaaaggagaggtcagggagggctccgagcgactgaaagattcctagaggtgggagctgccgtggctcagcccacctccaagggtctgaggcttcccagggctgggcctggctgagtcatccctgggtcccccagtcatggagttgctgtggtcttgttctttcagttccgccaacattcctgggaaacaggaggaggcccaggggtaaaggggttattccctaagcatggctcaggctggaagtgggggcaccccatagctgtgcatggcctggggtgggcagctcagaccagctatatgcatggccatggctggctcagctcagcactgcttggcttggctggagtggcagtgcatgagcctggggggcagagggggagaggggcgcggcacctctccttggcttgtggaattaaccttctgtgactctaaagctcaggagaggctgtaagagcattggtcctggattccctgacctcccctaagaccctgccagaaggtagtgagggagtggaggatggggaaccagaaccagatgacctctgggcatcccttcacctcttgcagcaggtggtaatcctggaaccgggcccatgacaagataggaggaacagggacaggtgctgagaggagaggagttaaaaaacccatcatattagttcatgataggagagaattgatttagcaatggctccatgttaaaaaaggcccaggagtcttaaataaccacaagcacattagggggggcatcctgtgttgttcaggttccttctgggtggcaaactagctctgggccctgtccagacagggacatggacagatggagtgagtccagagaaaggcacccaaatggcaggagaccagatatcagtgctttaagggagcctgtgcaccctggccaaccccacacagcagagctgggagcacaagcagaagcctcagcaggcagtgctggtccacagtggagccagctgccccaggagggaagtgggctccctgaggctggagatatttaagcaggggcattttggaagggattcttagggtatcctgagggttggatgtgacacacacaggacccttcaactctgaggtcacgaggaaggaggcgctgtgagaaacatgtttgtgaaaggaaagaccttgggccactggggaaggcctagctgcctccagcttggtggtggacagagccccagccgggaggccggggacctaagttctggttccactctaccctgtctctgtgtctggcctggagtaggaacctgccctctctgtgccgcctgctgcccagaacacctggtagatgaggctgaggctcagtgaggttgtggagccctcctgcctctatgggagtcccactgccctgaggctctgcttctgctctaggtcctacccctgccctgcccccactcctcctgggctcctggaccttcaggagcccatgtccctccccagggctgaacgagtgtctgcacaacaatggcggctgctcacacatctgcactgacctcaagattggctttgaatgcacgtgcccagcaggcttccagctcctggaccagaagacctgtggcggtgagaccttctcccacacccccaagcagaagcagatcctcctgctggttctgactcctgctcctccccacagacattgatgagtgcaaggacccagatgcctgcagccagatctgtgtcaattacaagggctattttaagtgtgagtgctaccctggctacgagatggacctactgaccaagaactgcaaggctgctggtatgaacaccccaagggcagaggggcagctctgaaaggcatacaggaagcagcgtgcttccacttgtgaggagtgggcgtgtacatgtgcgcacacacaagaaggcaggttgtgttactgagaggtacgggaatcctcggtcccttgtctagcttgggagaaagaattcagccaagagacaattagtaacataagccgaaggtttattaaggagataagagtacaatctaagacaggagcaggctgacccagctgggagcagcagcaatagctgtgtttctttaaagggacagtgcactctgaaaggtgacgcagagtgggggcagcctgctaaaagagaatgaaccagcggcagccctaagagttctgcattgggtttttttcttgaagttcctgtctctgtcctaaatctctgccattttctttgtctagttttcccattcctgctttaagtccctgcctgttcctcacctagttcccacccaggcttgtgggacctccccttactattagcttgtgtgcatgcccagctctgggcacaaatactacctaatggtgccatcactcgttaccaccaccctaggaaggttgtatagcagtcaaatctgattgggcctgcatatttcttagggatttcccctttgcccttcccctcctcctcaacatgcagctagctacattctgatgggagaactgcagagtgagcagtttctgggcatcttaaggggcattcctttctgcagaggcatttcccctcctctctgctcatatctagcatgaatgttttgggtggtctctaggtgtgagattttctagacttcccttttctcagggactcccccttctgctcatgtccagctgtctgcctactctagcagttgcacacacagtgctcaaaagtgtacatacacatcacacacacaacgcactgcacactaacacccacacagacactgtatagagccacccaatatagcccacagagatgacactcatacaacagaatatgaaccacacagagactacacacacagcatatggagtccacacaaagagcacgacctgggcagacctacacattgatcaattcagccagcagaattaattcattgtattcagttgtttatattgaacacctaacattgtagtagacactggggattcagcagtaagcaaaacagatgcaaatccctgtctgccctcaagggactcatattctaatgggtgagccaggctagaaatcagataaatacataaaatatagtgcatggcagatggcgataagggctaaggaaaaatagaaagtagagaatgggaatagggaagtccaggtgagcagggggttctagttttaaatggaatggtcagggaagccctcactgagaaggtatttgagtaaagaaggtgaaggggggtgggtgtggtggctcacgcttgtaatcccaacactttgggaggcctaggcaggaagatcacttgaggccaggagttcaagactagtctgggcaatgtagtaagaccctatatctaaaaaaaaatttaaaaactagccaggtatagtaccatgcacctatagtcccaagctactcaggagactgaggcaggaagatcccttgagcctgggagtttgaggtcacagtgagttatgatgccactgcactccagcctgggtgacagagtgagaccttttctaaaaaaaaaaataataataataataaataaaaagggagtgagggaggtgagacagtaagctaccatgcaattatctataggaacaagcatttcaggctgaagagacagaaaccgcaaaagccctaatgcaggagcatgcctagtatgttcaaggaatagcaaggaagctggtacagttggagcaaggaaactaggaagagatgaagccagagaggtggcttggggcagcccaaagggccttctagaccattgtaagagccagctctggatttcactctaactggggggaaaccattgagggctctgagtagggaagggacatggtgtgacattttattctgactgcagtattgagaacagactgtagaggacaagggagaaggcagggaaaccacttaagaggtcattgcaataatccagaagcgaggtgatggtggctgaacccttattcccacattattactgtgggaataatgaaaagtggacagactgcagatatagtgcaaaggccagccaacaggatttgcttatgaattgaatgtggaatgtggaaaaaaaagttacagcaactgaaaaaataagattgctacgtatgggcttgggaaagatggtgagggaagcaggtttggaggaatcttaggctgttttggacatgttatgtttaagaaaactggttaggtatccaagtagagatattgagaaggcagctggatatatgagtctggagttcatatgcaagttaaatacaatatacaacagataaattataacaatacagcagccataatactgacatgtagcccataaacccaaaaactgtaacacccaaactgtacaatatgtaactcatacattagtatatcacatataacgtgtaacctgttcttgcccccatatagaacacatgtaatacatgacacagattatgtacatgcactggagacaacatgcaactacccatgcatatacaaaatccacacacatgaatatttcaagtgcagttacataaaatctcaaatcataaacacagggggttcctgtcacagtcacagctgtcatttaagatcactccaacatgcccctttaacctggctcctgccttcagggaggtgaagtgtcattactgtcattttggggtgagggaaatcacagcttgtcagtggcagagctggcctgtaactcagctttcatccttgccccttcctgcaccttgagcccattctccatgctatttgtaccacacttctgtctcactcccaccctgctttgaattagtctccatcactacacacaggtcacacacccagccccaggccctacctgactctgtgctggtcccatcctccagggagcacattagcttggcaaagatgcacagtgacagggactggtggctggcagaagtgtcagctggaaaacaagagaaggaggcacagggagcttgaggggcaggtgttactaggagcagcccctcagacagtgttggtgcctgagagtggcccaatacatctagaaacagcctgtgggagctggtgctaggccctcagaggcccatgggacagtgtcctcccatatggagtagccaggaaagtctaggtcacttatttatcatcttaaaatctaaccctaaatctaagaaaaatacaggttttgtgtatacatgagcagtttatgttgtctctactgcatatatataatctgtgttgtatatcatatatgtcccatctctgccattg

SEQ ID NO: 4397 - DNA, 6000 bp, Homo sapiens
ctggtcattttttaatggagtgtggtctctagaaccatacagacctggttttattcccagctccttgattactgtttgtccttgctgatcacttaacttctatttatttattttttaatttaaaataattgaaacagggtcttgctgtgttgcctaggctggtctcaaactcctgggctgaatgggtccttatgtcttgacctcccaaagtgtcgggattacatgcatgagccacggtgcctggcctaaatagtaccattgagggaccttctaattatgaatttagctggtatttcatatggtggaagcactatttattgtgtcctaaatcagaggagatacatgttatataaacttgccagtcatttgggatacatagggcatgaaatatttacttgaaatcattatttttgtatatataacatgaaatacttagaataaagatatgattcttgatagctaccagttgagtgcctgctccataccagatgtttcataatttgttaagtcttaatacagtgcctggcacattgtggatgctcattaaatatgtctgtctattagatagtactacatagtagtaatgctattgtagatataaatatataattctcctaatagtgaagattgacactctgcaattatacaggcagtagaaaataaatgaatagtagttaggattgatgtaagagtattgtccttattttacaactgaggaattagattaagtaacttgtcaaaggttgtgcagaataagtggcaagtctgagcttcaaaccagggccgattcctgaaacctcggctcttttcaccatgccatatggttttccgaaattggtactggatgacttattaaaggaaagcatatctgagaatgaaatggcatgtggtatagctcatactaatgagcttatgcttcctttgtgcaatataaggaaatatgtggtgctccagagacataaaataattctttaactgttttacaaagcctgcaacagctactcagatatgaaatctatctcaattgttaaaattctttcaatttcatcttaacagtaaatgcagttggaactgaggtccaaaagtgtgctaccttcaaagttgtatgataaagtatatttaatattagactgcaggcatctcttcttgatggattgttgctgctgcgtaaattttactaatccttttgctggaaagaaatacatagcttgtatttcattggttgctaactggtatatgcacatgctgtttccttattaggtgtctgccagtttgtacacagtggatcacatagtaagtcgagggggctcccccatatgcaatagctttttttaaatacttttattttatcaaagaaaaacagctgaagacattagtcttattaagcagttaatattttacagtaatgaagaaccagatgtccatcctgtcttaagctttcacacgtatacattgatgcctgtaattgttttctattttaaaaatctattaacactattaccatttattaagcaccttctacatcccaggcactatactggaaatagcttccaaattattgaggaatttggagataatggctgttctctccttttttgatgagaaagctgagattcttagacaggtaaaataacttatgcactcacccaaaaggtttgatctaggtctggctgattgcagtgtcctttcccatacaccacactgttgctcctgtgttttcatttaatgtaagcccagttttaaaaaatcccttcatataaacatttttatagatgtataccttactttatcaggcccttgtgtcaccatttgccatgtgaagctagtctgatacttttcctgataagcctggtgattcatataaacagggatgtggcagaagtatgccattggtcctagggtacttgcttactcctatcgctgttaaagttctagttatatcaccgttgtgttttttgttgttgttgttttttaagcaacagggtctcactttgtaccccaagctggagtacagtggtgtgattatagctcactgtaccctcaaactcctgggctcaaacaatcctcacacctcagcctactgagtactaggacaacaagtgtgcactaccatacccagttatttttgtgtgtgtgtttgttttggtacagatggggtctcgctatatagtccaggctggcctcaaactgttggcctcaagcagtcctcccacctcagcttcccaaagccctgggattacaggtgtgagccactgcacctggcctgtcactattagttttatttttaatttttcccccccacagattgtaaccaaagaaaatggaaaaagggtggtggttttacctactaggcttttttcttcgtatcacttttaaaataaggaactaaaacctctatatggcaaaggtcttgagtatcaactggctcctatcatttttttctttcagttatgaaacttactggacgatttgtaataaactttactaactgctttcttcctaacctgttttcccctgaggaaaaaaaaatactattttttggtaacccttcctgttcttgaactccctaggaagaggagttgtacgcatgtcagagaggttgcaggctgttttcaatttgtcagtttgtggatgatggaattgacttaaatcgaactaaattggaatgtgaatctggtaagatgctatgctaacgacatcagctgtatgtaacattgttttctttgtgataagcttttgaagtattttctttaggaaatggaaaacacactgttgaaactagtcatctaacatattgtaattattatggatctaagagttttcgtagctgctgctagaaatttcatgggctttaaatttcatctgtttgttgagacagtgtttattttctgctatgaataggacacctttgtttaaccaagcattctgtcagacaaatgcagtataattaccctactcacaattcattactaccttttcacagatagtataattttcctaaacctttcaatcataagttcatcgacttatctccaagttttttactgaatcaggcctttgactcagtatttaatagcatattattcattggtcaggccattaaaataagtagccagaggctttgtcatctgttaaaccacttttctttctttttgctgaaagcaatatgtttaacaaaagaaacctataatcaggacacaattgacgtttaactttttaaataactataatggaatattctccactcgttacactgtttattagtgtagaaggaggcaccttttcccctatcactatgccatggctcacatacagtcttctttgatatcataaccgtatttttgcggcttagtctcctaactgatcatctttatatatgcataatgctgtccagtttattatctagcacttctgagaagtgtattacaaatgcattactgagttgggaaaaaataaaattaggatagtggtaaaatgttatatcacaagaaggaaatggatttaatgaactaaatgagagtatatctggtagagacccatttcaacattagaattatctgctgtagaacattttctagttcaattttcttagactttcagatgttaggctgattgttttatttttcttttgccatgtgcatacccttacttcttaactgagtgatctggttcttaacaataataccttatatttgtataaatcattaaaatatattatttcattcaaccctatacaataggttgtggtatttctattttacacatatagaaatcaatagtcagaggttaaactgctcagctcaggtcacacacaccaacaaatgatggaactaaacctttttgagtggcatcttcaggatgccaatccagtgcattttccaccacacaaggatcctcttatatgaatgtcatcatgtggccagagcctgggtgtataattaatagatttgtatctaaaacatttgacttgtaggagggagacaatatggagttctgttaaagatacatttcctactactatattaccaaatttggaaattcacattgatgaaacctttttaagtataaaaatttttttaataaaatgccaaatccttttctttcctctttccctttctcttttgtttcttgtaatttgactatttttctcttacagcatgtacagaagcatattcccaatctgatgagcaatatgcttgccatcttggttgccagaatcagctgccattcgctgaactgagacaagaacaagtacgaaacaatactgcctttcaaactagcctgcttagatggcactgacttgtattgcttgaagtgtttatcacccacttgatcctattttagtgttatattttatatttggctttcagcaaacaaaattagtttgcaaatagaaaagtcagttgaataattgcttttgtataatgctttactattaaaagttatgcttacgttcataatcttattttgtttcttctcacattccagtgaagatattatcctcattttacatatgaaaaaaccaaggctcagaggaattatttcagagttctttttctccatcccaactcccattggacagttgccattgccttaactcagataatcatttcttgtctgtatttttaaattaacttccaaactgtttttctaatttaaccctgtctaactccatcctttgctgtgtccagatttttttttctaaatttcatcatgccattctcctgtcttatataatcagtagctcccaattacatatagatttaagtccaaactgtttatcacaacctactcctgattactgctccaatgccatctcttaaaattcctgacaagggaatttcatactctattctccagacatactgggaaaagtttcttaattttattgatttttgcacaggaaatagtcacatgtacaaactcaaaagataaaaagagtatacatatagtgaaaagtctcccactcctgtctcttagccactcagttttccctcttgaatgtagccaaggttactaatgcatagatatgttatgcgtatacaaggatgtacacatatattttgtaaatataagtatacataaagagcttctactaatttttttctactacataatattctgtgtagatatattataattttttaggcagtcccttatttgtgaacatgtaggttgttcctaatctttttcttttgtaaatgatacctattttgcacatttgtgagtatacctgtagaataaaatcatagggctagaattgctgagttaagaggtatatgcattttttatttttatgttttttagagatgaggatctcactatattacccaggctggcctcaagcttctgggcccaagtgctaccatagataccactgcactccagcctgggtgacagagcgagacactgtctcaaaaaaaaaaaaaaaaaacagatgaaaaaagaaacaaagcagaaccaaagctatccctagagtttagtaaatggcatcccacacttgtgctttagagaggcccagtgctgctaaagaagtcaagaaatcagaattggaggaaagatgatatcatttgtcaaaatcctttttttttttttttttttgtgatggagtctcgctctgtcgccaggctggagtgcagtggcatgatcttggctcacggcaacctctgcctccctggcttaagggattctcctgcctcagcctcctgagtagctgggactacaggcgtgcgccaccacgcctagctaatttttgtgtatttttagtagagatcgggtttcaccatgttgcccaggatggtctccatctcttgacctcgtgatccacccgcctcagcctcccaaagtgctgggattaccggtgtgagccaccacgctgggccattaaaatcttatcagtagcttactacatatattcagcccataaatactcccttcaccctgtcgtgttgtcagatgtctaccattttatatatatattcttctgattgattttttccg

SEQ ID NO: 4398 - DNA, 6000 bp, Homo sapiens; identical to SEQ ID NO: 1516

SEQ ID NO: 4399 - DNA, 6000 bp, Homo sapiens; identical to SEQ ID NO: 1545

SEQ ID NO: 4400 - DNA, 6000 bp, Homo sapiens
gggagacaactttaatctagaggtgaggtgaggggcagagactttaattcagacaggctctagatcaagccaaagggacatcctgaggccaagaagggagagaggagggtattgtcatatccttcacccagacactgaggaccttggcactctgagcaagctagagaaggcttattctggtccatgtctccccatacccaagagaacctgaaagaactcactacagtgaagtttgcataatttccttacagcaagcacatgattcactttcagtcattaacttccatttagcagagtgtgttatccagttgcccgtcaacctcagggagctccctggggcagtggcccattctcccttagggtctgagctctgcttctcagactcaggttctgtcccctctcatacaaggagcttcccaaaggcagccatacgtctcacagcaaatcacaggagaggatgtacggagagtggatggcccttctcactagtatttctttttgaaagatgtatgtggccgggcacagtggctcacacctgtaatcccagcactttaggaggccaaggtgggcagatcacctgaggtcagaagttcaagaccagcctggccaacatggcaaaacccaatgtctattgaaaatacaaaaattagcagggcgtggtggtgggtgcttgtaatcccagctacttgggaggctgaggcaggagaatcgcttgaacccgggaggtggaggttgcagtgagccgagattgcaccactgcactccagcctgggcaacaagagcgaaactccatctcaaagaaaaaaaagatgtatgcttcattttgtgacttacagagaatttactttggtttttgcctgctcatggtttttggcttttggcaaaaccatttcctgtgtggcttttcctgatgtgcctttcttgttcctgtgactgtttggtggaactattagaggagtgtctcttccagtccacctaatcaaaatcactgaaaatgaggcctagagggtttcatttaaaacaaacaacaaaaaaaaaaaaaaaaaaagaaaaagaaaaagaaaacagagtggccaaggtggctcacgcctgtaatttcagcactttgggaggtcaagacaggaggattgcttgaggctaggagttcgagaccaacctgggcaacatagtgagactgtctctacaataaagaaataacaaagcatttacaaacaccatggtgcttctaatgtatacccaaacttaggggcatcagactttttttttttgagacggagtcttgccctgtcgcccaggctggagttcaatggcgcaatctccacttactgcaacctctgcttcccgggttcaagcgattctcctgcctcagcctctcgagtagctgggattaaaggcacccgccaccatgcccagctaatttttgcatttttagtagagatggggtttcaccatgttggccaggctggtctcgaactcctgacctcgtgatccgcccaccttggcctcccaaagtgctgggattacaggcatgagcaccgcgcccggccggcatcagacttttaaaggttcctcagctcaagattctaagatgttggccgggtgcggtggctcatgcctgtaatcccagcactttgggaggctgaggcgggcggatcacaaggtcaagagatcaagaccatcctggccaacatggtgaaaccccatctctactaaaaatacaaaaattagccaggcttggaggcgcacacttgttgtcccagctactcaggaggctgaggaaggagaatcgcttgaacctggaaggcagaggttgcagtgagctgagatgatgccactgcactccagtctggtgacagagcgagactctgtctaaaaaaaaaaaaaaaaaaaaaaaaagattctaagatgcttagcttggcttctggtcccagcttcaactgcagatttgaagagaggctaggacctggtccctgccttttgggtacaaggagtaattttcagaggaaagggaggaacagtgatctgagcatagtcccctctttacccagccttggacgctgcccagacggccttgagaaggcatctaatgtgatacctctgctacactgtagcactagccagtgggtgcctcctgggcaactgttccagtggaaacattgctgctattgcttttctttcttcctgtacctataaccagttgggattcccaggtggcctgtcccatttctgtgtcctgacccaaggctgagataatggctctggctaagaatacaatgcatgcaaagtctgggctttctcctgagccctgtccccagattccctcaccccaccttaactgagtttttgctaccttacccccaagggttctttctcccttgtccttccctgcttttaaaattgttcatgttgggccaggcgtggtggctcacacctgtaatcccagcactttgggaggcagaggcaggcggatcacaaggtcaggagttcaagaccagcctggccaatatggtggaaacccgtctctactaaaaatacaaaaattagccaggcatggtggcaggcacctgtagtcccagctacttgggaggctgaggcaggagaatcgcttgaacccgggaggcagaggttgcagtgagctgagatggtgccaccacactccagcctgggtgacagagtgagactccgtctcaaaaaaaaaaaaaaaaaaaattgttcatgttagtcgggcacagtggctcatgcctgtaatcccaccaccctgggaggctgaggtaggcagatcacttgaactcaggagattaagaccagcctgagcctgggcaacatggcaaaaccccaaaaccccatctctacaaaaattagccagacgtggtggcacacacctgtagtcccagctactcaggaggctgaggcaggaggattgcttgagcccaagatgttgaggatgcagtgagccgtgattgcaccactgcactccagcctggatgacagagtaagaccctggctcaaaaaataaaaaatagttcaactgttcatgtctccttggtcttcaggcccaatgccacaaaaaccggggcaaaggcagttcatcatcagtttccattccctcatccctttgctctgtctgtgtgattatatatgtatcaaggagtagtggttctggctgacaccaagactcaccagggttgtacagggcactggggctacggtgcctgctctgggcaggatgtgggcatgagcatcaaagggcagctcactgaccatgcaggaatcaggcaccataaatgctgggctccactgatctggagtagaaaacaggtagctgggagaaaggagacttaggaacaccctgacagccgcagggcctgggtagtggcacaggttgggtaaacccccttaaccccatggttagggccagtcccgaagggccatttcccccttcccacaaagaacactgacctagctggatggagataaggcctacatttggcccagtttccccctgcatcctctccagggcccctgcctcatagacaacctcatagagcataggagaactggttgccctgggggcagggggactgtctggatggcaggggtcctcagagatgccactgtcactgccaggagatgcttctgagcagtacacctcattgggatcaatgaaaagcttcaagaaatcttcaggctcactctcttgaaggccctacagtaggaaaaggttatatatatgtgcagggaagaattttggaagtcctccctgacttatgcttcattttcagtcctttcacttcttgggcatggagacagttattatacaacttacgtctattttgggggtggtctgttttcagacctgtctccaagtgggagctgaagcctcttatcacagagttgtgtctcaaccccacccccactcccactcgtcacactcacacagccacggtccccaccggacttccagccttgcagtccctgttcctgtagcctagttaccggaacctctggaggggggcagtggagtcccagctccaggacggatcctgtcgagaagatatcctctgggggctccagccacgcgtccagcaggtcagggattccgagatccatgcttctgcaggaaggcgtgtgggacggagggttgcagaaacggaatgatggctgcttactaccccctacagtttctgggctcctctgctcccttttccattatccccgcccccccactccttcctcactagcaagccccctcacctgtcccctcgatatttcaccttcagccctatccctcaggtttagacaaagaggccccccccaagcattacctgttctgaagagcccagccctgtcaagccagcatagcccgttgacctccccaaacactacaccttttctttcttccaggatctcgtatcctggacctgccagccaaaccccgcccccagccttacactacaaaagtggatgccaccttgccaggagccacggtagggccgctgtatctgggagtaggggactaagagtctgagggtccacaaacggaatttaagaagtaggtagccgcgccctttctgctgcagttttctcttagctatagtaaatcttcctgagggtttggtgtctcctagctgaagaacagaaaaggctgtgactggagcacaggactcctgaatgcctgttctgtagccctcgcttttgcaagagggagatcatggcagggttgtaaacaaaggcggaaagagtcaagagacctgcgaatttactagggcatcccctcgcccaccgcgtggcgctcttcccaaagctgagtcctgattggaagctgaagacttaggtttcggaggggcaggacatcgagccaatggcacactaccctctcaaggccgcctcttccgtaactggtcggagacagtttggctgttcaggagagtcaggccaatggggccgcagttctttcttttttttttctttattcttatttttggagacagggtctcgctctgttgcccaggctggagtgcggtggtgcgatcacggttccatgcagcccccgacctcccgggctcaggtgattctcccgcctcagcaccgcgagcagctaggaccacaggcgcgagccactgcgtccggccggcgggacttatttgtcaggcggggattgggttccgccagcctaaagggaggggtaagcgccagaatatgaatcgccgggaagctgggagaaagctccgggaaaccctgagcagccaggtttgtcttcgcgcgccacgtgactcggaagctccggtttcacccaggcggggagtcaacagcccgctgaccccagtggagcggtgatcctcgctcggcaggcggcaggagcgcgatggcgggtttccccgtccgcaagccgagcagtgtggcgttaatggagaacagcagctgtgcgcacacgctcgctgcacgctgctcattcacggagggacacggggcaggaaaactgcaacaagttaaaaagccttttgcgtttgttgtcttattgtttgcatacagttaccgggaacattatgtcccacacttgtataatttacaaaacgttttcataaaaattgttctcttccttaatccataacagttctgaggcacacacggcgggtaatattttgcaaattttacctatgaggaggcagatccatgactagaaagtagtaataccaaaactcagggttgattgattatttttatttttttgccttggtctaatgtctgatggtccaggaattcacttcaagtaaaacaatggaggtaaactgatacaggtatggttttcagtagtatttcagaaaagggtagctgggtgagtaaaacagtagtttggagtgtgaatcccagaactcaaactgctactaattatccttatgaagatttgaacgggctaagggtaaaaacgggaacagggtctagtcaggcatttccatgttactcatataattcttacagcagatggagctgacaagtttg

SEQ ID NO: 4401 - DNA, 6000 bp, Homo sapiens
ccagcctggatgacagtgtgaggccctgtcttaaaaaagacaaaaacaaaccaaaaaaacccacaccctagtgggtaaggggcagcagaggtcccacccaagagtgaaatcatttttggtgtcagtaatcagggagagtaatataccctcaggccagaaactagaggtgagtgatggctcacgcctataatcccagcaccttgggaggctgaggcaggtggattgcttgacctcaggaattcgagaccagcctgggcaacataggaagaccccatctctaaaaataaatttcaaaaattagttgggcatggtggcatgtacctgtagtcccagctactatggaggctgaggtgggaggatccaattgagcctgagaggtcaaagctgcagtgaattgtgattgtgccaagaccctgtctctaaaataaaataaaattacaattaaaaactagagctgaaaggacaggttctaggttaactggtagtagttgttcattcatctgtataaaaagtacttttttgagcacctactctgtgctgtgcatggaatgaacaaatgtctttatttgacttgaacacagaccatagaagtaactaacagtggaactgggagtggcactctccatgggacctaaagacctaggagcctgtgatatgatacctgtcagtgtgaaagggctggagtttgctatctgagccagacctacactccaagacaggtcttgctgggatgggatcaaaattgctgctgggtcagccgaactatttttgtacttctgcttttcacttatatttatgtcttccctaggtatatagctgtctttttttgtttgcttgtttttctgagtcagagtcttgctctgtcactcaggctggagtgcagtggcgcgtctcggctcactgcaacatccacctcgggttcaaacgattctcctgcctcagattcccgagtagctaggattacaggtgcccaccaccatgcccggctaattttttgtatttttaatagagatggggtttagtagagacagggtttcactgtgttatccaggatggtctccatctcctgacctcgtgatctgcccgcctcagcttcccaaagtgctgggattacaggcatgagccactgcgcccggccactggagaccccttttctaccaaaaaaaataaaaataaataaataaatatatatatatatttgtaaagacggagtctctctatgttgcccaggctggtcttgaactcctggcctcaagggatcctcttgtctcagcttcttaaaatgatggggttacaggcatgagccaccgtaccaggccttagcaaactctttttcaagtgctatacaaaggggacagaggaacgtgattgtggccacctagtatgcccctattggccactgcagtgaggcctaggtgtttgaagagaggcacctagggtagtggctctcaggcacaccctaggggcattttggaaatttgtggggcatctttaatagagacaatgattaggaggcactttgagaatttagtggatggagcccaggaaaggtagacattctgcaacatgtagtacattcatacacaaggaagaattcactcatttcacctgacttacaaatataaaatcaaatataaatcagtaggactttattataaaatattgcagaaaagtttcacaagaattttttgtagaaaaagcccaatcagggccgggcatggtggctcatgcctgtaatctcaggactttgggaggccgaggcgggtgaatcacctgaggtcaggagtttgggacaagcctggccaacatggtaaaaccccgtcttgactaaaaatacaaaaatcagccaggcatggtggtgtgcgtctgtaatcccaggtactcgggaggctgaggcaggagaatcgcttgaacccaggaggcggggtttgcagtgagccaagatcaagccactgtgctccagcctgggtgaaagagcaagactccgtcgaaagaaagaaaggaagggaggaagggaggaagggagggagggagggagggagggaaagaaagaaaaaagagaagagaggggaggggagggaagaggagaaaagaaggaaggaaggcaggaaggaaggaatccagtcgagatcgttaaatttgttgtaattttgtctttggcacaataaacattagtccttattaaaactaactttacttagaaaataaaatagaaaatcctcaaggacaaatcacattgtacaggaaatatgaaatgtgaaataatatccaccttggaaattttttttttttgaaacagagtgttactctgtctcccaggctggagtgcagtggcacaatcttgggtctctgcaacctctgactcctgggttcaagtgattctcgtacctcagcttcccaagtagctgggattacaggcgtgcaccaccacacccagctaatttttgtattttcatttcagatgggattttgccatgttggccatgaacacctgtcctcaagctatccactgcctcagcctcccaaagtgctgggattataggcatgagctaccgtgcccagccaccctggaaaaattttacaaaatgaagtataaaaagaagaaaagaggggcgggcatggtgccttgtgcgtgtaatcctagaactctgcaaagccgaggcaggagatcctttgggtttaggagtttgagaccaacctgcacaacatagcaagaccctatttctacaaaaaatacagacactaggctgggcgtggtggctcacgcctgtaatcccagcactttgggaagctgaggccagcagatcacgaggtcaggagatggagaccatcctggctaacatagtgaaaccctgtctctactaaaaatacaaaaaattagccgggtgtggtggcaggcgcctgtagtcccagctactcaggaggctgaggcaggagaatggcgtgaatccgggaggcggagcttgcagtgagccgagatcgtgccactgcactccagcctgggagacagagcaagactccgtctcaaaaaaaaaaaaattttgctcagtacctggccaaaaaagaagcagctcactccctgtacacagagggtaagagaaaggagatggttgaacttctaaactcgctaaagcaggagaggcaaatgtggaatgtgctcaggaaatatctgtgagatgaatgaatttgagggaagtaaggtactagataattacctgccctacccagaacaaatcctgtgcaacgtttccttgaagagcaggaagtcaggccgggtgctgtggctcacgcctgtaatcccagccctttgggaggccaaagtgtgcgaatcacctgaggtcaggagattgagaccagtctggctaacatggtgaaaccccatctctactaaaatacaaaaattagccgggcgtggtggtgcgtgcctgtagtcccaactacttgggaggctgaggcaggagaattgcttgaacctgggaggcagaggttgcggtgagctgagatcggccactgcactccagactgggtgacagagtgagacaacatctcaaaaaaacaaaaaaaaaagagaaaagcaggaagtctggaaggggtggctactgacatagtgaagcaactagttcaattctacaacttgacaactacccctgtgccaggctgtctacaaggatatttagaatgtgtaagacattccttcaaggaactccaggaacagaggcctgacatgttgcaatgtttagtgtcaagcagtgtactagagacacattatcacactcaaacctcacaacagttctatgaggtaggagttatcactccccttttatagatgaaatagaggcttagagtgattgatttactgaaggtcaaacagccagtaaatggtgtagcaaggattccaaccttgccgtctcactaaaactgtacaaaaaaagatacaaacaacagacaaatagttcccaggcgcctcccaagttgccaggcactgcatttacctcactgacccctttgaggttgtggcattgcctccattttctaggtgaggaaataggctgagagctggggttagtctggtcatgactgtgtgtgccactcccaccaaatctcatttgatgtggttcatgaggcaaatggcatggacaacttccttcacatgtccactaagcatatggccttttacaacactttctggtttctgaactactttaaaacctcactgtcctgtgaggaaggaagaacagttattacaatctgcatctggaagccaattgccctttagagatatggctgcaattgcctcactgcctgtgtcatgtgactctccgaggcccttaatgagtaaatgaggggtgctgcaggggagccaagctgaccactcccctccctccagtcctgccaccccactgccagtgtcccaccctccttgcgccctacacttcactggctaataacccccctcactttttcctgtgttgaaggcatcctggataattccccacccacgaatggtccctcctcatctcagagagctctccatgcacacctgttactgtttctgtttttacctgtaaatatctgtgtctgacttccatgcttcatgcacctctatagggcaaagactgtgtcttaaacatcacggtagcctcagcatgttgtgcaatgaaggtttttttgtttttgttctttgttttttttttggtattagctttatttgtatcattttgaaatttttatcaaaaaagcagcgtgcctgctgtggttcccatcctctgggatttaggaatctttacccgattctccatccaagtctgtctttcgtattctaggctcttcctaaagttgtcattcacatataccctccagaattttatagggtgtataatctgtaacaactcggaggaagccaattgccctttagaaatatggctgcaattgcctcacttcctgtgtcatgtgactctcctagtcatcacatgacccatccacattgggaagccagaattacttgcaggagtaacctagtgcctatagctatggcaggtacctgcatccttgtttttgtttagtggatcctctatccttcagagactctggaacccctgtgctcttctcctcatctagtgaccctgaggtgatggagttttcaagtccttccagagaggtaagagagagagctcccaatcagcattgtcacagtgcttctggaatcctggcactggaatttaatgaatgacagactctctttgaatccagggccatcatggctctttgagcaaggcacagatggagggaggggtcgaagttgaaatgggtgggaagagtggtggggagcatcctgatttggggtgggcagagagttgtcatcagaagggttgcagggagagctgcacccaggtgtctgtgggccttgtcctaatgaatgtgggagaccaggccatgggcacccaaaggcagctaagccctgcccgggagagtagttgaggggtggagagggacttgcttttcagtcattcctcattctgtcctcaggaatgtcccaagccttcgggtagggtaagcatcatggctggcagcctcacaggattgcttctacttcaggcagtgtcgtgggcatcagatgagtgagtcaaggcagtggggaggtagcacagagcctcccttctgcctcatagtcctttggtagccttccagtaagctggtggtagacttttagtaggtgctcaataaatccttttgagtgactgagaccaactttggggtgaggatttttgaaaccgtcttcagtctctccaaacagctgtgtccgttctccacatccttgtcagacctcacctctgcttgtgctccctccctcccaggtggtgcccctgcatccctaaaagcttcagtacagctcggtggtctgtgtctgcaatgccacatactgtgactcttgaccccccgacctttcctgccctaggtgccttcagccgctacaagagcagaagcagtgggcattggatg

SEQ ID NO: 4402 - DNA, 6000 bp, Homo sapiens
ctttttttctgaagactagattgtctttgtaggactaacattagccacaagatgggaaattatggtttaggaatcatgcaggtggaggctacaagattctgacccttcctaagcactgatcctaagatcggtgcttgagatattttgcagaccctgcacttgatggatcacctggcaacacccagatcaataaactggctcatctgatcttgtggtgcccacccaggaactgactcagaacaagaagacagcttcaacttcctgtgatttcatccctgaccaatcaacactcctggctcactggcttcccctccaccaaccaagttgtccttaaaaactctgctccccgaatactctggaagactgatttgagtaataataaaactccagtctctggctcagtcagctctgcatgaattactctttctctattgcaattcccctgtcttgatgaatcagctctgtctagttaccatcctccacttctcctttcttattgtgtcacttagggctctgggttataaacaactttatcagaatccagatcttttaagtagaggaaaaagatttattggatggaaactagaggaggtgagcccatcccactgctgtgatgactgggacccaaccatctccctctcctagaagtgaatctcccttatgagtaaacaagtgtcacttattcaggattcatctcagaagagactctaatgggccaaacctcagttatatgcctgtcctctgtctgcctgtatcagttagctagcacttttataacaaagtaccacagactgggtggcttaaacaacaaaaatgtattttcttacagttcttgaggctgcaagtccaagatcaaggtgttgacagggttggtttcttttaattttttaaaaaaacttttattttagatttaggggtatgcgtgcaggtttgctacataggtaaactcctatcacgggggtttgttgcacacattatttcatcacccatgtactaagcctagttactcaatagttattttttccgatcctctccctcttcctaccctccaccctcaggtaggccccagtgtgtctgttgttcttcctttgagtccatagggttggtttcttctgaggcctctctccttggcttgtaggtgtccatcttctccctgtatgggtctgtgtcccaactaacaaggacatcagtcatattggactagagcccacctaatgattttattttaacttaattacctctttaaaggctctatatccacatatagtcacatcctgaggtatagggggttccacatgtggacttcaacatatgaactgggagagacacaatttagtccttaatagtgccccaaagtggggaaaaggaagatctggaccctcgggtttccatagtagaaagcaatcactgctttctattaagtactcacagtggggcttatccaggaagaatgatatgctaataagaaggggaggaggaagtgatcctggacagccagatgatatgtgcactattccttcataatggagattctgaagaggagaagcacttgactaaacactttttcattcctactccgtcttcaaccaaaagctgtcaaacttctgtttctcagccccagcccctgaaattgctcaggaaaaggtcattaatagttccttgattgccatatttcaatcaaactcttgtttgaattcttttctacaacattaatactgttactgttgactactccttccttgaagatctgttcccactaaacttccttgttccctcctcttcagcccctcctatacaaactcctttgtcagctatttttcctgtgcacgcttcaaaaatgtttgcatgtcaagtttctgtcattgactctctcctcttctcctctccctctcaatccctccttcctttccctcactgtttccctttaattctctctcaatactcttacagtttcagagatcttatccttactttatcttaacctaggatctctggatggattcaaatagagcttcttaaattaaaggaaacataatgtgtatatttgcatcctttcttgggagaaggcccaaaggtttttatcagaggtttgaaacctcaaccgtgttggtgcctcctaaattgtgtcttttgtcaagacctgtcttctgagttccagggccatgtgtctcactgcctactggaaatcttcacctgaaaccttcacagctacctcaaactcaataacatcaaaagctgaaatcattgtctctccctcccaaagcctgctcatcttcccatttttcttttgtccatgaaagctactgccatcctccttatcacccaaattagaaatccgagcatcacccagacctctcccccttcatcacccctcagccaatcactcaccaagtcttgtccatccttccttcctaacttctctcctggatgcttccattgcatatccactttttaaacagagtggctcttgtctcaactagactgttgaaataatcttccaacttttccctccaccttccatctctctcccctctaactcattccttggactgctgtcagagtacttttcataaaatataaaacagatcttgtgattccccagtctaaagcctttttattagttcccattaccttttagaataaaatatgtactgttcatcctgacacacaaaactcttcgtgataaatactaattgagtgcctagtatgtgcctgcccttgtgctaaatgttgagggtacaggggtaaacaaggtgaacagcttccctgctctccaagacctttcagtccacaaatgcaatgagtttacagaggagaagcacaagctcctaaaggagttggggtggggttgggggtcagaacctaatttagaaaattgaggaaggtctcaacctcccatcttgcatttacaatagtaatcagcaggtgtggtaccaaatatggaaccaacaattttatctgcattatctcatttaagccatgagtgccattattgttagcctcactttacagataaggaaactgagggctagaaggttaaataagtggcagagttgggatttcctccagattcctgtgagacccagacatcttaatccttttggaacctgtgcttctcctttgtagtactcactacacttgtggaactacatccaactacacttgtggaactacagccagctctgcaaacatgacagtctacttcactccaagtctttgctcatgctgctcctcttgcctggaatgcctatttctctcaaaaatcttcctgctgaatattttgcgatctaattaaagtgttctctcttccatgtacactcctccctcagatagaattagccactgtcttctttgtgcatacacagcatttcataaatactgtcacagtccctctagcacttcaaatacttatctgatgttctccccctaagaaactgtaagtcctagaggatgacaatcaactgaattccatagtcagaaacttctgctgtgcctggccttccaatgagaaaaggagagaagaggaggggaaggaagaaaaagggaaggagaagaaagaaaagcaaacatgaagataaacacttcaatatatgatatcccaagaccatctacccttttgtaaaaattttgctttttttttttcccccccaagagtcagggtctcactctgtcgcccaggctagagtgcagtgccatgaacataactcactgtagcctctaactccggggctcaagcaatcctcctgcctcagcctcctgggtagctgggactacaggcatgcaccaccacatctggctattattattattactatattagtagagatggggtctttctatgttgcctaggctggtctcaaattcctggcctcaagcaattcttccacctcacattggccttccaaagtgctgggattacaataagccaccataggccaaaattttgcattttatccattactgtaaaattaacccttagaaatccaacaacactcaatttgagaattgttcaacaaccacttaatgaaaaccccctgaaagcttcccatcctgttgcagtccctttctctcctcctgtgctctctcctcttcttcctatctagcccacccttttggcagctaagaattcctccctccattggagagccacagaccaaagaggagtcaaataagaaaataagacctcaaagaaggaaaacaaagtgaaggccttgcatcagaagtcacgtggcagaaagccacctggatatctgaaaagaagaaagaattgagggatatccgctttttgcctcagagaccatccttagccctgaaggctttgtttctgctttaggtttcccagataagcatccgaagtgctacagcaaggaactttaagtttccagatacttgtctggattttgcaaggcgtagatgagtcacttgagaaggagaactggaatggctgcctgggttcatttccattgtccaatccaagggcctgtggagaaggggctgctgcaagactctgtgtgtggcggggggaggggtgggtacgtggatggcaatgggaggatcaattaactccacccaggagccaaatgaaacacacaaataaaaaacaaaacctgagtagtggtttttaggtcattctggagtagaaagagcattcatttatagcaaaggttggcgggcacctgtgtcagcccctgcctccactccacccctaacaagtatcaggtgcccacacgggcctgctgctcgcctcctgggcttttctaagccaggtgagacctgtcccagatgtccacgaatccactgggggagtggcactatcaagcagagtcatctgattttctgcctgggacctggaccattgtgagagtaaccaacgtggggttacgggggagaatctggagagaagagaagaggttaacaaccctcccacttcctggccacccccctccaccttttctggtaaggagccctggagccccggctcctaggctgacagaccagcccagatccagtggcccggaggggcctgagctaaatccgcaggacctgggtaacacgaggaaggtaaagagttcctgtcctcgcccctccccacccccaccttttctgtgatcttttcagcctttcgctggtgacttgttcttccagggcccatttctctaccctacctgggtttcttctaacctggaaatctaatgatcaaatcacactaaaaagtcagtagctcctgtggattacatatcccaggagcatatagattttgaattttgaattttgaaagaaattctgcgtggagataatattgaggcagagacactgctagtggtctgaagatttgaaaggaccactttctgtgtgcaggcagggcctcagctggagatagatgggtctgggcgaggcaggagagtgacaagttctgaggtgaaatgaaggaagccctcagagaatgctcctcccaccttgaatctcatccccagggtctcactgtcccattcttggtgctgggtggatccaaatccaggagatggggcaagcatcctgggatggctgagggcacactctggcagattctgtgtgtgtcctcagatgctcagccacagacctttgagggagtaaagggggcagacccacccaccttgcctccaggctctttccttcctggtcctgttctatggtggggctcccttgccagacttcagactgagaagtcagatgaagtttcaagaaaaggaaattggtgggtgacagagatgggtggaggggctggggaaaggctgtttacttcctcctgtctagtcggtttggtccctttagggctccggatatctttggtgacttgtccactccagtgtggcatcatgtggcagctgctcctcccaactgctctgctacttctaggtaagtcagggtctccctggttgagggagaagtttgagatgccttgggttcagcagagaccccttttcaggctacgaatgagactcccacgaagggatgggaccc

SEQ ID NO: 4403 - DNA, 6000 bp, Homo sapiens
caccaacggtagggacagggagtgaggaagaacccagacccacagctgtggcacggatgccaagacctcgcctcataaagtcaaactgattttagggttgttggataaaagcaggtatgaactagagggtatgggttttggcctgagttctagagctccaaacttggaggcaggatgaaggctaagtcctgagaggaagcagtggaaggctccagagcttccttaggcctcctctgctggggagagtgcactgctgatgttacctggtctccaccctctcactgagccccgagccaggggctcccggctccctcctggctcacattctgactctgatgtcactgagctccctgccttcctttcccattcgcttgtcctgggatcaagacaaactgaactgttgactctttctctacatgtctctccctgaacttccccagtcccatctctttgctctccctacactgcccctgcccccgcccccaccccccaccagaatgccctcctcaccatcaccctgctcttgaattgtgcctcaaattttgcccacccttcctggcagtatttgtttcccatggctgctgtcacaaattaccataaacctggtggcttcaaacaacacgaatgtattatctgacagctctgtaggccataagtctgacggaggtgttctcttgaactaaaatcagggtgtctacagggctgcattccttctagaagctctagggaagaatgcattggctggccttgaccagcttctgcagcacccacagtccttgcctggtggccccctgcctgcatctttgaagccagcagcatagcatctctctgaccctacttccatgtccatctccttctctaaccacagccagaaaaggttcctctgttaaggagccatctaattagattgggcccacctgaataatccaagccactctccccaaccaagggccttaatttatatttgcaaagtgccttttactgtgtaagacagtattcacaagttccagggattaggatgtggacatttgggggtgcgacattgttctgcccaccactctggcccagcccaagtagccctcactgccctcaaagccccctctccaccattctgggctcccctggcccttggtctaggtttcccaagtgcctctgcagccttcccccagcacagctcttaccaccctgaattgtcattgcttgttgatttgtggttttcttgcaataaacttcaagttctgtgggaacagggacagggtttgtcttgtttactgagatatccccagcacctagcacagtgctcaaaaaatttttgaagggaaaaagcatttctgatacgggagatagaaattatttaggcagatagcaaggacaaaaaagtccttggcagaacttcccttctaataagaagcagccctagaaatcatttcttttctaacacagagcagcctcaaagattgggctgcaaacatatataaggaagctggaagcttgcacggaggaatgctggcagctgcactcatagaaaagggctaccggggggccaggcatgttcaccatgggactccaccttcccttttttgttagcacatgtacagtaagaaagaactgggcaacatggagaagctcaggcagagaaaccacctgcataataaagattgggctgggagctgccagagatttgtgccctatgcagatggcacacctggtgctaactttttttgagatgccctgtatagatgagatactgcctccccactagctcatctataaaaccccctgcatttcaccttaaattggcaactcatttttccaggacccctctctgtagcagagagctattgtctttctttcacctattaaatttccactcttaacctcactctttgtgtgtctacctccttgatcttcatggccaggagacaacaaacctcaagtgtcaccacagacaacaaggctgcttcacttctacaacacatcactttctatgttacattctgaccatgtgattggtctgctattaggttgtgcattacttgaaagcagagttgcatgtgatttgtctgttgtatccctggggtacctagcatctgtgagccctggagtttggctcacagatagtgcttggcacatgtttatggaattaaatttaatgaataggttcagactcacttcactggcatggctcataaacacagggcacatggaggatgtatgggaatgaggtgccctgggtcaggtaggactatttgggaaaagcttctgcaaggcaaatgcttgggcaaagatttgaataagatgaaagataacgactggcagtgctgggggtgataatgtcctatggaggactgcaatgagcaaagtcagatatagggacagccggtggggggagtaaccagtgatgagatggggtggggaagtgcagaaatggtaaccacttggcttggttgccaagtggaggggtctgaattggatgcaacagggtgcttgctaccagggattgagcaatgagcgatgtgctgaaaacagaattggaggaagacaggatggacctaggagcacacaggaagggagtgcatttcagggagcagaatgctagccgaggaaagatacaggcagggtgatgatagctacctcctggggacacctggatagacaagatgtggaaatatgagagaggagtcaaagatagtttgatgccacaatctaggacctgcagaaatgcagaatgacagtggaaggcctcccttctgtttgatgaggaagatggtgagctcagcattgggtatctttagtgttgtgtgtcagagggtcatccattggaggtgacagactcagccccatgcttttgtccccatgaaagtcccaccttcatatggaacgtatatggggggaagaagtgtctttttccagtacttgaactatcccttctgcccccacgaggtaggcattctgtctctgcctgagcttgctcaccaaagcagccattctgacctccacaatgagctaacattgccatttatagagcctccctctttgtgtcagatgctgttctaggtgctttgcatatgtaaactcattatatccctacaaccaccttgaaaatttggtaatattaatcccattttatgggcatggaaaccgagacttctgaaaggattccaaagacttccaaagatccaaaggcggtgtcctaaaggaaaccacccaaattcacacaactaggaagggaggaaccaggattcctgccctggtcactctagctccaaagcccctgacctttgcatcacactgcaggcctcctgcccctgccccctgccaactagatttaatttaattctatagaattcagtttagcaaacacttcctgagcacctaccaaacacaggtcactctgccaggtggcaaggatataaagaggaataagacataagcataggagagaggaacacaaactcagtggcctccagataagtgcccacctcagttcacagggcctgcgaggggcttgattccacctggacccagcccctatgctaatccagccaccaacctcaagtttgggccatattgatacccctcccacccacccctaaggaatcccaacatatcaaagctgaaggggatcttagaatccaaccgaatcattttacagataagggaagtaagggaagctgaggcccagagaagggaggtatcttttccaggctaacacagctgcttagggggagcgccagggccaaagccccggtgtcctcactccgggtctggtgccctgaattcatatgactcccctttccttcacagctggcaagaagttcacatctgccacatagcagccagggaccctcacccctgcatcctggccatgcacactttgccccattttgccaggcccagcaccagcatggggtagggggatcaggctgaggacgctgttgtgcacactcttcacaggcccagcccacaccacccatcgccaaccctagatttctccttctcagaggtgtgtgtaggggtagagacgttgccgcgcagaaagtcttctgcagcaaagacgtggatccctaaataacatttccagattttgaatgaggacaaagcccttcaatctcgtatcgtttttgttgacgttactagcttacagtgtataaagcgctttctttctaaaacagcaagatgaaacaagctgagttttataatacaaggaagggagaagcaccgcagtgggagttctcaggccacacaaaggcaagacccttccccaggagtttggaaggctgacgttcccttttctggtttggtcgggtttgagaaatgcccgcctctcccttgcgcaagagtctccccgcccaggtgaaggcgggtcttgttgccatggcgacagcgcggtcgggttaaggggctgctctggcaaccaatagaagctaggagagggcggggacaactgggtcttttgcggctgcagcgggcttgtaggttcgtggacgcggcattgggggaggggacgggggtcgcggggctattgggggtcccagtccggcttaagacctctgggcgtggtgggcaccggccttcgccgtcggagcaggggtcccagactcgcacccaaaagttcccgtcgggcccgagcggggaggagctgcggggcgggcagaggcggagatggcggagggcggtgggacgtgatgcgcgggtcagagccgggccttgagaaggaactggaggcccctggcagcggtgtcccctcgaggacccctctgccgggctcaccaggtggctggcggagagccggagagttgggcgggagggaagcagggtttggcgaccaggtttagcaggccttggaatcctggagcccagcccccaaccccattcccacttggccggatggttaagggcctagcgtgctggctgcggtgtggccaccttccccttctccgactccgtatctctttttccaggtgtccggctttgctggcccagcaagcctgataagcatgaagctcttatctttggtggctgtggtcgggtgtttgctggtgcccccagctgaagccaacaaggtgagggaggtgagcctgcagcacctggtcacgaccacagtgcacggccaccctgtctacagggctgactcagaggtagccagctgctccttaagcctgcctctcactcacctatgggccatacttcttttagtggtcttccttcaggttcaaggctgctggcctccctaaggatagtgcgggtgaggagtgaggaagggtggggcacagagcactggctcactctgatcagacagatcagtggtggacttccagcaaggaagtttggagaagttatctaagttctccataccttcctttgctttggaccaaagtatgttttgtttcagatatttttggatttgggagtatttgcacataaaaaatgagctatcttggggaggggacctaagtctaaacctgaagttcgtttatgtttcatatatgctgtatatacatagcccgaaggtaattttatacaatattttcaataattgtgtgcatgaaacaaagtttatctacactgaaccatcagaaagcaaaggcgtcactatctcaggcacccatgtggatagtctggttggttggcatcaccaccattcctgacaatgaatttatatgctaccgataaatattttcttacgttacacataagttcttaacggtaaaaaaatatgatgtactattaacacagtgaaaataaatgatgtgttcagggtaactaagcacagtagcatcaccagaatacctgtatcagctgttagacacagcaacataaggctttctgtctcctgctgtgatgctgtgttttgattaaaggttactgtgcacagtatttttttaggtgagaagtagtatctgaagcagtagagggaccagaaagtgggtcctctagagatgaggaggcattctgccagatggcttttaaaaatgtttttgccagtcacctgattca

SEQ ID NO: 4404 - DNA, 6000 bp, Homo sapiens
ttaaggcagtattttccttgtcaggttagaaacattataactatctttgttctcctacctagcttcctccttcccaatacccaattaatcatcaaattctatcattttttccttaataatgtcttgaaaattttcctccattctttatattccagcaaaacagaaacagaaggtgaggatccagctctccagtctggatggggagactagaaacacactacatacaagtgaaaaaaatttcataggaattacaagaataccaaaacaatgcaaaataacagctccaaacaagccttgtatacacatctccaggcaatagctggcactgcatttgtccagtagtaatctagggcagtgggtggggaggtccttctgctgcgcaggggctgtggtgaggcctttcaggtccagcttaagccactctgattccagccaccaccccaccttagatgggcaagctgttcctttccagatcaactcatctccacccacaacacagtgcttatgtattcagtctaaaatagcacaatttatcaagagtattccatcgtaattttaaaatgtcgtgtttatattttacctccacctggacagaaactcgttcctttgtattcttactgcccctccacctccccatagcaaccagcacaagattccaccgtgtgtagtctataaataaatgttaaatcatagagccttagaattttggagtcagacggggatcttcagagttgcatttgtccagtcctttatagatggggaaacaggtctagagagattaggtgacttgctcaaagccacacagctggctattgacaaggcaaggagcagagcccaggtttctcctgcctgaagtctgtaccctgaactgtccttagataatcagtgacagacacctgagttcacacaaggtctccaggggttgatggtgataggagaaactggctttcccaaaacatgtacaaagattcggtccacgcccctagcagaccttcgggaggactaactcctcagctcggcgtccagcagagtcccaagttacagtcgcacttgtttatgcgtctgtcggcctcctccgacaggaccgagtactcgagggccccgcgctcaggggctcccctccggcccctcccccgccgccgagctgtcacacagccgccgcgcggcccgcccccacgtggactgggctcggaggatcaaagtctgtttgcagactttgcagcccggcccccgcaggtgtgctgggagttgcgatggtccgcaggccaggactccgccacacccgaggggacccggccagcccctccccctcccgctgcacgcggcccgcgcccccaattcgcccgccgctgcacccggccacggccccccggcccacgcccggctccgggaggaaaaggccccgcccctatctgttggagccgcgaccccgcccccttcccgcccctccgaggctccatccaatagtgagcgtggctgggcgggacgccgaggctgtcgtgagggggtcctgaccaatggggaagcgtgccgggcctggtgggcggggcggcaaggccttgtcacgctcgggtccgtgtgaaaacgggggttccgagtgcaaagcaaagtttttttgtaaaccgtctgcaaaggcgggggggcgaagaaggcgcccgagaccgggccgagtgcagctgccgtggccgccgcctctctagctcctcagccatccgctcctcagtccagccgccgcagaggagaccagcaagcagagccctcagatgctcggagctttctcggcgcgaagctgcccgtcgccctctcctgccgccctcgcccgccgccctcctgctcctgctccggctgcggctcttggtaccccggctccgggagcccagctccccgccaccgccgccgcctgggtgtgggggctgctgaggctgagccgggcctcggcgccggctctgaggacggacgcctgaggagctgcgcggcgcggcgccgccggctggcggagaacgcccacaggcgcggggctcggcggcttgacccgggcttgtccccgtgcggccgcgggggcccctcagcggtttcccgaacggcccgactcgggcgctcctccgtgtcgcggtcgccgaccctccgcgtcccgccaacgccgccgctgcaccagtctccgggccgggctcggcgggccccgcagccgcagccatggggtgttggggtcggaaccggggccggctgctgtgcatgctggcgctgaccttcatgttcatggtgctggaggtggtggtgagccgggtgacctcgtcgctggcgatgctctccgactccttccacatgctgtcggacgtgctggcgctggtggtggcgctggtggccgagcgcttcgcccggcggacccacgccacccagaagaacacgttcggctggatccgagccgaggtaatgggggctctggtgaacgccatcttcctgactggcctctgtttcgccatcctgctggaggccatcgagcgcttcatcgagccgcacgagatgcagcagccgctggtggtccttggggtcggcgtggccgggctgctggtcaacgtgctggggctctgcctcttccaccatcacagcggcttcagccaggactccggccacggccactcgcacgggggtcacggccacggccacggcctccccaaggggcctcgcgttaagagcacccgccccgggagcagcgacatcaacgtggccccgggcgagcagggtcccgaccaggaggagaccaacaccctggtggccaataccagcaactccaacgggctgaaattggaccccgcaggtgagccgggaaagtcgctgccgcaggtggttgggtttggggtgcccagagcctcgcctggccttcggcggggtggcccgcacgccccctgctgcccgagcgggcctgcgccgcgccgcccctgcctgctccctccccgtcctgcacacgccccgctgctgctccaggaaatcagaaccccctcagtcgggtgcaaggagccggcgacgcgtctggcatatttgtaggtgggggctgtgggtcagaccctaagaaaaagggtcaggaggtgatcatcatcccgctgcagtccacacccgcacttggctgtctttacaggctgcagcaactttgctggagacttgtctggttatggttataacagcgtcagaaatgcttcccaattcaattccttggccctcttgggaaacggagagaatccccaattcgtccccagtagttgggtgctggaaaccttgctctgccaaagtagttcttatgcccattgaactccgtttcataatatgcattcagagcgtgtaaaccctggttaaaggtttcttttatgaacagcagtgtatgcttcagctaattgatccctaatcctggaaatcatagatttaggacctgtctgggcatgtttaacattttcccaggacttttcataatcgtactgaactaaaagtgatggtaatttattcatcttatatttttagtggatgctttttatatttaacattaagtgctcttgaaggaaatttgaaaataaatgttgaaagaaaggagatggaaatgactcaaccagtgtcctactacccaagctcaatggtgcttaacaatttggtcttatttccttcacttacgtttatttaccttgtatcattataaattatgctacataattttccttttcgagtgcagaatatgaagttagtgaaattcaagttgtacattggaaaggtttaataagtaattggttttcctctcactccactcggcaaggtgttattccaaagaaaattaagtttctctggtgtgtaatttcaaaagatcaatactttttatctttttgaatacttttgatcaatactttttgaaaagatcaatacttttgatttaaaagttagtagggcaggtagtcatttagtttcaatttttctaataatctctgtgattattgatttttattgttgatttgtcagtttttaaacccccctaccaagaaacttttatattcataataaaagtttaaaagttaaaattggttttattctcaagcaattggcctcagtgacaaagagtgactagagagtgcccgagtgtcaaatcaggtattttgtattagtagacttattcctagctgcatttaattttggtgttagcattcaattttatgttttcctttgtatataccataaagtatagcagaatggttgcaggactccacccccatagaaaatatacactattttggagaggaggaggcaggagagtggttaggagggtgaagaagcagtatcacaatgacttaatttagccctggctattatgtcctggctcattcccagaatgtcaatttatattaaattgctctgagcacatttttttaattgtactttctgaaaaaattttcaccttcatcaccacttaaaaagaattagacaaggatgtttatataaacactttaaatgtatttgatataaaatttttatttctttgtagacccagaaaaccccagaagtggtgatacagtggaagtacaagtgaatggaaatcttgtcagagaacctgaccatatggaactggaagaagatagggctggacaacttaacatgcgtggagtttttctgcatgtccttggagatgccttgggttcagtgattgtagtagtaaatgccttagtcttttacttttcttggaaaggttgttctgaaggggatttttgtgtgaatccatgtttccctgacccctgcaaagcatttgtagaaataattaatagtactcatgcatcagtttatgaggctggtccttgctgggtgctatatttagatccaactctttgtgttgtaatggtttgtatacttctttacacaacctatccattacttaaggaatctgctcttattcttctacaaactgttcctaaacaaattgatatcagaaatttgataaaagaacttcgaaatgttgaaggagttgaggaagttcatgaattacatgtttggcaacttgctggaagcagaatcattgccactgctcacataaaatgtgaagatccaacatcatacatggaggtggctaaaaccattaaagacgtttttcataatcacggaattcacgctactaccattcagcctgaatttgctagtgtaggctctaaatcaagtgtagttccgtgtgaacttgcctgcagaacccagtgtgctttgaagcaatgttgtgggacactaccacaagccccttctggaaaggatgcagaaaagaccccagcagttagcatttcttgtttagaacttagtaacaatctagagaagaagcccaggaggactaaagctgaaaacatccctgctgttgtgatagagattaaaaacatgccaaacaaacaacctgaatcatctttgtgagtcttgaaaaagatgtgatatttgacttttgctttaaactgcaagaggaaaaagactccactgaaattctaagtttgccaagtagtgtaattgaagtccttgtctggtcacacagtttaattctatttttgtaagaacataatgggactgcataacagagttctatattacaattttgtgattattagtacagagtacagctatgctgtgactgttttggaaagccagttttaacactatgttacatttttgtttaaagtaagttaaaccttatataacataatgacatttgatttctggatttttcccatgataaaaattagggggataaataaaattgttactggaatttctctgcttttcttttcccccagtgttatactttattagaattataattgatagaactttaaaatcatcaacagtttgtttcctttgacattttaggtgatattgccctttgagatcattacatagcataatggcagcatattttaagagtgactcatggctattagtaggaaataagatcagttactatcctgtattctgtattgctggctattaaacagtaagataatt

SEQ ID NO: 4405 - DNA, 6000 bp, Homo sapiens
tgggtatctccctcattcctggtttttaaaatttttatttgctactgtaaaaaagtcaactttggaataagtgtagttgtcttggtgtggcaaacttacaatggcattgggatgtgaggtgttattaaagctcaaaaaataagaccttaatgtcttaaataattgttaaaagcctaagattttacttttagcagtaacccttgttctagaatatcctactagctatgcatattcttattttattttatttttaaatcaatttcattagggattggagagggaacattcttttccactggaattccctttctctcattaaagcttctgcctaatacatatttttgtttgcttatcaacagtgacaagtaaaaatggcgataaataatccagcaagccgattaaataacttctggggtaaagataaatagaaaaatagaacaatagcaatccctatggaatgaatgtgttaaacatactaatttgcactgagcaggaaaaggttgtgaaacaaatttagaacaaatgggagagaaaggaaagagatagtggcttacactacttttctgactttacgtgggaacacaagggctacttaaagtcatttcttccttgtggaacttattcactgtctattccctcaactagcaagggatgtaagtagtctaaagctgctgccattgctatatggaggaactagcaaggagagaagaaaaacattgggagaaaacaaaaggttattaggaggaaaaagaagtgtacagctctaggaagcgtaatacttcctagagccgctgtaacaaagtactccccactgggtggcttagaacaacagaagattattgtcttgcagttctggaggccagaagtccagactcaaggtgttgtcctctgaaagcattaaagaaggacctgttccaggccgttctccttggcttgtaggcggcattcttctcctgtatatttacatggtgtcccctctgtgcatgtgtgcctctgtgtccaaatttctccttttcataaggacaccagtcatattgaattagggtccagatggaccctaagggcctcagcttaactcaataatctgcaaagaccctatttccaaacaaggtcacatttagagttactgggagttagaacttcaacatcttttgtgggaacataattcaacctataacgaggagcgtttaagaaaaaggacaagggagaagaattaggtccatgtgacattttttcccgtcgatttattgtgcttctcatgctgtgttgggtacaagtggtcctcctctggcaggtgctagggagcatggagtatttcctagagcagtgtcttgttggtgatgtatgggttacccactgccactcctggttcctgcaattaaaccatcaccctgtcagagcaggaggaggtggcagaggagagggacagtcaaggagcgaggccagtccagtatcagcatctccttctgcctccttgtgcagaagagatcaaatgcctgagccagtggtatgagataagtcaggtggacatggcgcaggtgggaaggatggagaaactccttgtcatgtataatgcaaggagagaaacatctcaaaggaagaaggaaacatcagatgattgaaggaggagaaattcagatgaataaggaggtagaagcacagaataatattcctatgtaatttctttttcttttatgatccctcatatatgttcagaatattactcggtgcacttttcctttcattataagaaaaaatattctttatttttatccccaggaataaggtgaaagttattagtccgcactcatttcctgtgctcagtctgagactggtgacctctggctggaatttacattactttccttgagcaaaaacctctgagtgagactggctttgaaattatcctgtgggtgagaaagccaaaaggtgtctgattcttagtaccatatttcaaaaggagcagtaacaaaactagagcatgcccagaggagtgtgtagccacatggcctgtatggggtctggaaactgggtaatggaactgggaatgtccaacccagggaagaaacacttgagtgctagtacacacaatagcttcagatccttaaaatgctgccaggttgaaggggagggattttattctcttttgtagccataataactagttccagcagatagaagatgggttacagctcagtacaaagaagccagtaaaacggtttgggttagagctgccctaccgtagaataggttgcttagtgaaatgagttctctggcatggaaaaacttcaggcacgatgaaatgtccatcagctgtagccgggtccaagcactggatgggttgtttatcaaatggcctctgctctgtgtttttttgtttttgcttttttcagacctgggagttttatgttttatttttggtccttaggtttataaatccctgccaaaaataatgcatcttcaataacggagactgtaactttggagataagtggaggttttagaacaaatcactggattgtactcacctttccctaaacacccagacgtcccattcctatgtcttgtttaaaggctcatttcttggcctcagtccatatgaggacatttagttaatacacagatagggcacattgaagacacacaatatatacattcacattgacttcataggctttagttttatttctgtgccattttaattctgactgcttgcccctcaaacctgcaaatatggtaatttatatcactcacatttgataaaagaaataagcttaagctactatatttttatttatgaattttgcttaaaaagaaatggaactgtgccagaagtttctgcattgactataattattaaggaaaataagaagttaggaagaagtgagaggaaattataggcccactcagtggtatgctaacagaaaatgtttgttcacagggaaaattatgaacagccacaaagacttttttacttctgaaaaaaaaaaggacaaaataatttcagcaatttcaagtgtcattttcctgaagtcctggtaacataacaagcatttggctgctttttccttcacgttcactgcaacctgacagatgagacacatggactccctcttcctcccattccacctccacgacatttattttaaagactagagctttcctcctccaggatgttttggagaggatctagtgcatggacctccttgttgactgctgttcttcctgtattgtttcattaagttccaattctacacccacagccagagcatctccagggatgactttctggtatttcttaccattttatcttcctcatgccatttttcattgtgttccaattctttccatttctttgggttttgttgcactggctaatgtatttcttatacagaatatctctttatccttgatttaccaaatagctcccaatatctggctttgcctttcatatcattccatacctagacttttccctgtggttcttcattctcagagtagtttttgtcacatacacatacagcatttggaaaggcaattaataaatctcattggaccttccctctgccctgatccggaattggcagatatagcatagcacaaaattgttattgctgggttttgaccccaaagtaaagagaagctcttctcagtttgtttgaaattttatggaattttgtggattaaaatttctatgctcatgactatatgttctgtaattaaatttctatttatttcttgtatctctcctttctattgatagaaactgaaaaagaaatgatgtcttatatagttacgtatagcatatcagtatttgtgcctttttgtctgctttggttgagaaataaactgctttcagatgctctacttttttacaatatagttgaaatcttggcacaaaaattatcacaacaaaatcaccacctgtatcaaaacatggctccaacaccaaccacagcccctattattatagatagccatgttcatgacataaaattttactttcacaaagacttggaacagttcctcagtactttgttccatagtgaattttaaccaacttttttttttttttttttttaatactttaagttctgggatccatgtgcagaacatgcaggttcattacataggtataccaactttttttttttttttttttttttgagacggagtcttgctctgtcgcccaggctggagtgcagtggtgcaatctcggctcactgcaagctccgcctcccgggttcacgccattctcctgcctcagcctcccgagtagctgggactacaggcgcccgccaccacgcccagctaatttttgtatttttttttagtaaaggtggggtttcgccatgttggccaggctggtctcaaactcctgacctcaggtgatccgcccacctcggcctcccaaagtgctggaattacaggtgtgagccaccgtgcctgtcctgtcctgtgttttttttatgttcctgtagttttcccagtttcctttctcttgccctcatctcccccatgtccaagtctactctttcaaactgaagatgattctactctgactcaccacccctgaagtctttgctcagtcctggccttgtgtgcgttcctttcatcagtacttctttctcaggatcagctccttgtatccacagacacatttccgtctcagcctccagtttcctccgggtgagaggagtctaagattgcttccatggaggttgcagtgagccgagatcgcgccactgcactccagcctgggcgacagagcgagactccatctcaaaaaaaaaaaaaaaaaaaaaaaagattgcctccagtattcctgggtggggtggtttggaaggggagagagacagcactgcagcaggagccttggcaacacagttccccatgcttatcgtcaattttgtttgttcattttcagtatttttatattgcttccctgctatttccctccttgggctcttcccgcaaatcaacactttctgcacttatcttttggagcaaattgacatgctgttttttggtggttctggtaagtcgtttacattctattcttcctgtaaaggaattcagagttcagataaggactaaatagccttaggcaggagatgagaggctagttaggttttctttgtcctgagcatttaaatgacttcagtttggatcagtctgggtgatgatgggcctgtccagatttcctgtagccaaattggaagaggtccacttagcttggttgagcgtaagcacagagacaaggaagggtagaattctctgtgatttggaataggtttgaggcccttcaaactattccctaaaaaaacactccgtgtgtgaatgtgtgtgagcatgtgtgagtggatataagtgtgtgtgtgtgtgtgtgtgtgtgtatttgagcacacacatgctcaagtctgggagtgcatcaatgtggtgagcctgtgggttgacactgtgctgtgtattgtgtgtgtacctatagagacaggtgatctgtgtccctaaaccatcactgtgacccttttaatgtcatactttagattcagaccaaggtggatataatctcacgacgtgacataaattgcttaacttttcagcctactcttctcttctctaaatggaaataaacatcataacctcatagggttgctataaagagtaaatgaaatcatgtgcataatgcaatcactgttaccacccccataacacatacacgtacacacacacacacacatacactacatagggacacttgcttattccctttcccgtctcctctctcctcctgccttctccctccttctccttcccatttattctattgaattgctatctaggaccttttccttgaccaccagctttcaactgtaagccatgaggtctccctaccttcattctgacacattcacatggtcttttaagaacattgtaaagcattctttctgagtactttcctcttgaatttttagttaatggtagtctctttcttgcacc

SEQ ID NO: 4406 - DNA, 6000 bp, Homo sapiens
aggaggccgaggaacgcccacattttgtgaggtcttcagctttaacttgagctacaacccccatccccaaatctcaaagaaggtgtgtctgtttctctcagggtttccagccctgccctaagtttgagaactccaggcaggcggcctccagaagtctgtgagactgtcctttattgtgtatacaggttccagcgtcagggctctcccacggccccctccccagtcctcccccaaggggcccagagtggtgggagtgagaggccaccctaaggcacactgaccagagaggcatggagggaggaggctgacttgccctggggacccctgctaactgagacccacccttcccctccaccctgcttctgtatgtgggagacgaaaccaagagtcattgggggcagcaggcatttcccagggttaaggctgatggaaggtccctatcccagatgggagatgggggcttttcctatgactcccccccatcccccagctggaagacgtggggagggttgcatagccttagagaggtagaatgaggggaaatactcctcagtgcccagaggtggggagttgagagcagcagttgacaccctgggttcagatctaaccttcagtgacaaagcacagcactcagtggctcggggatgtttccccgttaatgaaaatggagattgtaaatctgatttgagaaagctctgaatttggcctcaaccaatggtaatgctgagtatttgaaggacaacgataggggtgtgtgtgttacacacaccgagcctatagattcatagattaaagagggggatggatggagagctgactgcccggaggggaaggtggcaagaagctggggtccaacctcgaggacccaaagccccatccatgccctggcttccatctctgttaggtgatcctgtctgcatgggagcagccccaagaacacaggcctgtgggagggagaaggaccagccccacccccaaccccacttggccttgcctggaggccccagcaggcgcaggacggcaggagtttcatgcagtttatcacgaaccagctgtattggaaaaaccccatctatatacagatgtggcatggctctgccctggcacagccagctggctgggggcacggggtgggcaggcagcctgctcgctggcgtggggcttggaggctggtagaggggaagtttaccgtcacggctgtctcctcttggccttgctgagccctcgggcaattagttccacttagataggcacccttgcctgtgaccttccctctgtccctcccactccccttggccaagagggttccaggtccctggtccccttgccctgcagagacttcatagatcagagggtttgtctgtctgtctgtcctgcagagcttgcccatatgtcctgctggtcccattcccctgacccacagtgggttctttagatcttccttccctgaccccagcccctgtactctggattaagtgacggaggccaaatctgaaatctgggcatcatgtgtcaggccagggagtccctggcctgccctggatagagtggagggccctagtttgggaggatggtccacctggggtctggggtgcgtgggggctagaacctgggctgagatgtcctggagctgttgtaatggggttagcgaggctttgctggcaggcgtggggcggggggacagggaaagggaagggagaggcactcagattttgatctccgtccggaaggtctgctggacgtgttctgtatgcgggtgacgccgtgcccggatagtgaggctgccgtcctcccgcagagccgaggtcaccgacgtcgggtccacgtcctccggcagctggcacttgtgagcgaaggtgttcatgacagtgccgtcagccgccagctggggaaggggtgacccgtcaggcaggctgccccgacccctgtcctgcttgtgacaagccagagccctcttctccccattctaaccccagccagaccccacatgccgaggggctctgccctcaggtgccgaggggctgcccagggtggtgatggccacaggccaaaggctctgcagggacagcgcaggggtgcttcgcagagctccagtagctccaaggaacaggccagggacatggggaagaggtggggcttggagagagaggaggctccgtggcagtggctccgaatctggggctcctggggaacgtggaggtgacagaggagagccgtgccttcctggatccccgggcacattgggcatctgcccgccagggctgagcgccggcccctcccccgcaactcagccagcacatagtgtccaggggagtttggggcggctgagtcactgttgggggtggcagggctggcacatgctgcctgtgggttttggtgcccccagtccatggcatccctggcagggacgcccagaaatccacccttgaatgtggaggggaagaagccagtccttgggggcttaggaggaggcttgggtcaggtcctctcctctctcctggcagccgtggctgtccctgggcaacgcccctgttcaggcctggccataccctctccagggtggaggccccagtgcctcctagaagttcggactcagacacgctagagacccagtgaccctgagacctgtgggcgggcgctgtgtgtggtttggagtgtgtgtgacccgaaactgcagggcccctgcccagcctcgggcctaatttaggggtcccaagatgggggatgggtctccagctgtgggagggaagagggcttgaggtgggtcacatggagaaacccctccccccactgcccaggtgagttccccacctacccgcatccgcccccctatagctaccagaggagctgtcctcactctgccatcaccatctcacacctgtcatctcccaccctcaagccccaccccctcaggctccctctgcccacatccctccatccctctcccattcctcggaggctccctcagctgctcaggccctggaagaaaggatctgggaacctcggtgcaaagagaggcagtgagggggccccatggccatgggttgcagggacaaggccttcagttagccctgggggagtttgggtggggaagggacactggccagggtctggggtcccaggatggtaagggggagtaggagacattggaggcaggagcagaatttgggatgcggtgagtagggggtggggggctcaccttctcagcccgcacctcgatgtggttgttggaggtggtgacaatgatgtcttcaggtgagaagtctctcacgtccaccgcaaactcataggcgtctcctagggtcttgatgttgcctgccccaccggggcgggctgtgggatgggctgctgtgagcgaggcatggagcaggccttgcatgcagatccgggggttctggctccttctcttggggcaaggggcggctcccccaggccctacctcccccctagctgtttctccctaagctcctcctcattcctacagcccaccttttctggggtgggggtggggcctcacccagcacagtgtgtgtgtatatgaggctaggtctgtaacaaccccaccccaggcctggagcctgggggctgccccccaccgctcacccatccagccctccagggctccagctgggattggctgtggttacagagcatgggtggccatggaaccatgtccaacccccagggccacaactgttccttagaggcccacctgttttcatggccacatctgtccctgtggccacatctgtcttggtggccacacatggctgcaggctgtgcagcacctgttccaggccgaccggcagccacagcgccttcggtggcgccctggagcagacgtcccctccctgtgcacctcccctcccctcagggcccggatcacttgcctgggaaggccaggggctccgagtggggccgcatgaagctgccaaagtcatcggaaaacatgctcagggccttctccatgggcgggtcctgggccgggagagcacgggaggccgaggaggaggtggaagaggaggaggaagaggaagaggaatggaaacttctctccgctcggaaggtggaagaggttctgtggctcatccacggacggcgccgggccctgcccaggcgggcgagggctggacaggagagggtgtgggcgcaggcctctgggcgagcgtgccaggctccgactgcggccgctttataaggccgactgtccctgggcttggggccagccccttgtctactagctaaatttaggcctctccatggcccagagggggctggaaatcttctcccgtgcgccggccctgctgacagcccgacacgcaggccgagagggctgagctcacagcctgacattccaggctgatcacagcagccccaggggcctcctcaccactgcacagggctggatcctgtctccttgccactcggacctcggtgcctgccccagaaccttgcaagtttggggtttattgtgtgttttgtttcccccgtcagcctgggggctcctgaggactgtgcctcccctccagactctggttctcctccacggctgtacctcctccatcagtgtgcaggctccttggggacagggtaggtggaagcaccaccgctctgtgacgtcaggagctccttccctcaaggcagacaaccttcacagcccatctctaaggaaaggttgagccctgccagggggtgtaaaatgtgcagctgtcccctgccagcccccatggggacctggattctgtgcctgcactccctctgactctcagaacattcagcagccccaagaggacaaagttggcagctttctccttaaaggtctagaaggttgtgttcccggcaactgtctgctccatctctgtgtcagaggtgatgcctgcgagcgccttaggtgggatttcagtcagaggtaaaagagaattccggaagacaattattctagccctgagttctagaatgccttctgggcatgggctcctggctgcaagctgtccagcacggccccgtttgatccccacacagctgggagggtggaggggctcttcccatgttacggacggggaagcgaagcctcttggaaagggcggggctcgcagttgcgtaagtggcagagctgggattcgaacctagatgtgttggacccaaagcccttcagaggccgaggtggtttgaacatgtgcctatggagacaggctggcccggaagagccagagaagcccctccctacccacctgcttgctcagcaaagctgggactgaccttgccctgggccagggtggaggccattctgagaggcggccaggccctctgctctgcccaggttgcagttaagggcctctgctgtcctctccaaatccgtcccttccgtcccagatcagctccaatgcctcctcccccagggaggcctctctgactgctcctgctcacatgggcccacacccagtccagatgcccccagcactgactgtctttgtcctcccacagcacctggcagtgtgacatagtcttcctgtgtgctgtgactctctgctgtgtcccttcttccctatccaactggcagttcccacgggggcgagggttcacctgtctccccattagattgaaggttcttgaagacgggcagtttctcttttgtctgagccccctacaacccagtctggagcttcatcctggagagctccttctacaggggtattagcggtgctggtggtatgtggagtggaagcagagcagggcacagggcacagcggcgggccaggctgttgcctggagcaacagggcctgttgcctctggcagagtttcctgcccgtgtcggggcctgtgacacccagcctggctgaggggtttctagggcagctgggaagccaccagcactgaggtgagatggagagagggtggggcggggtggggggcccagagcctgccgctcgccagggaaacaggagccggtggctaaatgcagacacactgtcatggtgctgagggcctgagtcactgcc

SEQ ID NO: 4407 - DNA, 6000 bp, Homo sapiens
gtgcctcggtgccctcatctgtaaagagggaataacaggaacaaccctggagggagagagcacaggagagccacctccaggaagcaggggctgggagggggggtgcggagccccactttctgagcctctctgccctcctccccacaacagcccctgaggcttgcaaagccactgatcccactgtcattgctaagagaaggcagggggtcttctaagggcacacagcagatccttggtagtgctgggacccctggtccaggcccacatggtgccctctccaggcctggcctagctggcttctttctgtggactttattccctggggaaacagccacgcctttatctcccctcccagatggggtccccaaagcagagctggggctttgcttcctccctggccctccacggcctccagaaaacagcccacacctgtcagcactcaaggcccctggagacctgtgcctggctcttctttgccccatgatccctcctccctggaatagccttcctgaccctaggctgttcaattcccacttgtcctccagggacccattagaacatcacctccaccaggaagccctccctggtcctgtgtctgggctcacggcctccctgggctctatcagaattctcatccccttgcattatacattataatgggctattgattcatcatttcttgaggtcagggatggtgggtcctcagggagagatttttaagtgagggaaggaaacaagtaaaggcctcagactctgatagctgctggggtcagtccttccgactctccctagcccccggcatgtgctgacacagcccttcctcctagcactcccacttcatctggaaccgcacggaactcctgacccttgacccccacaatgtggactacctattgggtaagtggagggggtggaggggaggatgcatggctcggagcctggtggccggagctgcgtgtggccagcacctggggacaaggccctagcctgacgcccacttaggggcctctgctcttgggcttcaggacctgggagaggcaaggaagggggttctggttcctggaattaggcctgaaatctgctggctgtgcagggggattagcctcattgggcacaagaagaaactgaagctcagagaggggagtggcccgcggcatgtggcacaagtgacagcggtacggcccaggcaagtttgagccctggctgggaactgggacttaacagctcctgggctatggagcctgggacctggagtcagctctactgtgtgcatggccagggcagaagccagccaagttatctctgcccatcctgacgattgccctcctccccaggcagtggggagcatgtggtgagggcccaggggcagcttcaggtctggtgggatgcagccctgagcaccaccatgcagctatccgggttttcttttccagctgtctgtagtgccaagcaagtggtggcaaaatctcctgcagacatttcccaaggaacacagctccgcgtcctgggtgtcattagaggttatgggctcagagctgtgcacctggtgggtcctccagacacatgcacacagcctcttgcttgcctgggtcacatggcacacacccagtaccacatgggctgtgcatgcacccgtgtatcatgctggttttgctcatggatcttagagccagagtgctgggttcaaatccagctctaccacctctaagctgtgtgaccttgggcaagtgatttctcctctttctgcctcagtttcctcttctataaagtagggataatgatgctcccataaaatggagatagtgatggggctggagacaacccctgggttgtcatgagcatgacatgaacttgtgttgtataagttatctgttgctgtataacaaattatctcaaaacttaggccaggtgcaggccgggtgcagtggctcatgcctgtaatcccagcactttgggaggccgaggtgggcggagcacaaggtcaggagattgagaccatcctggctaacgaggtgaaaccccatctctactaaaaatacaaaaaattagcctggcgtggtggcgggcgcctgtagtcccagctactcaggaggctgaggcaggagaatggtatgaacccgggaggcggaggttacagtgagccaagatcgcaccactgcactccagcctgggtgacagagcaagactccgtctaaaaacaaaaaacaaagaacaaacacgaaaaaacttaggccaggtgcaatggctcgcgcctgtaatcctagcactttgggaggccaaggcaggttgatcacttgagcccaggagtttgagaccagcctgggaaacatagcgagacctcaattctacaaaaattttttaaaaactggccaggtgtggtggcgcacacctttagtcccagctactcaggaggctgaggtaggaggatccacctgagcccaggaggttgaggctgcagtgagttgtgattatgccactgcactccagcctgggtgacagagcaagaccctatcttaaaaaaaagaaagaaagaaaacattagccaggtgtggtggtgccagccactcaggaagctgacgtgggaggcttgcttgagcccaagagtttgaggctgcagtgagctatgatcatgccactgcaccagtttgggcaacagagtgagaccctgtcacaaaacaaaacttaacagtttaaaacaagagtaaacatttattgcctcactcaatttctttgggtcaggaatctggggacagcttagctgggtctcccatgaggtcacagtcatctgaaggcttgactggggctggtgcttccaggatggttcactcacatggctggcgagttggtcttggctgttggcaggaggcctcagttccttggcacattgctctctatagagcagcttgagtgtcctcattacatggtggctggcttcccacagagatccaagagtatataaacagaagctacaacattttatgccccagccttcgaaatcacacaccatcatttcggtggcattctatggcatacaaaggctagtgtgggaggagaccacacaagcgcgtgaattccagggggcaggggttattgggcaccatcttggaggctggcttttgcctgcttccaaagcgctaacagcatgtggcaccaagtgaaccctgtgtgcatgggagctattgttcggctgtgtacccactcacagaggggcagggtgttctggaaggacaccagaattggaaggacaccagaatcagaagcaccagcatgggacacatggaactttgtgccatgggcaaggaatggatcattctccttatgtcacaagtgagaaaacggagcccagtgagcaggagggacaatgattccaaaccttctgctgtttcgctgcacaggccaccgtgcccttcaaatccaacatgtaaatgcacacacactctagcggccccatcgagtccaggctgtgaccctctgccttggggccacagtgctgtgtgctgagccctgcaggctggaggcagactgactgatggatttgaaccccagatctgccacttctcagctgacaatagcaagttatggaacacctctgggcctcagtgctcctcatctgtgaaacgggcatggtgatcccaccgcgccatagtggtgggaatgaaaatgaaaggaattggggctgggtgcggaggctcacgcctgtaatcccaacactttgggaggccgaggtgggcggatgacctgaggtcaggagttcgagaccagcctggctaacatggtgaaaccctgtctctacttaaaatacaacaaaaattagctgggtgtggtgatgcatgtctgtaatcccagctattcaggaggctaaggcaggagaatcacttgaacccgggaggcagaggttgcagggagccgagatcgcaccactgcactccagcctggacaacagagtgagactctgtctcaaaaaaaaaaaagaaaagaaaagaaaaagaaaaaagaaaaaaaaaggaattgggggcctaattctgggcccacaaaaatcacccagataaggatcctcccagccaccatactctaccccaagctggctgtggggagcctgcattccctgagacaccccagcttccttggagtcctcctagccgggtcacagcctctcagcatccacatcctcctggcgtcctcctcaggtctcttcgagccaggggacatgcagtacgagctgaacaggaacaacgtgacggacccgtcactctccgagatggtggtggtggccatccagatcctgcggaagaaccccaaaggcttcttcttgctggtggaaggtagggaccccgggtctgctgagagggggctgctggaaacacggccctggtgtcaggatggagaagtccagctcttaaagggaactgactggtttgggggtgaagggagaggtccctttaggagaataggttgtggaaggagacgggtggcactgtagacactcccagcccagcaagctgctctcctttgggcatggagatgcaagttaggttcagcaatccaggaaggcttcctgggagaggaggcagatttctcccctttggtagtctttcttggggacctggccctgaaggggcaagcagcccctcagcctcactgcccagaaaagcaaatccgcaggccccggctttcccacgctgtgtgctgatgttcccaggctctttcagcgccggccaggggccttgcagacagacctgaattcttggcctggcgctgccatctgctggcggtgtgacctctacctgtgcacttctgttatgtgaagccaaaaatagcatctgtctcctggagagtgattcgcctccattgtgttcagagacataaagtacttggaacggggcccagtaaagaataaaccgtgtttctattattagccttgttatggctacacaatagttaaggcgggaacaataggaagtgtgaggaagtgataaagattccagaaaccttccagtgctaacagcccttgcccaccgcagttcctcatgttgccctgctaacatcggtatgtatacacacacatgcacacacgtgaacatgtttgcacatatgctccccacgcatacacacatgctcagcgcctccgccttccagaggtgagcgtccgccagcccagcttggctgctttcttgccaaaccccggggttcccactcgagcacagcggtcttggcctggccccgaacaggcctctgacgccaaggagccagccagaaaccagcggtggtgagcacgggctcccccgggagcggtttcctttgtgagcaaggccaggatgggccgcccaggctagctgctcccagagccacaacaaagggaggacacgccctgccagcctgccgggccaccgcgaggctcagactggtgggaacagagggctgcctggcgcccaggaccctccaagctgggagtgtccaccaggcagcgccctcctgttagcaagggaagtgttcctttaaggtcacagagccctcggctgctgggccaagcctccagccaggcccctgcactcacccggaggtgggaagcgggggcggaggctgcgagggttcaggcttcggcagggctttgtggaacctgccacaggcactgcccaggcactggggactttcactacctctgggagctccgtgctttctttttagaggggatgatttgaggtagagatgaaaaacggggttaggacgagtcacacctgaattcacatcctggcaaatcccaccgtgggcttccccacactaggcctcagttgctccatctgtaaacaggactgatcatattcctctctgcccagcattgctgttcaggggaaaagagacatgggtgtgtcgtgcctggcacattgtagggattccagcgtgcccccttccctacctcccaaaggcttcagtgcctccttcaagcagctagagacagtgctgggaggggcggtgggaggagtacagcttcccggcctggtg

SEQ ID NO: 4408 - DNA, 6000 bp, Homo sapiens
tcacccctgtcttccattttgtcttccacactgtagctagagtaacctttaaaagtgttcatctgaacctacccacccacctccccctacactttcccactcctaccctaattcatccggtgtcacttcttgtctttctccatcactttctctactccagacctactgatttctattctcaaaagcaccatgttccctccaacccaggcactttgcctgtgctgccccctcagcctgggcattctcactctccttctgctaggtaactgcactcatcctcagggggagcctcccctggcccacccagtgaagcctgggtccaggtccactgttgcctgctcttagggcaatgtttcactctccttcctctctctgatcttagctcatactcctttggaagttatttgtttaaactcatcttccccatgagactgtaggcttcatgataggagaaatgtgtctgtttttcctcaccactgtatccctaaagcttagtgtattgccttgggttgggtatatacatcaggcaccttgtacctgcttgttgaatgactgaatgaacttatataatcctcccaatgagcctgtgatgatcttgcctgaggccagtgctctttccttgctctcactacgtatagaacctgctctcacagcattacaagacggagacagtagactctgacaggcatagagggctctggatcctgattgtctgggctcaaatctctcttctgccacttcctagctgtgtgactttgggtaagttccttaacatctctgtgcttaatggtacccctcacatggggtgttgtaaggatcaaataagttagtcttttttttttttttttttttttagacacagcctcactgtatcaccaaggctagagagcagtggcgtgatcttggctccctgtagcctctacctcccaggttcaagtgattctcgtgccttagcctcctgagtagctgggattacaggcacatgccaccacgccgagctaatttctgtatttttagtagagacagggtttcaccatgtgggccaggctggtctcgaacttctgacctcaggtgatccgtccaccttggcctcccaaagtgctgagattacaggcatgagccactgtgcctggccagtttagtctttaacttgtttttaaaagggctcaatcgcataataagttctccatccatcttagtagttgctaatagcattaacagaaaacacatagattctgtgattagatgggcctgatttcttctcatattcgccctgtgtggctttggacaagtcatgtcacatcctgagtctcagtttccccatctgctaaactggggtcttgaaacctacctcagagagggctgttgcgagggtgagataggatgtgagtgaagcactagcactggtgcctgggggttcccttcctgatgggccggattggtctgtgtttgttgccttttagacaagaagttccatgaaggtgggcttcatgtctgtgtcagggctgtatcccctgcctctctgtacctggcacatagtagatgttcaataagtagtttttcactggatgaatgaatcaatagtaacaagggaccatgctttgctcacctttgtgtccaaaactagtgcaataccttgcatctaatttgaataaatatttgttgacagaataaatagattttttagaaatagctgtttgtttctgttcccagttccatttgaatttctgaattaaactgagaaagatactgtgaaggttaattttgtgtgtcaatttgactgggctacgggatgcttacatagctggtaaaacattacttctgggtgtgtctgtaagggaatttctggaagagattagtaattgaatcagtaaattgagtaaagaagatctgcccttaccagtatgggtgggcagcatccaatccactgatggctgaaacagaactaaaaggaagaggaatggcaaatccatgctctgtgcttgagctggaacatccatcttctcctgcccttggacatcagctctcctggttctcgggtcttcagactcagactgggatttacactatcggctcttgtggttctcaggcctcctggcttggactggaactacaccaccagctttttagacctccagattgcagatggcagattgtggaacttctcagccttccataatcacagaagtcaatccctcataataaatctctttttatatatctatatatagcctattggttctgttctggagaactctgattaatatagatacttataactcatcccaagtctctctaagccttggtattcttatctgtaaaatggggctattaataattatctaccacaaagattattctgaaaagtaaataagacaatatgtatttggcacatagaaaatgttagttcactgttcttccattccccgagcttcagtttctacatctgtgaaatgggcatctactcactcatttcttcattcatttactgagcaaacacagtgcccatgtggaaggcattgtggttaagacccggggcagttagagaagttagagagttagagaagtgaggaagccgtggtgaagaactgagcatctgctttgtgacaacacaccaatagtctttaaaagtcagtgggagaagagccacgggatgtatgaggtctctgggggctagaggtgtggggcaaggggacacccagggtttcagagagctttttagagagactggtatctccctagcaagtgatggtatcaacaacttggtgtgatcaccaacatcacatcactttgcaatggagttacctgctggggcctctggttttcatagcctgagtgtgaaaggcacgtcagtcctgctgcagccccactttccaccctggctcacagagcacaccagagtttggtcagagtgtcacatcacagtgagcatctagttcaaacagacatttccttctgagattcagctctgctcttctccctttctggatcctaccttcacaggggactgaacagtgattcccctacactctcaatgaggaacaacacagatgatgactctaatgaatgctgggtccctgcctggttctccaaagacaaggttgccctttcctgcagtgggacccagtgaggcgatgcttgggtgttggagacatgggtgaggccaggccaggtctctgggctcctgcacccaaatgggtcacatgcttatctctgatttgcacagctggctccacatcaacctgccaacgaaactcacaagagattgaaatatctgaattagaattttatatttaagctgcatatatttgtgggattgggaaggattagtcatctccagtgaccaaaatgtttgcacctgttacccactttcattttcagttgagagaaagttgcatgccagggatatttaaacatcgagggtgggtctgctgtcagtggtctggccagaggtagaaggatgactgagtcccagccgcccatccccagcaggcctcagggaagaagcaagatttacgaggcgagagcctgcctggcccgcttcttctgtcgggaaaggcttccctgcagtattttctgtctcgtcaacactgcatttcattttaaattgcagctgaaagtagatattttccctcttgcctattacaaacctcttaatttgtctctccctctgctgttatttgtctctataaagtgttttgcatgaaagacccacacagcacaatgttgcttcaccctgggttaggtttaacaggaagggaagatgcagagactaagtccaaggaggaagatgtgagggccttggggttgaggacacgcgtgtctgggagttgatgcctggctgtttttggaggttatctgttgcctgagtgtctgtgggtatgcgggtgcacatgtccatgtttgtactaatttacatatatgtctatgcatactgtggtataatcacttgggtgtccatacccaaattaagtgtatgtttgagtgcatgtacacacccacatgccagtctctgtgtgcatatagatctatgcccagacgcacacatgtgcatataaacacacgtaggcatcaaggtagacgtccgtcacattatgtgtgtggtcttctgtagacacgcccggggctctcttcctttcgctgcttctcaaggctgcggtcagcctccctccgtgctccacccaggagccctggccccgtttagggttgtgggaaaaggaaggcacgccagtggtctgcgagggggccagtggaaacatcacctccgccgacccggccgcggtcacagctctctggcttggctccagccaccagcagcacccctgcagcccggcgttagcgctgagaagcccggggcagccgccagggcgcgggctgccagctccctgacaaccccgggctggcactcgggggcgagagaggtcacccagcgacgggcacacccctccagagcaacaccgtctccggcccgcttccgggggccaccaacccgagcctcgcgggcgggctggggggtggtctctgtcgcttggggtccagcgaaggctgggcagtaaccaatggacgactgtggcccaacggggatccctcggatgcagccaatgccctcgttgcgctctccgcccccgccctcgcctgccccgcgccgctggaccattggcgcccgctggatggggggtgcgcgcgacgcctgcccttcggggagggcggggcttggagcgggctgcgctcccgcccgcgctcggcctctgccccgcccccggacgcgcggccctcagccggctgcggcgcggcggcggcgggagggggcgcggggcgcgcgcgtgggcgtggccggcgggcgtggccggcgggcggcaggaggcggggcggcgggcgctgtcgcagtgaaagcccgagcggcggcggcggcggggacggcggtggaggcggccgggtggctgtgcgcgcgtgtggggcgcaggctcggcggcagcggccggtctggagcggccgctgcgaggaagacagctgcagcgggggaggcgcggccagggctgcgcgctccgcggagccggcggggccgggaacaggtgatcccagtgggagccccgcgccctgccgagttcgaggggcgggagcccgcgctcccgggcgcatctgcagccgcccagccgcggctccggacccaggcatccctgcgctgtctggggcccgggggaagccccctgcccccgcaggctcggaagtgcctgctcctgctccctggccactccggctcccagctcccggcgccctctccgcggcggagaaagttgtggacgtgtcccgatagtcgagcccgggcgctgtcgcgaccgggccgggtgtgcgcgcgctcggggcggcgctgacacgccagccccccatcgcctcggtcccctccggaaactgcttctgaagctgaaactttgggcgcctaccagcgcgggcgggagcctagggggcggagggcggcttggtgcgggcctgcgggcgcccctcggcgcggacagccgggacgccgcggacggcatgtgacggtcccggcggccgcagcgcgggaaggcgcgggccccggcgcggcggggagggctcggccggaggggaggctgcggcgcgcggccggtcgctgcgggcccgggccccaagccgtgccgctccgctcgcccgggccccgccgaggccgctgcgcccccgcctcctcgcgggaggactcgctccaaactccctgaacttcggggacagtcccccgaagcggcgaaactctcagggttggcaaccctgcccagggacccccatcccgggcggcgctccggacgccctcccctcaccgcgcccccgcagacacgtgcctggactccgagggcttctggagccaccggccgggccacgatgctcatgaggaaagtgcccggcttcgtcccggcctccccgtgggggctgcggctgccgcagaagttcctcttcctcctcttcctctcgggcctggtcaccctgtgc

SEQ ID NO: 4409 - DNA, 6000 bp, Homo sapiens
cagggggatggcctagatggcctcctacacattcccctactcagggagcagaaatttagggcaggaccacaaggcattaaggttctcagagccattctctctggaatggggaactcttccagctcactccagaaaaagcaaaggccagttgttgggggcactatctcatatcaagagtgaaaagccagcatctggcagagtcagaatgacaggacctaggtgataaaatcacctggttaccagagcagaataacccaaccacacacatagacaccactacacaccaccacaaccacatatgcacacagcctcccacaccaccccagccatctccatcatcacacacattcacaaccacacatgcacacagcctcccacaccaccccagccacctccaccatcacacacattcacaaccacacatgcacacagcctcccacaccaccccagccatctccgccatcacacacgttcacaaccacacatgcacacagcctcccacaccaccccagccacctccgccatcacacacgttcacaaccacacatgcacacagcctcccacaccaccccagccatctctgccatcacacacgttcacaaccacacatgcacacagcctcccacaccaccccagccatctccaccatcacacacactcacaacaacgcacatcaaagcctacacacacgtggcccacataccacccttaacacacagctctccaggcttacacacacagaaacagttctcgcacataaccttatgtgcacccagtgtttacaaatagtgactgagagtctgtacattccaggccctggtaatgtggcaggaacgtgaccagggagctccctgctctcctggagataatttcagagacggctgtgaagagtgtctgctgaggaagtggagcaaggaacatttggggtgggggtgggggaaccagggaacacctctgtaagaaggtgagacctgaataaggaggaggaagcttccaagtaaagagtcaggagaaggcagtccaggcagagagaacagcaaaggcaaaaaccagaaggctgacctgaatgtggcttgttcaagaaccagaaagaaggccactacagcgcccaaggggatgagagatgggggagaggcaggactaggtcgcctggtgccttggggctcaacgtcaagagagtggatgccagtctaaagttaatgataagtcactgtaaggttttaagagggaagtggcatgatctattaggttggtgcaaaagtaactgcggtttttaccattactttcaatggcaaaaaccacaattacttttgcaccagtctaatagatcgttaaaacactacttcagctagaagcaaccacgggaaaaaatgttattgcagtcctcagagtggtgaaggcatttctaatgacaacaaaacccaagggccataaaagataatattaatacactggactacataaaacatgtttaattctgtatggcaaaacccccgtctataaagtcaaatcacaggtgtcaagaagcagcagaggcagagggaatcctttctatttgtatcacagacagaggagggcttatttctttagtatgtaaagagctcctgagaaataaataataaaagtcaaccatccaatagaaaaatggcaaaggcaaagaactgttcacaggataacaaacaaaagcggcccttaaatatgtgaaaagatgctcaatctcactcataccaagagaaatgcaaaataaagtatgatgagatatcattgacaaagatcataaagcttgataacgctctctattggtacgtatatggggatacaggcactcccttgtcccttggagtgcaaactgaaacatctgtgaagacgattgggcaatatgtatcaaaattttaaatacacatacaactttaaagcaaacatttcacatgtaggaatatgtcctgtagacacaattttcaaatgtgttcaataatgattatccaaggatagtcacgcaatggtatttgtaatagaatgaaataaaaaagtggaaacagccttttcatcagaataggactgattaaatagagtacatatactattcagctgtttttaaaatgagagagcaaggcagctccatatccactgatggggggaatgtctcatattttgttaaatgaagaaagcaaagtgcaaaagagtgcagatagcatagcacacttccataggttaaatgtaaaaagaatatatagttgaatatgaacaggtgatttgggagtaagaacaagaaactagggaccctggtgttcaggtaggcagctccggttacagtctggtgttcagggagaagtcacgtccggtgttggaaatgtgtgaatcatcagtgagtggatggtatctagagccccaggactgggtgagctcacctgggaaggaagagactgggccctgggacatgcccaccttagaggccaggatgtgaggcctgtggtgtcaaggaagcacggggaagaaagtgtttctagaaggaaggagtgccccattgtcccaggtgcttctgaaggtcaagggtcatggggacagagctgtgattgctggatttagcattatggagatccacggagactctgataagccgtttttagtgacatggtagggacaggaacattgttcaaatgtgtcaaaaaatgactaggaggggaggtagcggggagcaagtcttgctctgacagggagcagagcagcaggcggcagagtccagggccccacaccctcatgctcacttccccgctgcccatgcacagagcatagcacatgcacctgagccacctggcactcctcaatctcagcaaagattttcaagggccacgaccccagtgagtacaagggagcctctgccctgcggcttttctgtatctggaaacaacactgctgaggcctccagagctgggtctgctgcttattatctgtgtgaccctgagcaagtcacctcacccctgtgtgcctcagctttctcattcataaaagtaggagggattggaccttcctcatctggatgctgccatgatgaaataaagcatgtgggacagtgtcgggtgcaaagatgccgctgggctcccaactcagtgctcattctctaccaaaatgaataggaggagggtgaccataattgatgctcctaactttggggcatttttgaaagtaaaagggggcattgttaatgatgccagcactgcaaacataaaccagtacagtcctgggcaaacaccatgtggagccaccatagtgccagcaatatcatctctgtggagacaggactcgggccccaccctaagatccagggactcccaagggaggctggaaaccctggggttttccaaaagaggctggggcactgcaggcttttattagttcctagtcaggacacactagtaaataagacaatgtgtccttatccccagggcacagcccagccccaccccagccgcagacccacctgctttggcagaggctatttactgcaatggtatttgtaatagaatgaaataaaaaactagaaacagccttaatttttatcagagtaggactgataaaatatattacagtacatatactattcagctgtttttaaaatgagagagcaaggcagctctatatcgactgatgggagaaatgtcgtattttgctaagtgaaaaaaagcaacgtgcagaagagtgtagatagcatacttccacaggttaagactatatagttgaatatgaacagacgattcaggaaggaaaacaagaaactagggaccctggtgttcaggtaggcagctccggttgcagtctgcccctctgagtcactccaggcggtgacctcccccaacccgccctcattcctgaacttctttcctggcacaggactcactgtgccccttcccgctgtgggtacaaggtctgccccccaccccagctctccaaagcccaccggcctccctggaggccgaggtcgacggcccgtcgcaccgggagggggggctcccaggggtgccccacgcacggtcaaggtcccgcgccaagcggggaccgggctgggccggaagcgggcacggtactcgcggcaaactagcgtgggcgagtcctgattgcagtcggacctgccgccgcggcacttaacagtttgcagagtgcttcccgcccctgatctcattggagccttcggacagcccagcccatggccaccgatgcccccatttcacgcctgaggaagcggaggctcagacgggccaccagcccctccggaggctggcccgggagcgcctggcagcgtcgggtctaggagccggctccctcctgctccctcctccgcgccgcccggggtgtgcccgccgtctgtgtgcaccactgctgagcccagctccggcgccctcgcctctgctgtgggccccggggacgcggggtcaggccaccgcgttggccaggccgctgcaggtaagtgctggacggggcggggcgaggctgggcgggaccctcaggggcgccaagcgctcctggcgaccccctgcggcagggctggggcttgagcctgccagtgcgctgggatggggcgcgaagcgggggtgcggggagcccgccaccccgtacctctcaatcctccctctcgcctctcaattctgggcccattaggggtcccggctgcgggaaggttccgagacaccccctccccaagtccgcaagctcccaagctgcctaggatggagggaaactgggaaggaaagggagctttatccttcagggacattgtggggcgggaggtagggctgggcacagtacagtctgggggtcagggaaaaaacggttgcgctgggagctggctttggagggcagctgggggaaccagaaccggctccaccagtccccagcctagacttgggaaggaaattctttgccagtgaagctcctccctggggtgtgtcaggagggactgggcagacagcacccaagggtagaagatgggggcccaggagggagctgcaccctggtgggcagccatgggagtgtgtcaggtggaagcagccgtcagggtccctctctgctctctgtccggacagacagggctccaaccttcacttcagttcttgtgaactcccaccaggtgagtagcagcctgggagggaagagtctcaggattctaccagaaagtaggaattatttccctttagagattagtaaatagggtcaatgagattagggaattcttggaagtcgcccagctactaagtggccaagctgaggtttgaatccaggtggaactccgtgttccatgctatcccactcccttcccccaccacgagggcttagaaggagcagagtaggggagaagaggagggtttccaagaatgaggtcttcccaatcaccccatcctgcccagactgtgattcccagaggaaacgcagccaggagagccaggtgctgagaaggaactgtgctctctccctctctccagtgtagggaagtctttcccccaatccccctgaccaggctgccccctgaccaggatcctgcccaccctcctgtcccctccctccaagctgccttgctgaaaactcagcattcatttgtttacccattcagcgctgagtgcctactatgtgccaagcactgggcactaaatataaagcagtgagcaagaccaagttgacattctagagggggagccagataattaataagaccaaaaaaaaaggacaaattctttaatttcagatagtgactaagtgctataaagaaaacagagggggctggaaaaattaggtgggcatagtggtgtgcacctgtggtcccagctacgtgggaggctgaggtaggaggctcccttgagcctgggaagcagaggttgcagtgagccaaggtcgcaccactgcactccagcctgggcgacacagcaaggccttggctcaaaaaaaaaaaagaaaggggacaggaacagagtgacagaagcaggggctctttcagacccagggtaatctgga

SEQ ID NO: 4410 - DNA, 6000 bp, Homo sapiens
tgggagagcagtggggcctggtcccgagcgtggccacagggcccagctgtccctgtgcttctgtcaagggcggcacattctgtccttcacgcaacagcaccatcccctcagctcatcccccatcatgcctgaaggaactatgtggtgcaggttcccacccccagcctggaagtgtggagccagacctgtctccttttacgtcagattccatctccctgcctccctttttcccctctcgtggcctgcatttctctctccttcttggagtctctgtttttgtcttgctctttctcttctctctcctccttccttccctcctccccctgccattcctctgacccctttccttcatctccatttggtttcatcctccgtccttcccttctttcttgctctgcctctagcgcaggacagggtccatgtgatgtgagaacctccacgccaaggcttggttgggacagcccaggtctccccgcaggcaaggagactggaagggacgtgggcccagccacaccctataaagtggccatgcactaaggacctgtccagagtctcctctcatattctgttccatgcttcttgcaaggactttccaacagagtgtcccaggacaggaggaacttaggccacccagcatggaggccagtggacagaggccagaccggcactgtgggggtgcttgggctggaggaccccaggtacttccggcttggagacatcctggaccatctccctgtgatgtttcatggggcctcagaatggagacctcacagtccctccacctgtccatctagaatatctacatgcaccaaaggcccgcaacactgccagccccgaaacattccttcctaccttaatcctcagacaccccgaggaaggaacgggtataggtgatttcccgtgcctgtgggctacagcccaggctctgagcttggcactcacagccttcatagtcttgctgactggcttgcccttgggcccaccctggccatgtgccctgttcacccccaactcttactgttgtgggacacttctcatgcctggggtgattgtgtaatgtatgatcacatctgggatgctttggcgggtggaaggagacactgaatagtcaattccatggcaacaagcacaggccaggactgtccgaggcaaaccagggcatatgggcaccccattcacccctcagtgtcttcctttcccttggcctgagctgttgaacccacccttcttgtctggcagcctctccctcccagcaagcccaaaattgtcagagcatctgtagctgctttgtgttcttagggccttctgtcagcgggtcctctccctgcaggctgcctgccctccctgtctccctaccctcctcagccctggcacacccagttggtgctcagtgaggcagggattcaaatctttgaaccgggagttgttctggggtgctacccccatgggtactttgaggcccaaaagccctccctctgtcctccctgggcaaggtcccttccaggccaggccctctccaggtcagagtccttcaccatcctgtctccctttctctccctctcccgcggtcagtggcggccagaggagtccgaggactatgtaagtaacaggtgtgcgaacgcggacaagacatgggtcaagctgggctcgtgggacgctcctcctctccctcctttcctgctagcctgcactgccaagatccacagggctctagccacatcaggagaaaattggcgtttagacacaagcactgagctgagcagcgattggcatttcctctaatccttacttcttgcctgtcgagcagcaatttgaggccagtgttcatgatcgaccagggcctggcccctgccccggccagacagggatggagttaaatccaatcctgatcgttaggccttattgatccctggagtgaaaaatcacctgctttagggcccaggctgggagggctgtctggagagtcggattctggcattggtgcattctggagccccagccctgggagaccctccagctgtggcaggaggggtccatgagggggtggtggcagctgcaggggccccactcaaggccagagctggagggataccagggttgatgacggctctgttcccactgcacggtggtccctgccctgcttcccactcttctctctgtgtggtgtggcttgacctcccatggtgtttctccgcatgtccagagatgatgcctttgctgcagatgggtatatgggcagggtctgccaagcggggaggacattgccctggctgctgtctcaggcatcactgagaacagatgtggaagccagttccccaggtgtggaggttttcttattctcctagcccctcccctgcctttctcaagaggtattgcagggtatagacattcacagagttagtggcctatatgggggcagcggagtcctgactgggtcctataggatggcaccttagcccatcctgccaccttgctctgtctgtgcatgcatgcactggtgtccacaggcagccttacgcctgcttatgcaggagctgtaggctgtgtgcgtgtggctgccaagagccacgcaaggtgctgggtgcgtgcgaggctgtgccctgttgatatcctcagtctccgttcacagcacagtggagtgagggaaacagtctggccctttgttcttgtctgaaaagaataatgagctgtctgccccaggcgtgcggctcctgggatgggcggggtcctcccaggcctgcatcctacctgcctgcttcctctccagcagaggccaccattgtatagccccaccttccacaacccctggccttgtgtgccccggggctcccctcaggctagggtcctgaggtccctgacaaggtctggcctctccctgcattcttgtgatgggaacgaacccctcctcctccctcaggaaaccactatcagcggcctgaccccggagaccacctactccgttactgttgctgcctataccaccaagggggatggtgcccgcagcaagcccaaaattgtcactacaacaggtgcaggtgagtgaggggtcaggacggacctgagggtggggcagcaggagggcagcgccagagcccagcccgtggtccttcagtcccaggccggcccaccatgatgatcagcaccacggccatgaacactgcgctgctccagtggcacccacccaaggaactgcctggcgagctgctgggctaccggctgcagtactgccgggccgacgaggcgcggcccaacaccatagatttcggcaaggatgaccagcacttcacagtcaccggcctgcacaaggggaccacctacatcttccggcttgctgccaagaaccgggctggcttgggtgaggagttcgagaaggagatcaggacccccgaggacctgcccagcggcttcccccaaaacctgcatgtgacaggactgaccacgtctaccacagaactggcctgggacccgccagtgctggcggagaggaacgggcgcatcatcagctacaccgtggtgttccgagacatcaacagccaacaggagctgcagaacatcacgacagacacccgctttacccttactggcctcaagccagacaccacttacgacatcaaggtccgcgcatggaccagcaaaggctctggcccactcagccccagcatccagtcccggaccatgccggtggagcaaggtgtgtgctgtggacatggcatcccttcccgagtgtggctgcatctgggggtctctgctctccttgagccactgacctctggcgactgtgatccaccagcctctggtgtgtgacctccaatctctcatgactgtgaccactaacctctagtgaatgggcaccacattcttgatgcctgacctctgctgtccttaacctactgacctctgctgtatgaccttctgatctcttgtgaccttgacccactgatctcttttgactgtgtcactattcttgggtgtgcaacctcctgatctttggtgtgtgacactaatctcttggggccatgacccaccgacctctagtgaacatgctccaccacgctctggtgtgtggccacatgcttctcatgaccgaaacccactgaccctctgatcactctggcctggtgtccatcggctcaagcttttacactcgcgtttctggagattctgaccctggttgctgtggcatcccccgccctgtttggtgctcactgtggaagagcttgggctgggagttcaactgtgccgtttgaagctggctgggagtggggcgcttggtactctgcagccatccttcaaccccctgttccccaaccagtgtctcatcctggccattcaccttccacccttccagcccattcaccccacctcatatacccagcagagctgactctctctatgcctttgcagtgtttgccaagaacttccgggtggcggctgcaatgaagacgtctgtgctgctcagctgggaggttcccgactcctataagtcagctgtgccctttaaggtgagtaagggccacggccagctgagcctggcacacacacaggcctgctgggtgctgtctttccagtcctaacccatgtgcatccggctgtggagcaggaatgtggttgtgtatccgtgcactgtgccttgcagcccgtggtagggaacctcacccaaaggcattgattgcccctcccgtcccccacagattctgtacaatgggcagagtgtggaggtggacgggcactcgatgcggaagctgatcgcagacctgcagcccaacacagagtactcgtttgtgctgatgaaccgtggcagcagcgcagggggcctgcagcacctggtgtccatccgcacagcccccgacctcctgcctcacaagccgctgcctgcctctgcctacatagaggacggccgcttcgatctctccatgccccatgtgcaagacccctcgcttgtcaggtgtgcacacgaggtatcgggggaggcggggcagggctggaggtaaccagcagtgacagtcctgattcctgccctgcccacccaggtggttctacattgttgtggtgcccattgaccgtgtgggcgggagcatgctgacgccaaggtggagcacacccgaggaactggagctggacgaggtacctggggaggggatggggacactgacagccccattgcagtggtcagctgtggccttcctgccctgagcactgtcccagtgactctcagattcactccccaaattgaaatctctcttctggctggcagcccgcccctctctggagagagggactctgaggaaaccatctgggagtattcacagaactcccggagggcttacgaagaatccctggggtgggatgtcgtggagatgcctctgcaggtctagagaatgccaagccctgtagacactgcagagcctcgcagatctagaagctatggagggcttagtgagccttatagccaggagtccctgaatgtttgaaatccttcagtcctttctcatagccagtgtggcaacagcctggttagggtggggcagcttacacacagggctgcttctcatgggctggtggggaggagtggcttcacggtgtctgttactctgtaggggcagtgggttgggcaggtgtgggctctgacacggaaggtgagccttgatctcggcccagggagctgacatcccaggccacagcctcagggctggccggcatgctccaaggcccctcatgacccccatgctctgctctgccagcttctagaagccatcgagcaaggcggagaggagcagcggcggcggcggcggcaggcagaacgtctgaagccatatgtggctgctcaactggatgtgctcccggagacctttaccttgggggacaagaagaactaccggggcttctacaaccggcccctgtctccggacttgagctaccagtgctttgtgcttgcctccttgaaggaacccatggaccaggtctgcctgagccggcttggctgtcagcaccctgattccc

SEQ ID NO: 4411 - DNA, 6000 bp, Homo sapiens
aaataccagaggaagcagagtggtttacagtcctggaccttaaggatgtctttttctgcatccctgtacatcctgactctcaattcttgtttgcctttgaagatccttcaaacccaacatctcaactcacctggattgttttaccccaagggttcagggatagcccccatctatttggccaggcactagctcaagacttgagccagttctcatacctggacactcctctccttcagcacatggatgatttacttttagctgccctttcagaaaccttgtgccatcaagccacccaagcattctttaatttcctctccacctgtgctataaggtttccaaacaaaaggatcagctctgctcacagtaggttaaatacttagtgctaaaattatccaaaggcaccagggccctcagtgaggaacatatccagcctatcctggcttttcctcatcccaaaaccgtaaagcaactaagagcgttccttggcataacaggcttctgctgaatatagattccctggtacagcaaaatagccagatcattatatacactaattaaggaaactcagaaaggcaatacccatttagtaagatggacacctgaagcagaagtgactttccaggccctaaagaaggccctaacctaagctccagtgttaagcttgccaacgtggcaagacttttctttatatgtcacagaaaaaacaggaatagctctaggagtccttacacaggtctgacggaccagcttgcaacctgtgacatacctgagtaaggaaattgatgtagtggcaaagggttggcctcatcgtttatgggtagtggcagcagtagcagtattagtatctgaagcagttaaaatgatacagggaagagatcttactgtgtgaacatctcaagatgtgaatggcatactcactgctaaaggagacttgtggatgtcagacaaccatttgcttaaatatcagcatctattacttgaagggccagtgctgcgactgcgcccttgtgcaactcttaatccagccacatttcttccagacaatgaagaaaaaataaaacataactgtcaacaagtaactgctcaaacctacaccactcaaggggaccttctagaggttcccttgactgatcatgatctcaacttgtatgctgatggaaattcctttgtagaaaaaggactttgaaaagtggggtatgcagtggtcagtgataatggaatacttgaaaataatcccctcactccaggaagaagcgcttagctggaagaacgaatagctctcactcaggcaatagaattaggagaaggaaaaagggtaaatatatatacagactctaagtatgcttagctagtcctccatgcccacacagcaatatggagagaaaggaaattcctgacttccaaaggaacacccatcaaacatcaggaagccatcaggagattattatcggctgtacagaaacctaaagaggtggcaatcttatgctgccggggtcatcagaaaggaaaagaaagggaaatagaagggaactgccaaacggatatcaaagccaaaatagctgcaaggtaggaccctccattagaaatacttatagaaggacccctagtatggggtaatcccctctgggaaaccaagccccagtactcagcaggagaaatagaatggggaaactcatgaggacatagtttcctctcctcaggatggctaggcaccaaagaaggaaaaatacttttgcctgcagctaaccaatggaaatgacttaaaacccttcaccaaacctttcatttaggcattgatagtacccatcagcaggccaaattattatctactggaccagaccttttcaaaactttcgagcagatagtcagggcctgtaaaatgtgccaaagaaataatcccctgcactgcaggccatacatttcaatccctgtatctttaacctccttgttaagtttatctcttccagaatcaaagctgtaaaactacaaatcattcttcaaatggagccccagatgcagtccatgactaagatctactgtggacccctggactggcctgctagctcatgctagcacccctactgacattgacagcacccctcctgaggaaatctcaactgcatgacccctactatgccccagttcagcaggaagcagttagaatggtcatcggccaacctccccaacagcacttgggttttcctgttgagaaaggggactgagagacaggactagctggatttcctaggctgactaagaatccctaagcctagctgggaaggtgaccacatccacctttaaacacggggcttgcaacttagctcacacccaaccaattgggcagtaaagagagctcactaaaatgctaattaggctaaaacaggaggcaaagaagtagccaatcatctattgcctgagagcacagcaggagggacaatgatcaggatataaacccagtattcgagctggcaatggcaatcccctttgggtcccctcccattttatgggagctctgttttcactctattaaatcttgcaactgcaaaaagaaaaaaaaaaagagagaaaaagaaaaaaaagagaaaaaacccaaatgctctaccaaaaaacaaaaaacctgttacaaccaataaacaaattcagtgaagttgcacaatacaaatcaaaatacaaaacctgtagcatttatatacacgaatcataaactagttgaaaataaaactaagaaaggaatcccgtttaaaatagttacaaaatatacctaaaaataaatttaaccaaggaggtgaaaaatatgtatactgagaactatagaacattgataaaagaaattaaagaagacacatataaaaatggaaaggcaccccatgttcatgaacttgaacaattaatattgttaaaataagcatactgcacaaagcaatatacagggtcaatacaatccttatcaaaataccagcgacattcttcacagaaatagaaaaaaattcaaacattcatagagaaccacaaaagaccccaatagtcaaagcaatgctgagaaaaagaataaaactggaggcatcacgctaccagacttcaaaatatatacaaagctataataaccaaaacagaatagtcctgggataaaaaagacgtagaacaatgcaagagaatagagaacacagaaattaatttacatatccattgtcagctgatttttgacaaaggtgccaagaatagtcattgggaaagtacagtctctttaataaacagtgctgggaaaactggatatccataagtagctgaatgaaactagacccctatttctcacccctatttctcatgcaagaaccaactcaaaatggattaatgacataaatttaagaccctgaaaccataaaactactagaataaaatggggggaaaatgcttcaggacattggtctgggaaaaaattttatgaataacacctcaaaagcaatggcaaccaaaggaaaaatgaacaaatgagattatatcaaactaagaagtttctgcatatcaaggaaaataatcaataaagtgaaaagatagccaggagaaaagatttgcaaactactaatcagacagcagattaatatccacagtatacaagaaactcaaacatctcaactcagaaaaaaatctgattaaaaatgagcaaatgatctgaacagatatttctcaaaagaggacatacaaatggtcaacaggtgtatgaacataatgctcaacatcactaatcatcaaggaaatgtaaatcaaaagcacaatgatatatcatatcccagttaggatgattgttatcaaaaagacaaaatggcaacaacaacaaaaacaacactaggaagaatgccaaaaaaggaaactcatatacactgttggtgggaatgtacagtagtacaaccactggagaatgacatggaggtttctcaaaaacctacaaagagaactcacacgtgatccagcaattttcctgctgggtatttatcaaaaggaaagaaaaggaaggaacatcagtgtactgaaaggatatctgtaccttcatgtttattgcagcatgattcacaagaatcaacatgtgaaatcaacccagtgttcaacaacagatgactggatgaagaaaatgtaatatatacacacaatggactactgtttagccataaaaaaataaaatgctgtcattgatggcaacatggaaagaactggatgacattatattaattgaaataagtcaggaaaagaaactgcatgttgtcacccttatgcagaggctaaaaatagttgatgtcatagttgtaaaaggttagtagagtctgcagaggttagtagagtctgggaagggaggtgtagtgagagatttttttaaaggacacaaaattatagctagataggaggaataagttttcatgggtatagcactgtaggatgactatagctaacaacaatatatgttttcaaatagaagagagcatattgagtgttcctaacacaaagaaatgacaaatgtttgagatgatggctatgctaattgccaatggtcgctatacactgtatgtatgaaaacatcaaaaaatacctctaaatatgtacaatgattatgtgtcaatttgaaaaatattttttaaatgtgttgaatgatacaagggtggaatagagataatttctctattgcacaacaagcaactattacttttataaagaaaatgctttaatgtggacaagaaagtgctttctggctgcagtgcagtagagagttggtggcaggtgtgaggtggaagcaagttggctagtttggaggttgttgagctaaccccagtgtaagaagagggtggcttggacttagaacagtgggtgtgaggctggagtgggcactgaaaccagagatgtttaggagagggaggtacaggagtgggagggaagctcccacagactgcctgggcagtctcctcccctgccctcccagagacttcgggctttagtggtgatactggattcctaagtggccttggccttctgttatttcagatccagcagatggggagactgaacaaagtggtatcctgggcccaccagtttttctacactcacccactctggtttgaaccgttcactggcttccagaacatttgagcccaactatgtcaaagctgtgtgtagccacaggggtgaggtgttcttgggagagctgctcttcctgagaacaaagggctcaggctatgatgtggggaggaggcctggacctgtgtcctatgcctgggcagctgaagttcccaccctgcttatcaaggtgcctcctctgggaaccccctagtctctatttgacccaaccaacttcttcacttgcagaacctcaagccctaatatgtatgacttcttcctccagtggattggtgagtaagcacctgcctttcttgccttgcccaccccagacccttggtgctggatgacctctgccctgccctacttagttggttatcccatcaaacagacaacctggcctctttgtgcctgtcttaggttcagttgctttttggggagtcagagaaggggagaggagagcttctggctggctggcaggggacatggacccaggcactttctcttgccaggttgtcttctaccctggataggcatctttcccactggtcatgtttctctgctaaatccctgattaagacacattttggtccaaagactggtactaaagagactgaatctgaagtatgagctttcttttttctgtctttctttctttcttttttgtttttcaagatggagtttcactctttttttctcaggctggagtgcaatggcctgatagctcactgcagcctccgcctcccgggttcgagtgattctcctgcctcagcctcccaagtagctgggattacaggtgcacactgccacgcctggctaatttttcatatttttagtagagaaggggtttcaccatgttggtcaggctggtctcaaactcctgacctcaagggatctgcc

SEQ ID NO: 4412 - DNA, 6000 bp, Homo sapiens
ttcacagtattatgcctagtaaatcccagtacatcaaccatcatgtcctactttacatgcatttttttgcatactaattgaagaatgagagaggaagcttggaaaaaatgtattaagattttgtttatcacagtttgatcagtggatcagtcttattattttataaaataatatccagctgcagctcaagtgcatattttacctaatttatatctacttatattcctatggcttaaagtcagttgacctattacaaaatacatgtttatcctttacactttaccaaaatctggcgaggtgatgagggtgtatgatgcacttgagagagagcattacaagttatctttttaaagtgggattttttttctgagcaaaagatatgtagtgcagaataatatatccacagccaaaatgcacccactcatttctattcaattaaaagaaggaagaacagacccagggtgagttttcgttccattacctaaggctttgagaatatcacttaacatctgtgagccctgctgctgcttctgtaacacattaataatgacacctccctgcgaaggtagttctgagaattcattgaggcagggcctgtgagggtttgtcctatgtaatgttagtaattttgtgcaaggtgtgtgggttcattgtgtgtgtttggaagctgaggaaattggagcactgagcttagagagataccagctcaggcctgtagccaccctggccctacctgcctggtggttggatcttctaagtcatgctgtggggtgctttaagtagtgctttccttcttgctttctcaaaatcaggaaactatcttacaggcatatttttttttaaacatgatttgcgaccccttgctgcattttgtcatgtgaaatgacacttactctggttctttaaagatggctaataatcctctatgggtaaatgccaatcaggccagccagttggctctgcgaaaggcttccttgaaagccatggttcaggttttgcagagaccaggaagtgaatgtgagtgccagagacctccttcccagaaaatcctgttgcatgtgctaccccggaggtgaagacaaggtagggacactgctgtgaaggctgatagtgcagagggtcatctctttggcaaccagacagcttgtcattttttattttcttgtttgtaaaatccatgtgtaataatcaccaggactcctgatattcacacagagaattgcttgtggcaaacatttttaaccgccaaactaagatctttcttaagatgaagaaagataagcagcattgttttttagagatgagtttatcatctcctcctccacacccattagtcctcagaaaagctatttcttgaaactgaatttggagcttctaaaatggctttcacagtgttggtctcttcatctggggattatggtacttagggagtggagactttcaaagtgaaccttccacatttttccaaaatcttttgtggcataatttgtgcctacctgagagcgcattttttctttttatgaggttgtgattttaatatatatacatacacgtgcacacacacacgtgcgcatgcacacacacacacaaaagcataacagcggctatgagaaagaaacacttctgcatgaaacacagaaggagcgggcgaatagctgaccaggggaaagtatgagatggtgttcaggcctcatggtagttaggattaggaaatgtcaggggctgtgttgtattctccaaactgtaaactttgggagtcgtacagagtgaatgttaataaatatttttgataaggaggagggtttgggtttatagggagcctaagaaagagaaatgtggctgcccttcccccacagctggccactgctctggaggggagagtattagacatttgggtgtggacatagcagcataggcgaataccattgttagtctcccaccaaatgctcttctgtattttgttacctattaaaccatacaaactctcctatatatcattaaattatcactcagtacagtacttggacaaaataggaatagtctactgttaactgtttttagattaatgactttgaatttttcctaagagagattttaagaagttagatagtctaatcgcatgagtcccaaatataaaaaacaaaggctctgcaggtttaagttttcctttgccttttcttaagaatttaaatatttttcttcagaggttttccttgggctcttagataatgagtaacaaaaatgaaggagggataccaaaagatatttcaaaacataattgtgtccttaaaaacatggtaataattgacagggtttttaaaatgagagaagtttctagctaaatgccctgcttcacatccccactccccacactgagtactttgtggaaaatatgtggtagctgtttgggaagaagtattaagtttgtgaaaagacatgaagagttgccaggaccacggtaagcaaaggattgagagaaggaaaaaggtgaacagagctagaccctaaaaggatgctaagatcccttgagaagtcttttagtaagaagccctccttagactgcgagtgcctagtggacaggaatgcatctcactggtccttgcagtcttcttccccgcccctgcctttgtacttgaaggccatggtcatctgggtgcactacaattcaagtctgtgaggtgaggagaaaagggtgggtgaggtgtagttcatcgtctggaggcctcagtattgtcaagaccacccccccccttttttttgtgagtgcacaagactcttaatcaccttttcatttggttgcgtcaggagcctcatagcagcatgctactgacaggtgattgtgaactaagtgttatagcagaaggaaacagaaaatgagagaatgtcaacttgaagccatgtgtgtttttgtgaacatcatttgccactttcttaaagagccccagttagagaaaaaataatgcaggaatcgaattttagtcagcttgttaggttctgaactggacagactttgtaccttggcatatgagtagccattctagaaccttttgaacttttgccaccaagtaattctggaaaggctgacagccagcagtaggtaatggaaaaagccagtatcctctgcccgagaaattaaggtgtgtattattcaggtggttaaagaaactgcctaccacaacagcaatagctggtaagtagcaggatcattcagagatgaagggatggatcacaggatggttgctgtgctggactttctccctagaattcatgatcattggccaggagtggtggtttacgcctgtaatcccagcactttgggaggctgaggcgggtggatcatgaggtcaggagatcgagatcatcctggccaacattgtgaaacctcatctgtactaaaaatacaaaaaaattagctgggcatggtggcgtgtgcctgtagtttaagcttctcgggaggctgaggcaggagaatcgtttgaacccgagaggcggaggttgcagtgagccgagatcacgccactgcactccagcctgggcgacagagcgagactctgtctcagaaaaaaaaaaaaaaaaaagaatttgtgatcattgtaggaattcgcagtgtaggggaaatggtacagattttataatcaggaaagacctgtattcagttctccatttgaccactttctgccagagccatgggaacagttttttaatttctctgaccctgtttcctcacttgggaatatgacttttgcagatctgttggaaaatattaaggccaagagggatttaaaatgagatgttgtctagcactgagtaggagcttaatatctatccgttcctttctgcttcagtcaaaactgagcttcatatgtagaatgattattgtttgtattacattctccattttgagtatggaaccatgaatgccaacagcttgataataaaaggagccgtttgtcaagagacagtcctgtaagcgctttttaacctggtagactgtgcatgtaagggcaggcaggttacaaatgcgaatccccatagccagcacactctacatacagcagattcttaagccatctgtgtactctttttaacactgtactgaagtccacttaagtcagagttcaacaaaatgaatgaatgtaatcccaggactatggaacttctctgtgattacatagcacagagaactacggaatcattttctggaagaatgcaccatgcgattatgctccatgtggaattggtatatataaatgttggtagactgtgaggatgaggttgacaggttgatctgagtagagaccctaggaggaaccgaggatactatgtagttttgttgttgttactgttttgcagttcctggctgctctgtgttggcagctgtgtgcacgctttctcttttgagccagcgaggcacaagacaagtaatttcccatcttgaatctctcacagctgctgagctgtagtggatatactgggatgtggctatgaactttaaaaatttgcataaatccagcccctactcccctgcaaaggctcagtcttgtctttacaccttccccgaggtaattattttctggggggtaggggtgggggttgggagggtgaagaaaggaagaaaaagaaggccgatcacactgggcaccggcggaggaagcgtggagtccattgatctaggtacttgtggggaggggagaacccgagcagcagctgcaaacggaagggctgtgagcgagcgggcgggcgggtggctggcagcgaggccaccagcagggggggcccgggccgaggccgcgccacctcggcaccacgcgggcagccggtgcggcggggtcgccacggccaggggagcgctgggtgcccaccatggcagttatgcaagcggtgaccccctggtcttgcctccccgccgccctgcactccttcctccccgctgccgacacttggatctctctagctctttctctcccctgtgttttcaaacaggaagtgcacggctgtctataacgtgctgccgggtctcaggatggaggagtgaagtctcctgtcgccgtggttccagcctccggagctcgcccaagccgcgtccccagagagcgccctgagagaacagggtggccgcttggtccaggtgcgcggggtcgggtctgggtccagggagcgggtcgggaagtctgcggcacggagcactgctagtgtcggatctgcatctccagctctgtgctgcagcttcacttgcccgccccccaccactggcttctcacccggggtctctgccaaactctggctgctgccgccctgggttcgggccggcggaaggccctgggcgtgcgctgcggagccgcctgcgaggactccactagggcgctttccaggctggactgccccgggctgcgctggagctgccagtgctcggggagtcttcctggagtccccagctgccctctccaccctctcctccagctgctgctgcctgaagcagcagctctttgttcctcccttactggtctggggtcatacacataaatgtcctgggaggcagggtggtgggagggtaaggggttgggacgtagggaagaggaagaagatgagttgtgggtgaagtgtaaggtggacaggagaaaagaatcttagtgtccatgctcagaaatcagctcttcagctgctgaaacagaggaccccggttccttggtttctgttttgggaaagccaggccatgccaaacagagggaattaatgatgcaggcacacaccggaaaggtagggaccaggaatgaggcacagcagcgagttctgagatgtttagtctggtgtctggcttgttaactccactgtggtttctgagccaggcctcctcgctgagacagaaggtactttaacatatgagccaggcatctttattaattccatttgtcatcaaagtaaaattgagagtgacttttctcaaattcaccaggtagattatactttcacttccacatcgtgttccatctcaaatgttca

SEQ ID NO: 4413 - DNA, 6000 bp, Homo sapiens
attctcctacaggttggacgtgataagtatgagcctgcagctgtttcagaacaaggtgataaaaagggcaaaaagggcaaaaaagacagggacatggatgaactgaagaaagaagtttctatggtaagtactaggaggaatattgtattccatccttattaaaaatccatgatttttaatcccccaggcctcactgtattcttcaaagaactgctatatattaaaagagatcatagcagctgtacagatctcatctagtcgtagaggttaatgttgaacatatactttttaaaagctgttagagggtaggaaaagttattcagtcactctggcataaccagagataacagaaggaacttaggttgataccatgagtctttgcttttctctgtattatatcaaacattgggaaattcagcctctccaggcgatggaagcttccatagacttaacctgtctagaatcgacctggtcatcagagaaggcagataaggttttactagatccctgagagctgctgggtttctctgaagtgttatggcaaatagtaatgggccacggtcactcagctttagccattctccagtgaagagctgtcaatgataactgtgtggttgcaaagccacaaagcgatggtgaaaattgtaccaacttatgcactgaagaaaacatctgcactttgtttaataagcttaatgatagtaatgaataatgctattttttctgtcatttttttatactacactgtttaactattttctttgtttctgttttcccttaggatgatcataaacttagccttgatgaacttcatcgtaaatatggaacagacttgagccgggtatgttctagtttgaaagctgttgtacaaaatcctagttttccgtattatattttcccctgtattacatacaggtctaacctcaggggctctagtaagaaaatgacagacaccatctgcgtatctaccatgtgacatgcacagaatttgggcatttatatgctaccgtttcttttccctgaaactttttgaaagtagatgttattttcttttccctattttatagcagttgagagccagtaagtgggaacaccaggacttgcagttggcttcaaagccatgcttatgccttgaccttttgatgataaattttccctttatttttctacatttgttaaatagagttgaatctttcacctagttgaatcttcaacaattcccatttttgcacttttcccagctagcccattgcagtgtgttatggttatactatcatttgtttagttattctatcatttagttggaaattgttttgtacaaaaattaaagaaaccttttcataaaataggcgttatgtatccttgttatgtagaggattttgatattaaatgtgtaacaaatgttataaaagtaaatagtctagggatgtcttatttccagataatcactgaaatgtctgggaataacttgaatagcaagccaatatgtagcattttttcagtaaggcatcaagagacatgggtactgtggtattctgatatatattggtttttgtccacagttcctggttcataactcccatagcccttattacagtcgtttgttataatgttgggtgtgttagacctcagtggcaggcttcaagaaacaggatctctctcctgccctccttttcacctgtcgcaaggcaggactctaatcttgttccacttttctgattttccaggtagatagtgttggaattgaattggaggaaaccttggtggtggggagaaaccgccacacctttgctcacagaagtcatcttctgtgttgattgttggggtgtaagagtagagaagaggccgggtgcggtggctcatgcctgtaatctcagcactttgggaggctgagactggtggatcacctgaggtcaggagttcgacaccagcctgaccaacatggagaaaccccgtctctactaaaaatacaaaattagcctggcatggtggtgcatgcctgtaatcccagctactcgggaggctgaggcaggagaactgcttaaacctgggaggtggaggttgcagtgagccaaggttgtgccattgcactccagcctggacaacaagagtgaaactccatctcaaaaaaaaaaaaaaaaaaaaaaaaaaaaaaaggagagaagaacaaggttgagagcgtttttcttgacacaagcactttaagctccaagaggaggcctcgagtcagctcagaacaacatgccaacagtgactctgtgcttactttgtgccaggcagtctctagccacttcacatctcacttaagtttttattagagtcttaatgaagtgtgctctctccgacctatgcccattactcaaatgctgcgggtctatttctttacttataaaatgaggttaataatgcctaaaaaaggattgtcatgagaattaaacaagttaattaaagcactgaattcagttcctggcatgtagatagcactcaaatgtttggtaacatgagcacaaaacacagataaatagatactttagacaaaaatattttattttttttttgacttgttattttgagagtataaaagtgatcatattttcctctcttaatgagagcttatatgtaattgcctgctgtcagtgaatcttgggtttaaggcccattagaaaaatagcaggctttagtagagtggttttttccagtgagtacttttcagtcaacaggtttattgggaggtggctaaaatgcacatggaggtgagcccttccctgccagacaagcaaagaatcaagctgtatatttaaaacttggctgttaacccaaaggatttctacaggaagtttttttctcctttgatgtttgtagaggggttttttttcccctcccgacaaaatcaatacacagaaaacccaaagctcttaatttgcaaaactgaatggatttgtgaaaatagatacctttttggcagaaatgcaatttggcattaatcccttgatctaaaacttagaagaaaccaggctgaattcaaatttattgatggatcaatttaaagagttttaatctgggtgttatgagttccttgggcctattgtttgcctgaaccctgtggggactggctcatcagcagaattattcatggaggaatttgctaggttttaccttggctctctagcttgggacattttgtttcttccttaaatccttattgcaaccgtccagctaccaggtaggtatattgccttgtaagtgctggtacagtttgccttatttatattccactgcttctcagggattaacatctgctcgtgcagctgagatcctggcgcgagatggtcccaacgccctcactccccctcccactactcctgaatggatcaagttttgtcggcagctctttggggggttctcaatgttactgtggattggagcgattctttgtttcttggcttatagcatccaagctgctacagaagaggaacctcaaaacgataatgtgagttctgtaattcagcatatggatttgtagtacacatcagatatcttctccgtctttgtctcccacttcttctcaattaccactcattacttaatggttatgaactcattacttaatggttatgaacagctgttgccttcaaggctcatccattcttccttcgtttccatttcctctctctaccacccacgttgtagatgctcttacaagtgggatgcccacctgcatgtgctgctgtgagcaggcagctctgctcaggccccggccgccacccactggatggcagagcacagcgattcatgttggcacatccacctgtccagaaatgcttggtggccattcttcaaaatccacaagttggttgaaaaacaatctttgttttataaagcaggagaaactgatgcatctagaacctttccaaacgtccagttagtgatcaagtgttggtgtgcctgactccatttctgacccttcctgtgtggtctttagaaggataaataagaaaacatgagttctatatttctgaaatcttggtttctctattaaaaatctgttttttattcagtcaaaaaattaattgaatgtccctaattattgtgtagagccacgggccctaacttgtcttttcccttccagctgtacctgggtgtggtgctatcagccgttgtaatcataactggttgcttctcctactatcaagaagctaaaagttcaaagatcatggaatccttcaaaaacatggtccctcaggtaccagacgctttgtccttccccagtggatgacttgacagccccaagcatgtcagcctgtgaattagtgtgaagttaaggttttccaagtattacatgactcatcagagagatggatgtcttctaccccacccaaaaccaacctattttccttctatccaaaaagtggtagcctttcttttgaatgtaaactctgaatacaggcacaccatgtaacagcaatatctcttaaactggcgagcaagcttttgtaacttgtgtaaataaaaaagtgaataatatctttgttttgtattcaggtaattaggattatgactatttttattttcttgttttggacactaccttctctttgttggtatactaacggtgtaaattgtttcttttccaaagcaagcccttgtgattcgaaatggtgagaaaatgagcataaatgcggaggaagttgtggttggggatctggtggaagtaaaaggaggagaccgaattcctgctgacctcagaatcatatctgcaaatggctgcaaggtagctcttttattttaacaaacctcatagctagctctgctgttcgggcagcttgatttgaggggtacagtagcccatgataaggctggtgtattcacatgacatttttcttcttttcctcacatataggtggataactcctcgctcactggtgaatcagaaccccagactaggtctccagatttcacaaatgaaaaccccctggagacgaggaacattgccttcttttcaaccaattgtgttgaaggtaggccatttttgggcactttgagcatggcgtggtatttctcttgggcattaacaaaatcaaaaccataggcacaatctcttgttttattggctccatttctgagaacttgtgtcaagcacagagcagaggtgttttcctagctggcaggaaaccttgtggcagtttcccttccctccacctccaccctgcctcttctgtcaacaacaccagtctggcatgggtgttggagctgctgtcctgctactggagagaagtccctttgccaaacagcatgtacagccaaagagctggcccttaaaaagtgcttttatcaactctttttgtttttttagtcatcctatgtaattgtgtaaaatccgtggcttccttcaggttagatacaattaggtacagttctccctccccttctttttaaggcaccgcacgtggtattgttgtctacactggggatcgcactgtgatgggaagaattgccacacttgcttctgggctggaaggaggccagacccccattgctgcagaaattgaacattttatccacatcatcacgggtgtggctgtgttcctgggtgtgtctttcttcatcctttctctcatccttgagtacacctggcttgaggctgtcatcttcctcatcggtatcatcgtagccaatgtgccggaaggtttgctggccactgtcacggtaagaggcaggtgatggtcaccctgactcagatcagcttgcacgaatgttacactcttccgctatcctattctaaggtattgccaacttatgttttattctggatgtttgatatagttcttcttgagagccacatcacgtggtgaattttgacagtgagaaaacctcagcatttgtttatacgtaagataaccccaaagcatacattttgcttttaaattatcacgtggtcctgaacagtgcagtggagaaaggagaagaacttgggatcaagtagggggatagaatatggta

SEQ ID NO: 4414 - DNA, 6000 bp, Homo sapiens
ctctttttctttccttgatacttgaaggggcccacctgaatccagccttctccctggccatgtgcatcgttggacgcctcccctgggtcaagctccccatttacatcttggtgcagttgctgtctgctttctgtgcttcgggagccacctatgttctctaccatggtgacagagggaacagagggagctgtgccttgagagcacctgtgggtgggcaggggtgcctcagaatggttttggatgaatgagcaaagagggaaatcctgggtgttcccttcctccacagatgccctacagaactatacaggtgggaacctgacagtgactggccccaaggagacagcctccatttttgccacctatcctgccccctatctgtccctgaacaatggcttcctggatcaggtaagtgtgagggggagacctggggacactactttggtcctgttcctcggcaccccagcctattgttcagtctctgggtggagtgtgggttgggtctatcttggcactccccaccatccccaactgcctgtgttgcacaaagccagatgacatggaatatttggatgagagagggcagatggagcacctggcagctgacagggaaccctctgcctctgttgactccaaggttctgggcactgggatgctgattgtggggctcttggccatcctggacagacggaacaagggagtccctgcgggtctggagcctgtggtggtggggatgctgatcctggccctcgggttatccatgggtgccaactgcgggattccactcaaccctgcccgggacctgggcccacgtctcttcacctacgtggctggctggggtcctgaagtcttcaggtgggagacagactctcctggtgctggcctccactcaccttcctctgctaagggctctgtccctgggtccacagcactctgcctttaaaatagctctcttggcttcttaggacagtgttctttctccaagtcatattctccccctttctcccttgcttccctcccaacttttcactgaaacagtaagatttagaggttgtgttcttaggcatgccacattacttccatgcacattagtgacttcatcagcaaaattaatatattcagataattccctaaggcaagaggctggaccaagctctcctggggttccctcttctaaatactatgctttggtgacaaggcaatcctcttcctggtgtctaccaccctgggaacaactttagggcactctcttgttactgccccccgtccttggagaggggaaggctaagggagtcactcctgataccttcccactgtccttcttttgcagtgctggtaatggctggtggtgggtgcctgtggtggcccctctggtgggggccaccgttggcacagccacttaccagctgttggtggctctgcaccaccctgagggcccagagccagctcaggatctggtgtctgctcaacacaaagcctcagagttggaaactcctgcctcagctcagatgctggagtgtaagctatgattaggacaaccctcacttcactcatggaccctggagccagccactgaccccgcctgggaacaacagtcattcttcctctttgttaatgtgccagaacctgggaggcttctctgtttatctgtttggcatcccttcctcctaaactaagaaggatcctggacagggagaagtggaggaggataaggtaccaggactcaggcttctcatcccctcctcccgcaaagcggttttctgaccctcagggcctctcggaatgtagttgctcgaggtaaccgctagagggtgcgcacctggatgctggatggggacggctgcgggcatctgcagggtggagggggccaccatccagtgtagggcacaaccctggggactgccctccatagcctgtcccgactgccgactcctagctctcatcgcctcggcgcctcccaccttcaccctctcggggatgcctccccaagagggtagttaggggtggggaagccgcctccacccagggggcgtggtgggggcggagggaaggagggcggcggggcacagagacagagagcaaggctgtgaaactgaggcaccgttcctagacatctcggtgctgtgtcgttcattcaaggagagttgagatacagtgaaatgagccagggcgaggagggagggtgaaggaacggagggcgggcggctccgaggagcgagagtcgggctgagggcaacctggcgccagggaaaattctggttattcaccacttctacagctctcctgccgctccctgcagaggatgctcgttttgcagagaaggcagtgttcctctattcccttcttccgaattaaaaataccccctcagagcgatctagcctcccgaattgttttttcttttaagatgcggatggacgtacgtgtgggggcatcccagcccagccacgccgaggctcggaagggctaagaccctcccactgccccgcacaaagatggctgctccctcctccccgctccttctcccctccccaaaaccccctcccgccccccggcccccgccgccggctccgtcacttccgccccgccgtggccgaaactgacacaaagtagcgggccgaggccccgggggagcggggccgcagctgggggggcgggagcccgtggggagccgagccgagcgccccccgccccagcccccggcatgggcagtacggggccgccggggcgggcgccgagcgctgagcgctgaggtgaggcgaggcgaggcgaagcgggggcgcccgggagcgcggggccaggagggcagagggagatgcggccgcagccgcggggctggaggggccggggagcgggtgtagactggggagcaccgggggccaagatttgggagctgcggccagacggggcggggatggcggccgactggagacgaggggctgtcgggttcccggggacggggcagagcgggggtctgcgtacaggatgggaggatggggtgccgaaggggcgcgtggagagcaggagagcggcgcgagtgccaaggagaagctcgtgcagccttggccaggggagacccgcccagagagttgttgggcgagaggagtaaccgggacccgagggtttggtgcctggagaagggagtttgggctggtaggctttgtctcagtaaggtggaggtctatgcctgaggaaaactgagggtgtcaggaaggggcagtagctctgggagatgatagctgtgccgggagccctgagttctgtccttggtgagggaaggtggcccgagctcgtgttggtggccagtgagctggaggtctcgagttccatttcctcctgtttccctgacctgccatcctcctctgaaagaagtggccagcctttggggctcttgcttgtaagggagcagggaccggacctataggaggagctgttttcctccatggagcattgcctgcttgccggggctggctatttttatcccaaatgtggccgagagggggctggggctgggtgacggggcagggcaacgtggctgatgggcctgacctgctcagaaaacccaggctgtgtgagactaagaaggaaaagtgagaggggatcccagttcccaggtctctcctctcttccccttggaatgatggcccccccagaggggatgaggtctggggccaagcctgcttccagtctccccagggtctcagaggtagaacaactttcctggtccatatccagactcctgactcctgatggcgtgtgcagctcctacattaactctttcatgggactcaaactcagatgtttaggctgatagtgtttcttgatcccttcctccccaagggcggggctgcctgtagaacttgtgatgcccactcttgcatcctttaacctctccctgtgctccccaccctcccgtgactcatactcagactgggtggagaccctggctgggggccctggaggagggcttggcatctctaaaatatggatgaggtttttcttcctgagccaggcaccctggactgccatagttggagaaggtcagggatgaaaaggacttctggctttcaggattgcctgacttggtgtaagggcgggatctgagctagcgaagggagaactggtgtgggtgactgggttgtggccagaatctgtaattatagagcttagccagacaggcaattagtatctcttggggctgacaggttggtggggtgtgcctggtaggctaaaggcagagggaaccaaagaggatgaggaggtgaaaggccttccacccagacaaggaaagaggaggtgactgactggcagtttcctttgggccaggctggggagtaaggatgaggctctgccttgtaaggccaggccttgaaccttttaggagaaaggacatgggaaggcggaagcaggcagaggcttgtctcactggtgctccctaagcctgcaccctgtgccatactgactggactaggcttggggtgggagggagggaggggcaaactccccaccagggttgggaagacccctctgccagcccagaagggtggctgacccaggctgaggggaagctgtttagggactgtctgtgcagaaagtgagggccatgcctctaatgtgagctcccctggaggaggtgataatggaagccctagtaatggggggtggggatggcagggaacttataagcctttcgagaagggtggagcctgcccaccctgtttcctgatgccctgccaggtgtttcctggctcatgttccctccaccccaccctttggggaaactgctttctagtaagcacaagcactactcattgccgccagaacacatgagagcctccattgtccctgggatggataccttgagagctgttccccttttttcaatatctggcctcttctcctttccctacaggcatgggcttctgtaaagtctcagccccccatgtcacccaaggcaggggcatgatgggaggtggtggggaagtcccctctttcccaggaacccatcatggcagtaagaggagagactgggagaaggaggctgggggaggggcagggtcagagctggagaagagggtcttcaaaagaggtctcatgaggggagggaagggttatcctcagcttcctgacctcattcgtctgtcacttcttgcagggtctcccatgggattgctgggatcttgctgggtgagatggcagtgtgtgcaaaaaagcgccccccaggtaagacaggcaaggaggggagatcccgggaaccatcaagagtgggtgttgttatggctcagggagcaaaaggaaaagggacaactggtatgggtctgagggagggtagcttacagcagcccctacccagcttgggggcagcctaggaaaccgaattcttccgcttgatcccaaagctgggttatctgccaggacagcgcagagcaccagccccacgccccgaaacacctgcagtcttatcttcgggcacctgcagctcctgctttctggcctagggagctgtgttctcatctctgcttggtcctctcaccccttccctgctcccctcgtttttccatctaccggttctcctggtttttccgcgggcgggggtgtgtgtgtgtgaaagcggttgcccccgacaacgccggcagtccgctcacccgcattggcccggcccgggggtgggaggggaggcggggctcgcgcgcgagctttcgcctacgcggcgcgctggcaggctgcggctcctgcagtcggggagcgggcgggggcggaaccctgggcgtgctcggcgtgtccggggccactcagcgcacgctggcatccgccggggggcatggggggcggcggcggcggcgcagctgagctcgcggtgtccccgagcgccggcggccgggaggatggcctgggctgcgggtggggcgcgcgcccgacggctggggctcccctctgagcggctgcggctcctgcacctccccggggagccgccccgtcgatgccactaaggccaaggacatata

SEQ ID NO: 4415 - DNA, 6000 bp, Homo sapiens
cggagcttggcttggggccgggtgggagggggcgggccggggcggggcctggtggccgcgcggcgctgctgggttctccgaggcgacctggccgccggccgctcctccgcgcgctgttccgcacttgctgccctcgcccggcccggagcgccgctgccatgcggctggcgctgctctgggccctggggctcctgggcgcgggcagccctctgccttcctggccgctcccaaatataggtgagtcctccgcctggagtgggtcggggggcggactgggagggaggtgcaggaaagtcggaaggcattagggtaatggggccggacggagaccctgggagagcccagccagagcgcggcccgccctggtccgctgtcctgggcctagggcccggtgacttggcgatggggtgaaaagagaaggaggggggatgccggcgccccctgcctcctgcctggtcatcctctgcgcggtccctgcggacactttcaggctcaggtaccaggtaccgaggggcctgtccagcgccacttcaagatcgtgatgagagggtcgctgctccccaggactggcatcttcgctgctctggggcctagctaaccgttcgacccggtgccagggcgctgagcgggcatggcttgtagggtttagtgaagaggattctctctagcctctattccaggcctggggccgccaggcactcctcaccctggtgctgttgccaccagtgcctggccgagcgggaggggcccgagatgagccaggagaagggagaattggccaggaaagaggctgggacaccaactcctccttggaactttcacttcccgctgctgtcttgggccgggaccgagagggcaggcgcgggtggagtgtccggaggagagagggccattgtgtgttgggggggtggggggtgctcgaggaggaagcagaggctgtaggcagcgggtgtgcctgactgggcatgagggtgtttagggaggtgggggtgtttgcactgctcacccagaaatgggcgttcctggcatctccgatgtgagcgaaggggagggtgagcgggcacccggccacaaggcttagctcagtctcgagagggggcgttcctgaagtggggggagagtgattgggagggagtgggaaccggggagggtcctgtgagaacctgggattggccggaaggggacaaggagggccacaggctgcgcaagccgaaagtctttcttggggacttgtgaatgggttggtgggtggaaagccataaattagagagacaccctctccttccagtattcttctttaagtctcagcatgcaatgtggaagcccctcaggtacctaagggtcttgatgggctgggagctggtggatctgagggcacctgtcacccccagccctgctgtcgattccctcagtactgtcttggggtgtcctgggacctgcaggtggcactgaggagcagcaggcagagtcagagaaggccccgagggagcccttggagccccaggtccttcaggacgatctcccaattagcctcaaaaaggtgcttcaggtgagctctcactcccctctaataaataaacgaatccacacacgccccggtatagccaggtgtctcaaagccaaagcttggctgaggagctggtgggtagagctcactgtagtgggtctatcccaggcccagctgcctctcccaccacaccccagcacctggcttcacttatctccctctccctctgcacacacgtgtatctgtctgcctcagccccacccaacccatccatctccactggggaaattgtgaagccaaacttgctttcttcatctcatgttgtcggttttctcagtggggggatttggaaagagtcaggaccttaccaaacccccccccccccaccccattctaaagctgagtcagaggaagggctggggcttgtgctgggtcctacacggtgcttcctctctgggcaggaagccgagaaggggtggctcagataccttccttgacctccgcacacaaccccccagaacaatgctccaggccaggcagggtttcctggcccctcccctgggatccccccaccagtgatctaattgctggtgctcttctgtgggcctgaggttttctggttagagaggctgggagttgtggacaggtctagggaggtgacctgccctctggtgcccacagaccagtctgcctgagcccctgaggatcaagttggagctggacggtgacagtcatatcctggagctgctacagaataggtaatagtgatggtggcaataacagtgaccacatggccaacaacttgtatagcatttattatgtgccaggtactaagtgcttgtgctcatttaatcctcataacagccctataagggatatactatcatgtattattgtcctcactttatacatgaggaagtcaaggcacagagagattaaataacttgccccaggtcacacagctagtatgtggtgaaaaccagattggaattcaaataaactaacagagtcagtggcccaaccagtatactttgctgccccggggtcaggagtggaaaagttggctgcgggggttgcctggtccccagccccacaaccaccttcaagcctctgcttgtcaatgcacgacctgggaagtggctttagcactgccttctttttcttcactccacagggagttggtcccaggccgcccaaccctggtgtggtaccagcccgatggcactcgggtggtcagtgagggacacactttggtgagtcaggccctcttgtgccatttttggcttaggggaaagagggagggggtggctggaaggtgagaggacactgcatatttttaccgtcaagctaggctcctcagttccagtcctggtgtgctctctgagacagcactaatgttgttcccatgctgcaggagaactgctgctaccagggaagagtgcggggatatgcaggctcctgggtgtccatctgcacctgctctgggctcaggtatactgggcggatttaatgacagtagagaaagtaaggagacccaggcatggagctgaaatgttctctgactttcttttttcttagaggcttggtggtcctgaccccagagagaagctataccctggagcaggggcctggggaccttcagggtcctcccattatttcgcgaatccaagatctccacctgccaggccacacctgtgccctgagctggcgggaatctgtacacactcagaagccaccagagcaccccctgggacagcgccacattcgccgggtgaggatgaatggcaggggggtgggctttggttgtcttgagggctgatccccagacacttagagctatgtgtgcacagtaacaacagctcctgcgaatggagcactttccacatgctgggcactttgtgaacattagctcgtgtactcctcccatacctaggaggtaggtgctatcaatagctctattttaaaatgacgaaaccttacaaaaagtatctgggcatggtggcgtgcacccgtagttccagccactcaggaggccgaagtggaagaatcgcttgagcccaggaggcagaggtttcagtgggccgagatcgagccactacacaccagcctgggtgaaagagtgagacctcgtctcaaaaaataaaataaaaataaaataaaataaaatctagctgagacagattaggtggtttgcccgaggccctacaactaataaatggcctatccatttattagttgtatttggctcttcatctgtcttatgatcccatttgcagagagctctcacttggttatagataatacatagttaccaatgatgaagcaatataaacccaatttcctaatttgtaaaatgaagataataaaactacttgctgcatagagttgctgggaagattaaataagtccatatagatgtaaagtgcttaaaactatgccagacctatggtaagtgacaagagttgttattgggatttttaaaaattattattattattattattatttgagacagagtctcgctctgtctcccaggctggagtgcagtggcatgatctcggctcactgcaagctccgcctcccaggttcacgccattctcttgcctcagcctcccgagtagctgggactacaggcgcccgccactacacccggctaatgttttgtattttttagtacagacagggtttcaccgtgttatccaggatggtctcgatctcctgacctcatgatccacccgccttgtcctcccaaagtgctgagattacaggcgtgagccaccgcacccagctaaattactgttttttaaaaatttgaaaaaaaccactgagtttggagccagaaaagcaggggtctactccaaccttcattatctacttcctggtcctccttggcaagttcctgggccctctggccttcagtggctcatctgtaaaatgggctcttcaccctcctatttgacccacagagtaggagtggctgcctcttggtcagcccggcacagctgctggctgcgagcggcaggtttgcctgataattcttcttgtccatagtagaggcgggatgtggtaacagagaccaagactgtggagttggtgattgtggctgatcactcggaggtgagcctgctggcccctgcacatcctcctccccctgcactgccctgccgcctttcatgtcacctctcttggcctacaggcccagaaataccgggacttccagcacctgctaaaccgcacactggaagtggccctcttgctggacacagtgagtgctggacagggcaacccccaccccaggcccctgaccatggcaacccctcttctgagccccagctgtctttcagttcttccggcccctgaatgtacgagtggcactagtgggcctggaggcctggacccagcgtgacctggtggagatcagcccaaacccagctgtcaccctcgaaaacttcctccactggcgcagggcacatttgctgcctcgattgccccatgacagtgcccagctggtgacgtaagggccccagactcagccagagaggccagtcctgtcctggccaaattcacaccccttcagcaccctacctcagcccctgaagctctgaccaccgtggcttctggccctgaactttagcctctctgtcccacagtggtacttcattctctgggcctacggtgggcatggccattcagaactccatctgttctcctgacttctcaggaggtgtgaacatggtgagttatttccaggtctcctcctcattcccaattcagttcctcccaagtgtggtggcatttatgcactgaaacccccctataaagttgcccaaccccaaagctacaggtatagagggtggaggtacgtgatgtggcctttgctatcagggagccctcgcttatggccagctagtcacagtgtacacagtcatcccctgtgcagtcttcccatttcttagaggagggtaggaggcagctaaggcccaaagaacagaggtgatctccctccagtgagggagggggacagagctgagctagaacccaagtttctgccatccaggcctgggttctcctactttagaagcaattcaggagggaagcagtgcctgctgagtgcccacgaggtcagacgtggagggaacaggagcagagagggtggtctgggcattgtggtggaggcaggctgggactggacctacagtacccctccccaatgacaggaccactccaccagcatcctgggagtcgcctcctccatagcccatgagttgggccacagcctgggcctggaccatgatttgcctgggaatagctgcccctgtccaggtccagccccagccaagacctgcatcatggaggcctccacagagtaagtagctgcaggatggagagagggtgtggggcagggggcagggagaggcccccagccccaaccttccttgccaccctccccagcttcctaccaggcctgaacttcagcaactgcagccgacggg

SEQ ID NO: 4416 - DNA, 6000 bp, Homo sapiens
gcatccccaaatcagccaaacttcccctagatccctaacttccaccctcccaggctttctcttctactcgccgattccttccacttccccaccctatcccggaaaatccctaaaataagcagttgcactggcttagaaaacaaccaaaactttatggcaatgtgctgtcatctttcctggggttagtgcctgagtaataccccttgaaaacttctcatcccctgaagggtggggtgaccacccctctgggactgaactccttttgggagccagagaagggtctgtggttggctgaggggctgtagcttagacctcagggtctccaggatggaccccaaggccaaagggtctaaaattctgaattctgaatctggtggcctcctcctcacacccttccctggagcagctgcctccggaatggctcaaagtcctcaggcactgtgtctgaagaaggggaaataagtaaggtcagaggatgtggctctcccacaaggcatgaaggattaggttgatctcaatcagccacctcaccattgcatcgatactggagattggaccaaattatgttttcttgggagaagcagaatacaccaagacgcccccctcgcatggatgtgtcaatgatcaccccagaatccgccacaagctggggtccctcatagagcttcaccctgtccaggattccaggataggagtatccattggtgctagggtgccagtgggcactgtgccaccatgcctggggccttgcttttccccagccccccttgagctcaccaggcctgagagagaagggagggagggaaagggaggcaggaaggagagggaaggggggtgcttttctcaggcctggggcccctagctctttgtccagctccttttgcatctcaaagcaccagccgcattccaagcgaggattgggttgccatgacaataagcacaatgggctggggggtgaagtcacccgcttcccaggctctagtccacccccttttatcccctgtcctggcaccccacagccccaggcaccttaaaggggaaccaacccaggttcctggactctgggctcttggccatggaaagtccagcctctaagcagacccatttcccctcccttcctgttcatctccaccaactagggctacttgttggagagaaatgcaaagttgtggacaaagtgttgaaccgaggcctgtgaagtcagggccttgattttctcttctgtaaatgatgatgccttccaggtcagatgatccctatccacgttgataagacaggttccaggtcataccaactaagggaccagatgtgatgtgccccttcacagattggcctgggtttggaggcttctggagaactgtaaagggcatctaacccaatgccctcattttacagacgggaaaatgggtcatggaggagtgacttcaccaacatcactcataggtgcttgtgtccgtggtgagaagggtgatggagagaagtggctgcagttcccacccatggagaggtcactggtgaatcccagctaaagaggaaggacaggcccggcctgagtcccacaggtgggctcagcccctctccttaccgaatgtagccaacttgaggccggtgcagaagctgccagcgataggaggtcttgtcccgccagcccacatttcgtgggtctgtccacagcagtcgtacctgatcaggggtgtggccagtatgccacagggcatttcggaggtgctcacctgggccagacactgatgtcactgcctaggagacattggcaaagacagtgggtcaactgcagaactggagtgaggggagacaacaggtcggtaagtgcaggtgggaaagggattcaaggcggtcatgaaaatgccctggggccccagagagccggcctccaagccagatgtctgggtaagagggttcccagtcaagcagtgggggaggccctggggctgcagaggagagctttgggaaagggccctgggttgcggaatctgagcagctggggaccttgagctgcagcccgggctgggcaaccgcccggaagggtgtagcctgccagtaggtctgctcggtctgcttccacatgactacgtagaagcggccactgtcttgataactgaagagaaagcctgcgtagtcatcatcagtcactgtgttcacatggaaggtgccttcaaagtccacaccattgaaggccgtgtatcctggggtgggggtgggataaaggtcaggggcagcaaagctactggcggcccatcatggggtaaagttgggaagggatgcctgctatgtatgtggccagcttgtgccactgccttctctctcgccactttgcccattctccctgtctgtttcctcccctaccctctgcccctataggattcctccatttggaagtgattgaactgcatatcccttacataccaactgccaagccagggtcactgttcatggtctgaacgatttccatgccctggggttgtatagtaaagaaaaagctgtgatgcaggtgtgctatccctcccaggccccccgtcccagtagccctgtctgatagcacctgcccagcccactgccccgagttacctggttgagcacaacccagtttgggtcaatctgagcatcaccctcaggatccaggacgacggtctgataggcccgaaaatccgtaagcgttacctctgcactttcaggacacacatccagggggtcgaccacagcatcattgtcaaagtcatcctcacacacatcaccaacgccattgcctgggcagagtgaggctgggtgctcaggaaggccctggccactgccattaggcaacaataccatctgttgggcctgcattcctgacatctttccccaccttgcccttcctcacttcccaacagggcttgctgcctccacctgggcaaaggcaacaccagtctaacgtgctctgggtccgcaggcttaccatctgagtccttctgattgggattgggtaccaggcggcagttatcgggaccaggaggcacataatctgggatgccatcattgtcatcatccccatcacactcatctccaagtccatcgttatcagagtccagctgggagctatttggcagctgtgggcagttgtccttggtgtcctgatgcccatccccatcgctaatcagaagaacaggtaccaaataaaggatttaaaggtactccttgtccttcccttcgcttctgcctgggagtctctggagcctgctctccatacaatcagacccctggcagtcagccaggtgaggtgaaggtctggcagtaggaatggagggatgactgtaagaataaattcctgctgaatagcaatagagaattaaggctaaatcatagaaggaatttagaatatactatggcctgggcacagtggctcatgcctgtattcccagtactttgggaggccaaggcgggcagatcacctgaggtcaggagttcgagaccagcctggccaacacgatgaaaccctgtctctactaaaaacacaaaaattagctgagcttggtagcacgcgcctgtaatcccagctactcgggaggctgaggcaggaaaatcgcttgaaccctggaggtggaggtcgcagtgagccgatatcactgcactccagcttgagtgacagagcaagactccatctcaaaaaaaaaaaggaggccgggcacggtggctcacgcctgtaatcccagcactttgggaggctgaggcaggcaaatcacgagatcaggagatcgagaccatcctggttaacacagtgaaaccccgtctctactaaaaacacaaaaaattagccgggcgtggtggcaggcgcctgtagtcccagctacttgggaggctgaggcagaagaatggcgtgaactcgggaggtggagcttgcagtgagccgagatcatgccactgtactccagcctgggcgacagagcaagactccgtctcaaaaaaaaaaaaaaaaggatatactagaggaaagtaaaatatcccctataagaccttgcatttcgctggcacagtggctcacacctgtaatcacagcactttgggaggcagaggctggcggatcacctgaggtaaggagttcgagaccagcctggccaacatggtgaaaccctgtctctactgaaaatacaagaattagctgggcttggtagcacatgcctgtaatcctagccactcagggaggttgaggcatgagaatcacttgaccctgggagacggaggttgcagtgagccaagatcgtgccactgtactccagcctaggtgacagagcaagactccgtctcagaaagacaaaaaaaagaaagaccttgcgtctcttgaccaagaccttacctgtcttcattagtatcacagacatcccccaccaggtcgctgtctgcatctgtctgagagagagggacctgttctcaccatctcctcttgataactctgaagagggtgatctgaccactttccatccaaagggctggggcttcatccatcagtaccctcatccctcccctgtccttaccatctccctgtacctgggtaggattgctcatttcagggcagctgtcgcaagcatctcccaccccgtcctcatccctgtctgtctgtagtgggttggggactttagggcaattgtccaatccattggggatgcctagaagacatgggtagcacaaggttgttactagaacatgccatattctctcttctaggttggtgaaagtcccgaactttgtctccccacccagaggacaactggccaggaaatctgcctgtttcttgtctcaccctctagtccacactctgcctaacactacgccctacctcacattcctattgacatctgctgcaggtaatctctcctcacccaggccaacgtccacaagcctgcctccctatttcacagagacttcctagcttccctgcttcatccccacctgatccaaattctcacaggtcccccagccaccccttcagccccaggcctgcaccatccccatccacgtcgttgtcacaggcatctccttccccattgccatctgtgtccttctggtcattgttgggaacgttggggcaattgtcacaggcatcaccaaatgaatctgtatctgagttctgctggtctttgttggggaacagccggcagttgtcctgggcagaggggtgggaggggaagggtcaggtctcccctaaatcacttgtcatcttgcacctaccttgtctctgtatccttttctaagatcacacccttgtgatggacaaactgctcagtacagtcccacccacccagcctccttgtcctgggcacgaggtttttgcctccctgatttggagtatttggcccttactagagagctgccagatgaggtaagtgaggcacagagaggacaggaggaggggagaggagcttcaaggggcagggcagtctgggagtcacctcaacattcttgatcccatccccatcagcatcatcatcacactggtcccccacaccatcattatcagcatcttcctgcccagagttgggtgtcaaaaggcagttgtcctaaagttcaggggaagaggatggatgagttctggcctgacccagcttgggctccccactacgcccccttgcccgcctgctccctgcacctgtttgcagtgtttgttgttgtccatgcagggcagtgcttggtctgggtagccatcgatgtctgtgtcagtcccacacacgttcccattcccagcccagcccacgttacactagggcaacacaaagggtaggagctagcagtttggtctggctcccctcctccctatattttccctgcttcaggtcctattctccccaccaaacagttcctgggcccaggcccacctctctcctatgaagacccccaacccaggccctaaacatagccctactcctttccccagaccctcccttttccttccacgcctgaagcctagctcacctggcaggacactgcaccattgcgttcaaagagacagtg

SEQ ID NO: 4417 - DNA, 6000 bp, Homo sapiens
ccatcagctctggatcctcaaaacctggcatgcagtgcctatgaaaatgttctttaaaatgttcttggaggggccaggcacggtggctcacgcttgtaatcccagcactttgggaggccgaggtagacagatcacttgaggtcaggagttcgagaccagcctggccaacatggtgaaatcctgtctttactaagaatacaaaaattagccgggcatggtggcgggcacctgtaatcccagctactctggaggctgagacaggagaatcacttgaacctgggaggcagaggttgcagtgagccgagatcacgccactgcactccagcctgggcgacaagagcgagcctctgtctcaaaaaaaaagttattggaggactagaggttttttcaagctcaaaatggagcctagcatcacatttaaagatggagaaacaaagatcagggtgctggggaggaagctgacttggctggagaagatacactggagtgcacattggggtgggcagagcaggtgtggatattcaccctgtgaaatgcagggacaggttcagggacttgcccaaggacatgtggtgagtaagtggcaaggttaagattcaaacccagttctcctacctcccactgtacagtcttcagaactttttaaaggataagaaccaaatgagaggatgcacttctatagtgcgcactatgtgctgggcaccattgcagtttacaaattttaacttatttaatccttctgataatgctatgtggtaggtacaacctttcacccacattttataggtgaggaaactgaagtacagagatgttgagtaacttgtccaaggtcacagataagaaatagcaactgggcatggtggcttatgcctgtaatcccagcattttgggaggctgaggcgggaggatcacttgagaccaggaattcaagaccagcctgggctacacagtgagactctgtgtatagaaaaaagaaaaattagccagatgtggtggcacacacctgtagtcctagctactcaggaggctgaggtgggaggattgctagagtccaggagatggaggctgcagtgagccaagatcacgtcactgaattccaatctgggcaacagagtgagaacctgtctcaaaaaaaaagagaaatagtcaggatttgaatccaggctaatctggctccagaggtcatgctcataaatccaaggctatgtgggctctccatgcaaattatttaatatcagaattatggttataatgtttcctttctccctccttgttaaataaaatcataacacctttccaggggatgagcatctttccaaaaaacttatcatccctgcacttgtcctcccccagactcttcccactgctctgcacactttttgtgctctgccctgcaccctctgccaggattctcacctgccattttttcctcacagaagtgcatcagcagaggggagctccaggtgtctctgtcatatcagcctgtggcacagagaatgacagtggtggtcctcaaagccagacacttgccgaagatggatatcaccggtctctcaggtagcagctatttacttcaacctatttcttactgtctgaaccatccccgactccttgcctgtggcccagatagacctccacacttcaagatccttgcctctttcacttttaatctgctcctctttctgtagacattctcttcctgatgagtatctacgtccaatagatttccctggctaggaagattcttcagttgaacaaatggggtctttacatttggcaaggtatcctaaataatattcatgccaggtgctaagagagacttctcaaaaaggctgcaggcatttgtctctgtgccctttaatatacttcttggtatcatgggatttcttcagacctaacctgagaaagttgttctgttctattcctgcttggtttccttggcccctcatccaggcaggcagactcacatatagtcagtgtgtgtttattgtgcaatcactaaagaacacatgggatggccatcaaagatacgaacaacagagccccccctttcccaacatgaaattaccattacataggagaggactgtgtcataggtctgtctccctttttcttatctctttgggggccccagatccttatgtcaaggtgaacgtctactacggcagaaagcgcattgccaagaagaaaacccatgtgaagaagtgcactttgaaccccatcttcaatgaatctttcatctacgacatccccactgacctcctgcctgatatcagcatcgagttcctcgttatcgacttcgatcgcaccaccaagaatgaggtggtggggaggctgatcctgggggcacacagtgtcacagccagtggtgctgaacactggagagaggtctgcgagagcccccgcaagcctgtggccaagtggcacagtctgagcgagtactaatcctgttcttctctcctctaatccccgggggccaagctggggagggatgtggaggggaaaaagatgacagagaagtggactccaaacctcattttagttgtagaagaaaatttcttacaaaacaaattccacaaagaacaccctatatgaccacagctgcagatcagttcttagcaatgatgtttttttttctgctttgcaaggcgctagaatcttttattttactttattttttttgaggtggagtttcgctcttgttgcccgggctggagtgcaatggtgagatctcaactcactgcaacctctgccctccaggttcaagtgattctcctccctcagcctcccaagtagctgggattacaggcacccacgagcatgcccggctaattttttgtattttcagtagagatgggtttcaccatgttggccaggctggtctcgaattccagacctcaggtgatccacccgcctcggcctcccaaagtgctgggattacaggtgcgagccaccgtgcccggcctctggttttgttttgttttttttttttaatgggggacaaaagagagggaaagacccctataaatctatatataacaatgtaaccatatacttgcatgtctaatacaaactgaagaaattagcctaactgccaatatcaagttgcagattttaatccatggaaattgtgttttgtgctgaattgtatttgctgattacctgaaattggcttctttttattgggcttctctggagaatttctcccactccccacctctgcagaagaaaattttgctcttataaaacctcatgttttcatcattcccatcttttctttttattgcctcttatatctctgctctttgacctcaaggtctagaggtctgcagtaagccaagaaacaaaggtggggtggatgaggcaaggtttgcaggagaaagaggaattgagaaatggggtatttttgctatcagctcttctgctatgaagtagtaaaaggcagtctataattaactgacagacctaactgaagcacagagaatacatcagacttatgcatccaagacatcagaacttggattttatcaaacttgatgacttctctaaaaggagctttggaaacttcaaattcagctataggatagtaccaatgaacacatccagctgatcccaaaagctgttttcaggtataaggacaaggagaggagacaagtgacgacagccattcccctttgcagctatctactgtagtgacagccatttcttggttgatgggttggaagtcatcagaggtttgaagaattacactggcctttgtttttctggaaatgccgaccatggagatgctttagagtcttctcaaatagcttagatgttgtaatgaggttagctttgcttcataaaacaggggccctcagaagttctccttaaatttttcaataaaaatttagctcttaaaaaaataacagtgtgactgagtgaatgaagataagttggattctttcagagcattcttttcctcaaaacgagctgcataattcttggaatttatgtcttaccacatggtggagggatggaggaactacaggatgcaattcttcttctaccaatgggcaatagaggttgagagagattcagcatctttctgggattagaattcaagtctctttactcctacagcagctgtgtctccaacgttgagactttgcagatggcacagactccatggataataggtaaacttggggccgggcgcagtggctcacgcctgtaatcccagtattttgggaggccgaggtggaaagatcgcttgagcccaggagttcaagaccagcctgggctacatgacgaaactccatctctatcaaaaatacaaaaaattaactaggtgtggtgctgcacgcctgtggtcccagctattcaggaggctgaggtgggaggatcatttgagcccagaggtagaggctgcagtgagccatgatcatgccactgcactctgggctgggtaacagagtgagatcctgtctcaaaaattaattaattaattaattaaaataaactaggtaaacttggataggcagtagatatttttgcccacctgaggaggaactcagtcaagctgttgcttaacagcttgatccagggcgtgaaaggttagttgagactgaagtgttcacttccatagaagaacatcacttttaaccttgctttggcgaagggagtcggaaagctgagtctctatggacgggggggtgatcttgctttcagtgttccctcagcttttgtggatttaaaaccattctgctccccctaaaccttttgtttgatttcagcccatgttcttgacaatgcagagcaattctgagcagtcacaaagcctactctctgttcttgtccctgccaacccccaccccccataatctgactcacaacttcaccatcagttggggtcataccactagtctctgtcctataccccatgaaatgtaaatactgtatcataagtagaagaaaataatttttgttttctaaaaatgcattttgagatagtttaatgtaaatctgacaggagcattctgaagccccattaggaaaaaatttaaatggttcctcttcatcgccttaatgtctaaagatcagaaatcgctgagcaaacccgcttttgtttccttcccagaaacaatgcaaaacaacaggtggagatagtctggtctttgccctgctgtgtgtgcctctgtagctcctcctgacaaacgtctgggaaaacagcctcaccccactctcctctctcttccccatttccttgtagctttattccttgcatctttgggtctactgagcagtgggtgctgaggtgacaggggaggaaccagttgttctgtagcctaggaactgcctcagtgtctttgccagaaaaaggcaaagaggcggacagtgcagggctcctccctcctacctcaggcctgatccatcgtgcccttgactttgccgtctcaaagtttcttagctgactttggctttcacatttgttctttccagagctaactgataagagtggaggaggaatgccttctcctaagagtcagttgaaagaaagacaagagagtcacatcttagcttttgcacaaggcattcgtggtcaggaataggttagggaatggtcacttctgattttccaacagttgctccttctctgaagagatcttgattcctttgggaagacaagaatttttcttaataacaaaggtccctttatgagttattccttctttcagttcatctcactggagcacagccaagatggacatgtttatggacagtgctctagatgtgaaaacagatagaactggtttgtgggacaggggcagcttgctcaggagagggaataacgcaggtcccttttcttggaaggcttgtactatggccatgacagtgacattgccctcaccatgatccctctccaaagtggttgtctttctttaccttgtgtcttctcttgtaaaaatgaaactcaaaaataaaataaatgtgtcaaattttgaaaaaaaaagaaaactg

SEQ ID NO: 4418 - DNA, 6000 bp, Homo sapiens
tgtcgccccggcatatacacagttcccggggtagagggaaacccagaggaactggttgtaaagaggaatgggccccagctgaccccctgaacccaggtggtgacatgtgcacggtggtgcctgctgaaggtgggcaagggagctgagcagggaccgggggctactgtacctccttttcacctcctcccgcatctggagcccctcctcctccacatgtgcgaatccaggagccacagaaggtggggcgcagtgggacatgggtaggaggaggaagaatatggggagattctagtccctcccacttagagatgcggtcgccatggtgactgaggaccagtgaggcgggatggggttgagaatgggggtgggggtgtggcaggggctgaggcactgagagaccggaaagcctggcattccagagggagggaaacgcagcggcatccccaggctccaggtaagggagcgggggagctgacagttctgaagggagggggcggggccattgtctggtgctggctctgccctaaagagggggctgacagaggggtcgggctattgtgtgtgatactcagcgcagccttccagagctagtcagactggaggaggggacctgggaagctctgggtaaggggttaggagggactgagctggtgggtggcaaaaaggctgggagacagtggggatgggaagaggtggagggacacagggggcgtagaggcttggggacgtccctagtgcctatacacgctaggcactcaatacatataagttgacttgacttgcctgtgaccataacaagagggcagatgagggccagggcaggtggagctaaggcagggaagtcaggaggcaatgttccccagaactggactcttctgtgggctgcccctgaagctgaaagggaggaggtgggggaaactggacctgccagatcactcgtgaagccaggagttgcttctctcctggctccaggagctgctcctttagtgcagcatccgtgttctgcaggggctcagaagagactgagcgtctggggctggttgaagctcagaggtagcatagagtcggggcgggaagcaacctctccatctcccctcccacctccacatctagacctttcctctgcacaatagaacctggcaggaaggggctacatcgcatgctgtgtaagggttgcaggggaggagctggactctggcagggcagagggtgcactcagtgttgttgtcatggcaggacccagggctgggctccagggcttgtggagaaatgggctgggggaaaccccagattggagctgtgaaaatgacacggcccctgtgggcaggtccctgaacatctgaccccttcccactgccaccccacctgacctgctgcctgacaccattcccagccaaggtacttctgctccttggccttggtttcctcatttgtacggttgtcaggaagggtatgtctgagtaccctgtcagccctgagcttctttgatgctgtgtgcaggacctgctatattatttgtggggcccagtgcaaaataaaaatgtagagccccttgtttaagtattatgaggactttcaacagagcaacagcagagcattaaaccaagtgtggcccttctgagcacagggccctgtgtggctgcacaggtctcgtgcccacgaagccagcactggctggggccctgccagctgaagcaggggagatggcagtggggcttggggtctgaccccagagactggtgtgaggggtgcactgctgggggcagggtgcccttcctattgctgtttttgaccaggaggcccttgcagaggcagggggtggtacctcacagccttccttcaagaaggtttctgttccctctgaaacgctttattgacacaaataagcttgcccataagggccacgcttggggctgggcacagtgtctcacgcctgtaatcctagcagttttggagtctgagtcaggcggatcacttgaggtcaggagtttgagagcagcctagccagcatggtgaaaccccatctctactaaaaatacaaaaaaaattagccgggcttggtggcacatgcctgtagtctcagctacctgggaggctgaggcaggagaatggcttgaacccgggaggtggaggttgcagtgagccgagatcgcaccaccacactccagcctaggcaacaacagagcaacacttcgtctcaaaaaaaaaaaaaaaaaaaaaaaaaagcccactcttggtttaatgctgtgcggttgccctgttgaaagtcctcagaaatcaccccagagatctgatttcttagcctagagtagataaagctcactaccctcccagcccacccttgccttctctatccaagtggctcagaactgtggactggggcaggagggaggactgagggactaggactctgtagagtctttgtagctaagagatttgctattgaatgaggcagatctgaatttaacttggcttctagctgtgtaacctcccttcttgatctgtaaaatgggattatggcagtacctagctgctaaaattgttgggagggctaaagcctgatagtgtgaactattcatattggctagaggggctggggaagaggacgtccggagttgggagaattctggatgtctggaggaagaactgggggcagggcatggagtctatgacttccagaaaggtgggaataggacatcaggctgggagtgtagggctggaactcccccagcctccccgtatcagaactcttcccagtgacccaaatgagccaatctgtttaagcagagaggcccaggggcagactggcttcccaaatctgagctgggggttggggagacacagaaggtagggtctggataaatgggagtttctcttgattctaagaaactggaagggacctggcaaccagcctctgggagagtctgggggagtcctaggcaagtcttgacagaaacgattgtcaggcaggatatgtctgagaccaacccccggggaaactgagagagatgaaagaaggctgagtacctcagatgaggaattataaggagtagcctgagctgtaacatcccccatgttggctggtgctgtagcaggagggatggaagttacactacaggaaggacttcctgccagggaggaatgtgcatgtcagatggaagtggattatttattagagttggattagccctgggatgtctgtgctctttaacctgcagtcagctgaccatgtcgagtgggcaggaacctacccactttgtaggccacagagttcttggcgctggatgcctcattaaccccgcgttatgaggctccccctggagcctttagggaggggtgagcagccacctttgggggttgggtgcctccaaagtgtggtccagtgagcacgagttcagatgggaaatgttctgggctttctactggcctgatttctgggcttcctattggcctgatgtcaaagagtgatggagattagactgcaagggggacttcctcagcaaaatcatggataagagcctaatacaattattttattttatttttttaaagactgtggcccagctgagagtgggaggtttaaaggttagaccactgcagggacttcccagtaggtaggagtagagagaccccaccttgtgggtaagtgaaaagaagaatatgtcatgtcccctatctgggaaatcttaagcaagagaagaaaccactgctaggctggttatactggctgtgacatgatggagaggcaggggaatcgctgaaatgacctagaagggcctcttaaactttctggttggaccgagcagaggagggagagagaggtgtgtctcttgtgaggtgggtgaacgtctttttattccctcccaatccaccaacttccgcccaagccaggatctgtcacaactcgagaggtggaaattccggtttccctggcctagagctcccagtgctggctttggcatgatgggcacctggagggccgcactcccgttccagccaggctgagccttctgtcccctgcctctggggcctgggaaccccccttcttctttctcctgaatggcacccccgccctagaatccagacaccgagtttcccactgtggctggttcaagggtatgtgaggtgagatgggtggcttggggtgggtggtcttggggaagattatgtagaggcccagggaggcagacacaggagcaagagacaagggggccggggagctgcagaggctgggagccggccagccacccctgcccaggcagctccccgggaaatgctgataaccaacctggtgggatggaccctcattgcctccctggaagtatcaggccaggcaggcctgagcctcaaagaccctgaacccagctggggctgggggagaggttagagcaggcagactcaaacccagtctgcctacctgggtcagagctgagtatgaggcacaggtgtcaacagatctgaaagtgacaggagagtaaggtctgaggaatttatattttgggtacaggaacctgctccccaaaatgttccctgcccagagccaggcaacggtttgggcttgggctatgagaagagggaaggcaaaggaggaaagacaggaaagacttcctgagagtaaggcaaaaaaaggcaaaccagagctgttggtgagaagacaacagaagaagcaggataggggagacctgggctcctacccataggggacagtgaggtgacaggctgaggcctggaaggatgatgaaagtgagaccgtcttagggcccttccagatagggaaccttctctgccccaatgccccacccctgccaccaatacacacgcttctgctgcctggggctctcctattggtcctcggggggatgtggtaagaactgctcacccagaaagtgcccgggtgcctgtttccccagagctccctggtgacagtctgtggctgagcatggccctcccagccctgggcctggacccctggagcctcctgggccttttcctcttccaactgcttcagctgctgctgccgacgacgaccgcggggggaggcgggcaggggcccatgcccagggtcagatactatgcaggtaagtgtccgacagcaggaagtgtggggatagcaatagagagctggaggtgggtggaggaaggagagaggaacagaggaggggaggaaatggatatggagaaacagggacacagagagagatgccagggagaaacagaggatctcggagaaagagagacacagccagaaacagaagtccaaaaggaaagaaaagccactggagagcagattgaggaaaacaggtggccacggggccaggggcacgcttcttccagttctccatgttggtaatttttctttccttccttaaatatcactgtcaccaagctgggcacctcaaactcctaactgcttcacactcccaggtaccccaaagtcaaggcccatgctagaagaccatatgtggacccggtgacccggagctcgccaggcccatgccaaccacatagatcatgctggaccataccatgtccaggaccatgggatggctggttggagaatgggccctggaacccacacacaagcacagcttggctggtttcttactgagactgtggaggctgctggccccctcacctccagggagaagactcaggaaaggatgtagacactgtaggagttgtaggtgactgggcatggctgtgtctttagcatctttctggggcaattggtaaaagaaatgtatattgctcattgatgcagagacctcctctgtgttggatgctgggcgcacaaacacggataagcctcagcccctgccctcaaggtgttcacagtcacaagggggaagacatgagcaatcagaccatcaatacagggtgatctgttcagcaactgaggggtttatggcagctctgggggaggcctggcctccaggagatgctcctccctgaggctggcccttccatcccgcagccacaccagattccccaacttctccc

SEQ ID NO: 4419 - DNA, 6000 bp, Homo sapiens
tgactggtgggggccaccatggtgggggtgggctacagcatggaaagccttgtgcatcaactgggatttgaacaggataggaagcacttcaatagaagctgtgggagaagggcatgccatatggaaagcactgcaatgcaggtcttggcttgaggaccctgaacaggaggccgaaatgcttggaacttatgccctaggcagttgtagccattgaaggtgcttgagcaggggagtggcacatacttagctgtgctgaagggaaaaataacctgctagcagtgtgacatggaggttactgtaataggccagcccatctgtctgctccagggcagaggagcagacaggaggaaggatgggagaagtgctatggaggtagccacctttccgagccagactcccaagactatgagctgtactcagggcctgagatagcccagccctttcttaagtttgaggcttccatctgtagtgtgcagctctgagcaactgtaggggtatggagccaggcacagtggttcacgcctgtaatcccagcactttgggaggctgaggcaggtggatcacctgagaggtcaggagttcgagaccagtctggccaacatggtgaaacccctactctctactaaaaatacaaaaattagctgggagcagtggtgggcgcctataatcccagctacttgggaggctggggcaggagaatcgcttgaacccaggaggtggaggttacagtgagctgagatggcaccactgcactccagcctgggcgacagagtgacactccatctcaaaaacaaacaaacaaacaaacaataaaccagtaggggcatggagtaccagaaaatattataggccaggaaagaaaagcagacaaggactgggaaagatgtgtgagctgaggacctagaggaagccaccacaagagcaatgaagacagtggttgtagattagggggtagggtggtaccgcctacctagaggcgcacatgcaggtggaaggatgcttccagaggcaggagttttggtcttcagggaagtgttagccacaccctgcactgactttgctctgctttctcccacagtccccccagaggacaccaggattgacggaggccctgtgattctactgcaggcaggcaccccccacaacctcacatgccgggccttcaatgcgaagcctgctgccaccatcatctggttccgggacgggacgcagcaggagggcgctgtggccagcacggtgagctccagccagctcccccagctcctcctgggcctagcccagctcacctctcctttcccacaggggtttcaccacagactcaggagcacacagacatgagaggggtcttagaggtcatctggttcaaccctctcattctacagttgggaaaattgaaacccagagaagagaaatgaattcctaggtttactgtgtcattcagtagctgaacagagactaatagtaataataagttgccatggattaagcacctactgtgtgccagacaccgtgcatgctaaacactttatggacagtctctcttaatcttcataggagtcccataaaggaggcattatttccaactcacaaaggaggaaacttgcgctcagagaggttgagtgacttgtccaaggtcacacagctggcacagagcgggggtttgtacctgggtctgactgtgctttctctccactgatcacttctacctctttccttcagcgtctggttgtcagattattccagtcatcacaacaaagaggctggggaagcagagatccttgtatacattttatagatgaggaagccatgaaagatatcaagtgacttgcccaggattacatagcaaagcggacagtacagctggaattcaaagccagatttcctggttggggttaccctgccagttgtgggtaaacatatgtgtattcagccctttgctggtgctgcaggagcacttctcagtgtggagacagagatgttcccatgctcctcagcaagcaatcccaggaatacctggcttctggcttcagttctgcccttaacacactgtgtgaccttggataattcgcttcacttttttctggccttagtttctcatttgacaaatgataattcagcctcagtggtacttaaccttttcacaaccaaaaactgtgatttttcttcatcagggctacatgtttttagatattttggcaaccaaacaagttggtttgttaatatccatttgtcatctacccccatttttcatattcattaaagacaatggagcttcaaagcagcacaagggagccagtgttattgcactggccctcaactgggcctgtccagcaaagctgcatgcatggtggtcaaacaacggggtcttactttgattaataatatggcttccctcaggcagtttgcaatatagaaaacagatcaagggttcctgtgaccatatttagggacccctggctgtcactgagcaagtgtaagacttcgagcctgtgagtcccttccctgccctcaaggagtttacagtttagcagaagaaacccaaccctgaaacacgcacacatggtgcctacaagcaaggttggatgtgtctagagctgtgagcaggacacactgactataagggcataaattcagtctgggagagagttctgagggctgggctggctgaagaaggctttccagaagagaagggatttgcgctggactcacaaagagtgaactctaatataaactgtggccttaataataatatattagtttcggtccatcagttgtaacagacttatcactctaatgcaaggtgttaaggtgttagtaatgggggaaagtgtaaggtcggggaggagggtatatggaaactccctgtactttctgctcaatttttctgtaaacttaaaactgctccaaaagatagtctgtgatgtgggcatgatggcacactcctgtagtcgctgctactcagaaggctcaggcaggaggattgcttgagtccaagctttggaggccagcctgggcaacatagcaagaccctaaaaatatataacttttaattaaaagataattagtagtctattgattaaacacacacacacacacacacacacacaagggaagaggttgtgggagtgaaggggattgagctttaagttaaagtacccctccagcccaagcccatctctgagtgaggtcaacttaagagcagaggagggggcttttagcttaaccatatctcccacccttgtcatgttccaggaattgctgaaggatgggaagagggagaccaccgtgagccaactgcttattaaccccacggacctggacatagggcgtgtcttcacttgccgaagcatgaacgaagccatccctagtggcaaggagacttccatcgagctggatgtgcaccgtgagtgggctggggggagcagtctggagcaggggggtggaagaaggggtgtgtttgagaagcacactcttagtttgagaaacacaaactaagagtccccctatggtccccaggacaaacgcttgccttcttcacatctttcattccctggattgaaccatggggactaagggctggtagagcattggctgtggagtcaggcagtccccaggtctaaaccagcctgttattagtcaatggtttacactctctgggcctcggtttccagttctgtatactgtatattgcaaaagataaaatactggcctacagtcccttattcaaactaaaagtggttcgatggtgcagcctgaaccaaggctcttcatagtcttttatttaatttagtcttaagtttcactgcagatgtattcatatgtgtgactatgggatgtggcccagatgctgctggggatcttacacagtaaacgctctatgcacaaccattgcctttctaaatgtgaaaaattctaaattctgaaatgcatctagtcctaagggtttcaaataagggattgtggacctggacctgcttcctggggttgtgagcattaaatgagatatagcagaagagcatctagcatggagtattcttacctggtaggtgtgtaataaattgtctctccccagggaaccatgggggtgtgggcagcaactggggatgcccacaccccatcctttttagtgagccaagcaagctcacactgacgcctagtggccacagtgggtcattagtccattgagttatttgtccctttggtgccttcattggtggtcaccctagcaggccccctagaggctccatgtgcaaaaggtgaggaagacagtgtgttaactggagccgatacactgcaacctcaaattcctagatccccgccagagtggtcaggtctgaatgtacgtgttagggagggaaaaagaaactcaagggacagaaaagaccctgactccctgtgctctactttgcagaccctcctacagtgaccctgtccattgagccacagacggtgcaggagggtgagcgtgttgtctttacctgccaggccacagccaaccccgagatcttgggctacaggtgagggggtcagaggctgggagcgctctggggagtgataaggaagagttcggggttagaggctgtactggggaggccaggtgtcatggatgtagttgagagggtctgaggcctgatcccacctctgtgttgcctcctcccctaggtgggccaaagggggtttcttgattgaagacgcccacgagagtcgctatgagacaaatgtggattattcctttttcacggagcctgtgtcttgtgaggttcacaacaaagtgggaagcaccaatgtcagcactttagtaaatgtccactgtgagtagctgggagggcagggacggggacagagagcaggggcccccaaagggccttggacagagtcggggactgctccatgaatggggaggtagcagggcaggaggaagattgattggagttaaccccatgagcttgagaccctaacgagtggcttctttctccctcacagttgctccccggattgtagttgaccccaaacccacaaccacagacattggctctgatgtgacccttacctgtgtctgggttgggaatccccccctcactctcacctggaccaaaaaggactcaaatatggtaagactcttactgcctgttcttttttttttttttttttttttttttgagacggagtctcgctctgtcgcccaggctggagtgcagtggcgcgatctcggctcactgcaagctccgcctcccgggttcacgccattctcctgcctcagcctcccgagtagctgggactacaggcgcccgctaccacgcccggctaattttttgtatttttagtagagacggggtttcaccttgttagccaggatggtctcgatctcctgacctcgtgatccgcccgcctcggcctcccaaagtgctgggattacaggcgtgagccaccgcgcccggccttactgcgtgttctgaatgctgggaggaaggggtgcggccacagatgggagtagatggggggctgcagcattatctttgaacctgggctatttctagggtcttgggatttggaggagaaagtgcttacggttatccccacatcttctcacaggaaagcccagttcagaagcactggggggacaaactcacctgtgcacgggaagcagggtggggtgggaggaagggagagggcctggggcgggcctactgcagtggtaaaggtctggtaaataatgctgcacagggaggtggggaagctgaggcgattcactaaagaaggctggagtctacagctctgcagagacccccattagaccatttgggccagaactacaggaagaagaatttcagagtaaaacgtcctatgtcatttggcaatgaaaacactagaacagatcatcagaagaggctgcgtcctcctaaaatgattgcagccttcacctgccctctctggcctccaccccatccctgcccacacctgcagagatggtgtgtttacgtgccaacctgtgtagagtca

SEQ ID NO: 4420 - DNA, 6000 bp, Homo sapiens
gtcttacgtattcttgtggtgcctgggaacagagttctgctcctactgattcaaaaggtaaaacgcaggtccaagacacactaggctccaggattgaacattgataagatcaaagacattaggctttggaggccgggcgcagtggctcatgcctgtaatcccagcacttagggaggcgaggcgggcggataacaaggtcaggagttcgagaccagcctcaccaatatggtgaaaccccatctctactaaaaaatacaaaaattacccgggcatggtagcgggcacctgtaatcccagatattcaggaggctgaggcaggagaatcacttgaacctgggaggcggaggttgtagtgagccgagatcgcaccatcgcactctagtctgggcaataagagcgaaactccgtctaaaaaaaaaaaaaagaaagaaaaaagaaattaggctttggtagaatcagctgtggcatcaggaggaaagcctaaccagtgatgaattcaatcttaaaaattgctgcttagttcaagattaacccgatactcagtgaaatatgaataatcactttcctactttggcagccacacatagaagagattgcgcatgcccggaaataaaaacaaagcaaaagagttgcgtaagtcagtcttcactgttatccatgtactacgttcagtataccataaaacatgaccacagatgtaaatactgtgttcagtatgacataaaacatgaccacagatgtaaaaaaaagggacccataagaaaatcaacaaatcaaaagcaacaaattcacagataacccagacattggaactgacagaaaaggattttaaaaactagtattataaatatatttgggaaattataagataaaatgaatggatgaatatatgaagaatcttgtaaaataaataaaaattagaaaagaaactcatagaatgaattctgaaaaacaaaaacatacctggtggccttaacagtagaacaagcaatgcagaaggaagagtcaattgtcttgaagaaaggtcaatagaaatcatccaaaataagacatagagaaaaaatactgaaatatttataaatctatacagtgtctacaactttttaaaataataattagactcgggcagaaataatcttttaagaaataatgaccaaattttccctaaattgaaaaatattaatctataagttcagaaatcctagtgaatttcaaacagaataaatacaaagaaactatgccatggcatgtcatagtcaaactgctgacagagcaaagcatagagaaacttttcagcatagataagctgctgaaaaccaatgataagataattttaaaaacaaccatgaaaaaagacagcacatccaggggaacaatgggaagaatggcaattgacttcttactagaaatggaagccagagaagagggaataaaacacatctttaaattactaagaacaaacaagcaagaagaaacaacccatcaacttagaattctacttgcagcaaaaatatcctttacaaataaaagtgaaataaagacattttgaaaatgaaaatgaaagtgcagggaatttgttgcctgtagacctactaagaaatgctaaaagaagtctgtcaagatgaagagaaataatacaagttataaactcagatataaaagaaggatggaaaagaattgaaaatagtaaataagtggaatactttataataataaataaattaatcagttcacaaagaagaaataaaaattataaatggcaatgcacttaataataacatttcaaaattaatgataaatagattaataaaaacaaagtaaaaattaaatcacaaacatggttggagatttttaacacactttctttcagcaactgataaactgaacagaaatcaataaagatatagaagatttgaacaatactaccaatcaatatggcctgatatacacctattgaacattacatctaataacttctgaatatatgtgttcttttcctgcacacataggacatttaccatggtagaccacatgctgagccataaaaaagtctaaataaacatgaaagaactgaaatcactgagtatgttctctgatcacaatggaattgaatttagaatcaataacaataagaaatctaaaaaatactcaaatatttaaaaattaagcaacacaattctaaatatttcatggattagtaaagaattcaaaaaagaaattagaaaacatttttaaataaatgataataaagatacaacgtatcgaattatgtgagacactttaaacgtggtgaaaacaggaacttcagagcttcaaatattaatgttatagaacaacaagaaggaatgtttaatatcagtgagctaacttccaccttaaaaagcaagaacaaaaagagcaaagtaaacccaacataaataggagataataataaagataaagaagaaatcaataaaacaaaacaaacaatagagaaaataacgccaaatgtttagttttgagattaataaaattgatagcttcctagcaagaatgatcaagaaaaaagagaaaaataacaaattaccagtattaacaataaaaaagaatattataacaaatcttattattaaagagataagttgaaaatttaatgaaaaaatttataccaatatatttgaaaatgtacttttaaatgaaaaaaatccttaatgaactcaatttactgaaagtgagacagaaagaacatttgaatagctctatgatgataatttgttattaaaataacaaataaatagtaaataataagtacaataaagcaaaaataaaataataaataacaaatattaacatattttgttttaaaaatccctcttataaagacaaagcatcacccagaaggctttgtgaattctatcaaacatttaaagaagaaaaaatatcaatcttacttaaaatcttactttaggaagatagcatattcctaatactgaaactttataaacaaattacaagaaaagaaaattcagaataatattactcataaagttagacacaaacatctttaaatagtttaataaaatctagcaatatataaaagattattaaatcatgattatgtggggtttatcacagaaaagaaagattgtcttaatatttgaaaattaaagtgtaattaatctcaataatttgccgatactttattcctatattctcctatattttgttcctatataattcctatattcaaaatataggagaatgtagagaattatagaaaaataatcatgtgtttatttgaatggataaacagaagtttcgaaacattcaacatctgtttatgacaaaaagctactagtaaattagaaataaaaaggaatttcctcaatttgacaaaaagcaacaacaaaaagttatagctaacataacacttaatggtgatattgtacacttttcttatgttgggaacaaggcaagaatgtctgtgctctgcatatctattcagcactgtactggatgtcccagtctcattagttaagaattaattaggcaaaggcaagaagttaaagtcataaactggaaaataataagtctactacatttatttgtaggtgacataatcattgtctatacaacaaagaacatttaattccattctatgctttttactcagtccctagcctgcataaatagtatacaatttgcaaagttggtaagagaaccaaattagcaatatggtaatccaattcaggacaaaggacaatcatggaaatttgattagaaatgcattaatgtgttaacaagctacctttgctctatctaaaactttaaataaatatgaatagcagcaaaaccaacacaaactatgatttataatggattataatggataaaatgtcatatagaaacattgaaatcaatttggaaatctagaaaaattgaatttttaagaaataatgggtacaaaagaaaactcacaaatgcaaaccctttgtataggtgaaattcatatttgattcaccaattagttttttttcaccatgaatatttttttcatatgaaaaagacttgatgctaatgaatatacttttaatacaacaaagataaaatgagaaaaacattatttaactttggttttataataattaacttggcttaatggaattcatttggtatactttaatttggagatttaagtaaacactgactccaggaggctagagaaattaggatttttagattacagatgcaatatggagatctcatttaacaatgacggtaactttgagataaaatacgggggaagtagcccagaggcagctaaaattctccatatacagtgaggtcttatctacaaagctccccacatcaatatagtttacttacaagtaccaaattgagtttgtctgctcttctgaaagtggtgagttaagataagggtcccaacagatgaacagctgttactgcaggtgagtgttctacatcaggcacgggattttcaactcataatggagtgacgttgaaccacatacaatattatgaggattttcccttgaaaccgttaaagagctgtaacatgatgcttgtgaatgtcaccactaggtggcactgaaagttaaacagttattgaacaggctgtggaatattgaagttttcctatggaaaaaaatttgattttttatgttgtgtctatatattcttcatttgaccttaaaacatagcagtagcagacatctcttgtaccgtgccttacacctcagcccatttgttttcctccagcccttggtgaggctcttggttacagaacctcagctcagctcactgcatatccgctgcttttttgcactaagtctttattcacaatgtggttgggacacctgtgagaagctacttagcatttatgaatgctcaaaactgaaagtgtgggggaattaagacccaatgggcaatccgtgactattaggggatgggagtcagggctttgtgttcctttcatacccctcaggtggacaattctgaggcaagatcttcattgctcatcagaggattccggcgaggtcagatccagttttccatagtggcgaccagcttgatagtaccactctattgactttctctcctttcttgttttattctttccaatatattagccttagtatctgataacatgccccaaagtaaagtcatttataaagctccccacgttaatatagtttactttggctttctctcctttcctgttttagagtcggcttcctgtaagaaacccaagcataacctactaccctgataaagaacattttcagcacccagaactctccttcatggctccttttcccattcaacgctctttaaaagagaactaataatctattagttctatttttgaacttcacattactggaatcttggccagtactattttttgtttgccttcgtaatttcttttttcttttctttttttttgagacagggtctcgctctgtgcagtggtgtgatcttggctcactttagcctcaacctcccgagtagctgggattacaggtgggtgccaccatacctggctaatttttgtattttttgtagagatggggtttcaccatgttgccccagcttgctttctttcattcaacattatttctgtgagatttatccatgttgtggcatgtagcagtagttcactctttttcattgtggtgtagtattccattgtgtaaaatgtaccacaatttatccattgtacttggggtagtcatttgaattgtttccagattttagctatttttaataatgttgctttaaatacttttgtacacgtctttttgtgaacataaacactcatgtcttttgtgaataaacatagaaataaaattgcttggtgataggttagaaatattgcttacatttaatagatactggagaacagtttttcataatggttacaccagttttgccttccatcttttctgcatccttgccaatatttggtgttactaactcttaacttttgccactctgatg

SEQ ID NO: 4421 - DNA, 6000 bp, Homo sapiens
ctttagcccagggttcaaggatgcagtgagctataattgcaccactgcgctccagcctgggcaacatagcaagaatccatctcttaaaaaaaaatctaggactctcctagaatccttgataaaataatctgaaggaagagagatggggaaaaaacagttgaggtgtctttccagggagcttatccagactgcctccaggggagatgttatggccctaaccataggtgttgtctcaatccaatataattaggggtcaagcccagtcaaacccttctcagccctcaagccctccaagttgcatcacaaatgccacctcctccatgtggtctctcctgatggtcccccaccccttccaaccaggtgggactttccttctgggcattcttcccatgcccgggagctgaagggatgggcatggtgactggctgggttggctccggatgcgtgcccctacgcctctccttgctccctcagggcctcaccaaccagcgggctcaggacgttctggctcgagatgggcccaacgccctcacaccacctcccacaacccctgagtgggtcaagttctgccgtcagcttttcggggggttctccatcctgctgtggattggggctatcctctgcttcctggcctacggcatccaggctgccatggaggatgaaccatccaacgacaatgtgagcccacacgcccgacccgggaacagcccgtgactgtcctccaaccctgaacccccaacacagtggggggtgggcagggaacaaggccctcacataacagtcctacagatgcccctgcatcttaggctggaaaggggagaggcttctatatatatctgtaaagtactcctccgccaacagtgcatacacattcacatactcattaattaatgaaacaatctctccctgttcctccccgcttaagtgagcctgtctgtgtgcctgggtcttcatcccctagcaaagtcctaaccctgggaacttcctaagactttccctcccatttctagtcttaacaggcttgaggttggcagatcaagggggaggttagtgagaagggctttcccctaccatcatcactctcagtcacagacaaaggtctgggctgtcatcttggatggcactgcctgctcatcccaagtggcagctgcccctttagggttggggggaaggtcaggtccctgaaactctttctccttaccagctatatctgggtgtggtgctggcagctgtggtcattgtcactggctgcttctcctactaccaggaggccaagagctccaagatcatggattccttcaagaacatggtacctcaggtaagatggcagggctgggctctgggctaggctgtaaggttttggcaagagtccagctcatcttttgtcagctcccaggctctaagatagagatggacagaaaagatcctccagctttccatgccagcacctaattgtttatggggcttctccttctgcttgacggtgtgggagaccagcaggagaagaaggcaggggcagagacaagcatttcatgagctgcctgtggctccccacagcaagcccttgtgatccgggagggagagaagatgcagatcaacgcagaggaagtggtggtgggagacctggtggaggtgaagggtggagaccgcgtccctgctgacctccggatcatctcttctcatggctgtaaggtgaggaggtcataccagagcaagcagttgagtctaaggagaaggctgtgtgcagagctgagaggggcccagtgaggtttaaaggtggagagacccaggtccaaatgtcaacaccatgcctatgcccctgctaaaccttctctcagtgtggggtgcttgtgcagtgcctccttgcatctgtgtgttatgaatgctctatgccccaggtatttctttgttgtccactttttagcaatcatgtattgaataccaattatgtgtcagctgctttatatatgttcgatgtgctatctgatgtaattctgaaagagtggtgtaatcatgcagggctgctgaatgtggccacacacgttgcatcctgaatgaccccaggaggtgcattttcataactacagtgttagtgtctccccctgtggttgtgcaaggcagagattctgtttacattcaccattttacagttgagtacatggaggctctcttggttaagcaagtaacccgaggtcacataagaagtcaggaggagtcagaattccaaaccagggcaggggcaatagatgagtaatgccataaatatgtgatgagggcaagtgtgactttgttcctcgtgtcatgaagattgagtgtggttggaggtggttcaggagacagctgtgtgcatacaagtggctctgccagtctgatgactatgcactccttcctcctcaggtggataactcatccttaacaggagagtcggagccccagacccgctcccccgagttcacccatgagaaccccctggagacccgcaatatctgtttcttctccaccaactgtgttgaaggtgagaagccaggctgccccctgtaggaaagagtctgaatcctgaatccatagtcaggatgaagggctctggtagtacttacctggcaaaagctctgccattggtggggcaattgaggggtcagggggccctgaatattatggaaacaccctccacagagcagggtattgactgagggcagcctgactccatgggaaatgtatctcccttccccagggagatctctgttctgtccaccccaagactgagtggatttcaaagctttcaggtattgggttaagaaccccttacgcatgcgcacacacagatgcacatacgctcagaaccaacctggattcttaggagtctttggatttgattgatgcttctattccttgtggttctgggcctcgctgcccccttcgataacctttgctttggccagggccccagggtctgggagggccaagaaggcattctggccaggtgaacacttggggcctacttcaggctgcttctaacctttgttacatcaaaagacatgtttcaccatgcacagactacccagtttgccccatccctgttctgggttctagagataaacaaaggtcaataagaactcccagagctgccatcacttaatggcaggggtccaagcacaactgaaacctgtgccctctgtggtaaagccagtgagcagagtcagggctgcatcagagaaggagtaggagggaagagacagaaagaggcctcactagaccagtggcctctgaaaatagggcaaaggaggcctcatatcccaatccacacttcccctgtccattactcatttctcctcagtgtattatgtttctctgtggtttttttcccttcttcgacaagttggaattccactgcttggaatccatgagggattggttccaggacccccttcgttaccaaaatctaaggatcctcaaaggccctgatatgaaatcgcataatatttgcatataatctgcgcacatcctcccatatactttgaatcaactctagattacttataataccgagtgcaatgtaatttttatactgttttgtttttaaatttgtattatttttattgttgtattgttatttttatttagctccaaatattttcgatctgaggttggttgaatctatggacatggaatctgtgaatatggagggccaactgtacaaataaaaatcaccacacattacatttcctaagtttgttttttgttttgcttttgagacaagatcttgctttgtcacccagactggagtgcagtggtgcaatcacagctcactgcagccttgacctcccaggctcaagcgatctcccacctcagcctccagagtatttgggactacaggcgcgtgataccacacccagctaatatatatatatgtatattagagatggggtctcactatgttacccaggctggcctcaaactcctgggctcaagtgatcctcctgcctcagcctcccaaagtgctgggattacaggcatgagccaccgagcctggccaaatttcctaaatttttaatgtactgagattttgaaatttacatttcccacaattgatttattcagaaatgcctagtaatacattcctattgcttactctgcaattggctttgaaaagaggaaaggaaataaatgagatatttgttgagcacccgctatgttccaggcactggcctaagtatattaaagcacaatctcatctaaatattaaaacagcaccgagataggaattcaaataaggattcaaacccaaatttggctggctccaatgtgcatgcttttttcaatacaccacccttccttcccagaagacccctgtaatgtcacacaagggttagcaattgcctggcttcctctatagagattcatgcctaatgttgagaaagaaaatcttaagactggatggaaaatccataatgagtgctttactttgtgttcataatatacttttggatggtatcaagtatgggaatgattttaccaaaatgccacaggcaatttttatttattgaatcttgtctatttgaactttgagattatttgcaagcttctccccaggctcgagtacaagagaaaataatttgctgttgtattgattcaaggattggcgatctatccagggaaaggaaggccaagtggggacaacctactgaatgtggcctccagatctgcggctttggctcacctatcctgtgatgattttccttgctcaggaaataggatgggactgcagtccctgggagccacaaggcacccaacctgatgccccaccatgttgcaggcactgccaggggcattgtgattgccacaggagaccggacggtgatgggccgcatagctactctcgcctcaggcctggaggttgggcggacacccatagcaatggagattgaacacttcatccagctgatcacaggggtcgctgtattcctgggggtctccttcttcgtgctctccctcatcctgggctacagctggctggaggcagtcatcttcctcatcggcatcatagtggccaacgtgcctgaggggcttctggccactgtcactgtgagtgggtcaggctgaggtgccaccaggggagggtctcactactctttcctcagagtgatagaggcacagttgcttgtagcttctcactactttttccccctagagtcacttattggatgcgatactcagagatcacttaatacatggcttagggtatgagttgagaaatctcaggtggggctattcttaggcactcagtttctcttttggagcttgtcacggctgccttttctcacgatctgccagcagtctgggtctcattccgtccaagtctcctgtagaggctgtctcaaaggtcaccagtcactaactagcaaatccagggaccttttctcagctctcctccctaactctgctgctgaaacagatactgctgtccaccctcctaccattctctcttttgtcgattgctgtgatgtgtcactatcctggttcgcctctcctctgtcccttcctgctccccctacactgattctcaggcctcagctgtctgttcttcctacaccctgagcaagagccaatctcctcccagtttgcagtgtcccttctgtgttgatgactcagacatccctatgctcagctctgctctggccctctctggagctctagtcaaacgtcttaaaccccctaatgggcatttcatcttaacagatactcatgatctcaacacatctaaaattgaacattcattatttacagctaagtcccacccattcaagttagtggagtagaatcaggggaggaggaatggagccacggtctagggtaaggttatggccatctccggcttcagccttaaccttttttattctcctctttctctaccaggtgtgcctgaccctgacagccaagcgcatggcacggaagaactgcctggtgaagaacctggaggcggtggagacgctgggctccacg

SEQ ID NO: 4422 - DNA, 6000 bp, Homo sapiens
ctagaaggttgactggtagctggacagtctacagtggtctcacttacagtctaaccattggcaggctgttggccaggcagacagaggacagctgggccatgcatctctcatcagccatcaggctgactttggcttcttcacatggtagtggtggctgtgtgggtcccaagatcagtgagagtggaagtggcaaggtctgttgaggtctgggtgtggaaactgcacagcatcactgctgcctcattctgttagtcagagctgatcacaagatcagcccagattcaaggggtagagaaacagatttctactcttgattggaaggacctacagcattatgttgcaaagagtaagatgcagagaaggaaagagtttgtagccatttgtgcagtcagtcacacattgtaaaccccttctcccatgaacataccctaaaactcttagtgagtttttaggaattatgatatggggttttattatctaagaatttatataatttaatgttgggagttccgtcctattcttggaaatagctgttaccagggaacagttagtttaattctgttcctagtagaaaacagtcttttttttgtttttttgagacggagtctcgctttgtcacccgggctgaagtgcagtggcgctatcttggctcactgtaagctccgcctcctgggttcacaccattctcctgcctcagcctcctgagtagctgggactccaggcgcccaccaccatgcccggcgaatttttttgtatttttagtagagacggggtttcaccgtgttagcaaggatggtctcgatctcctgacctcatgatccgcccgcctcggcctcccaaagtgctgggattacaggcgtgagccaccacacccggccgaaaacagtctttttaacttccttttgttttttggtggggttagcatttaacttgtagctttctgagatgaatatagagggtctgtatgattattaaccatgtgatctgttaatatttcctatgacagccattatagactaaagataaacacacagagtttgactatttaatttacttgaccagttacctcagtgcattttaaagtatgtttgtgtaacaagacgttcataataataactaacatgtattaagtactgtctgtgagacactgcctaagttataggtatcatcttatttaattttcataacaacaaaaaacaaaaatgtagatattattagtagtaccattttagagatgaagaaacttgtgcttagaaatttacaaatgtgcccagggccacgtgaccagtgctcttctctaaggttcaacaaagacgatatcataattcagactgcagatctgccaacattcaaatggctctagtcctcgagtgttattttctaactccgcttttagatgcaccattgtatagcccttacaactgggcctgtcccttctgtagatgtgggagtagctgaactccacagaaccccaggttacacactaaggacacaggttgttagggctcctggatgagggtaagtgtgtttattttaaaccacgtgcttttggctattgagcttatgatttcaaaggtgaaagcttaagcacgttattagacttctcaaggagagttcccctagattgggagaaaagttgacattgggtaatattaaatctttcttttaaaaccagggctattttgttgttgtttacaattttaagagtctagactgaaagagtcatgaaatgcagccacctatctgacctcttcccccaacagttagggaattcgctctgcccccaggccacccaaccttcccttgctctcctgaatgggaccctgacaattccctggaattgtaacctcttccttactgctgaggctgagaagaggatcttttctactttactccatttagggtttttctttatatctgtgtagattgtggctttttgttttttctttttaattttattttaaaacaggaagaacagttatctgatattaaaaatcaaggaagcaatatttgtattggtcacaatacgctcagactaaaagaattatgctgtaagtagttgtattgaagaatatttgaagtgcttttaaactatttgtttaaaactatacctatttgtataacgtgaccagatcaaattgattgtatctttgggtggcaccaaatatgttggtttcttgcatggattgattattctgaagctcatgatttctgtgggtctcaggtgcgtggaagttcccatcttagtccttaagactcttaccccaattgtaagagctgaggaattctgtgatagctattaagataagagatattcctaagaaggaatatattattacagaaattttcaaacatcaaaaaggtttgaaagaataatgtaacaaagccccatgtacttgctttaactattgtcaacgtatgtccaatcttgtttcaaagtcagtcctggatgtatcatccataagaagtcttcctgaagacattcaagagggaagtctttgctttggaaccctgatgtgatcacgttaatcattgcttctatgcctgtagctgaaggaaccgccagcgttttcagtcctctaatccttctgcttcccttttccagggcccagtcatatatgcacagttagaccactccggcggacatcacagtgacaagattaacaagtcagagtctgtggtgtatgcggatatccgaaagaattaagagaatacctagaacatatcctcagcaagaaacaaaaccaaactggactctcgtgcagaaaatgtagcccattaccacatgtagccttggagacccaggcaaggacaagtacacgtgtactcacagagggagagaaagatgtgtacaaaggatatgtataaatattctatttagtcatcctgatatgaggagccagtgttgcatgatgaaaagatggtatgattctacatatgtacccattgtcttgctgtttttgtactttcttttcaggtcatttacaattgggagatttcagaaacattcctttcaccatcatttagaaatggtttgccttaatggagacaatagcagatcctgtagtatttccagtagacatggccttttaatctaagggcttaagactgattagtcttagcatttactgtagttggaggatggagatgctatgatggaagcatacccagggtggcctttagcacagtatcagtaccatttatttgtctgccgcttttaaaaaatacccattggctatgccacttgaaaacaatttgagaagtttttttgaagtttttctcactaaaatatggggcaattgttagccttacatgttgtgtagacttactttaagtttgcacccttgaaatgtgtcatatcaatttctggattcataatagcaagattagcaaaggataaatgccgaaggtcacttcattctggacacagttggatcaatactgattaagtagaaaatccaagctttgcttgagaacttttgtaacgtggagagtaaaaagtatcggttttattctttgctgatgtcctttctgcttgaaataacagtcaccatacagctaaaggagaggagtttctttccttctaagtaggcagaaatggtatcattatgttgccgctctccaatctcccagagctcgctctctagagaatcaccttctttcgcttttttttttttttttgaggtagagtctcactatgttgcccagactagccttgaactcttgggctcaagtgattctccctcctcagcctcccgagtagctggaacgaactatagttgcaccactgcagctggcaagaatcaccttctttataaagcgtcagtcatgcttccagcaagaggcagcatcagtcatggctttataacagcttcatggtgcctcaaagactgttgaggttaatgagagcctagattagacagtttggctgtccttccctaaaacttgttttctcctattcactactccccaccgcacttaaaatctatgagtttttactttttactgggaatggaaagtgtggtgaagatcattcaacacttatgttgtcatttctcccattttctgaatttttttttaaatttccccccttttaaaattgttcgaaagcccacagttatggaaagaattactgtctagatggtctgcagaacgtgtttggggtgagtgggagtgaggggcaatgttactttttctccctgtagtttggagtccattatgagctgctgctttttcttctcatcttgtcatcttctggggatgtttgaaggctgagttccaacagaattcacaaagggaataaaacaggattgagattttgaggtgtgcacaaggtggtaagataaagggcatatgagcttcaaaactaatgctgttgcatacatgaagccttttgttttttgaggagctatttttgttattcttgtaacgctccaccttacatgccacatctgtgtgagtcaacagggatcaggtttggtcaccacacatgtctgaagctgggcagcgtctgctctgtgttctgtgtggaatggagaaaaaaacgcctgccctgctgccttccatgttcataggcccagcccaagagagtgacacacagtgctggccctgagacatttccacaaagtggtcaactctgccttgcatcctaaaactttttgggcatctattttgaaaactataggagcctttggaaggcctcttatgtttggaggggaagggtgttgagattgtcaccatccttcaagctgagactcctggtgagcctttgccaccatgaaaaccacatagctgaccagggctgtgcttgaggtacagaggacacacattgtagacaggcctgtgtcatgtttccttacagtcgttttttacagagaaaaggggcattgttttttcactgctttctcaacagttcctgtgaataaatgaaacatttcggagctccctgagagcaagagccttcacttcttcttgcggtgccgggaccatgtgttggtgaagctggtgctgtgggggccactcactcgaatgacacctggaggcctgttcctcccttaccactcccttccccagcccgacttcttggcctcctgcccaaccagacacctcaaactctgtcagtgccctggcattctggcagagaatcctcaccagttctcaccaaccttccccccaggcaagggcagctgccagcatggtgctctgccaggacaggtttccctgaaggaagctgctcacactgagatgagcctctcagggcaggacctcttcccaagccctgcacacccacccctgcagcccttttggctccccttttccctgtgcctcagcactcctttcctggttgcagataacgaactaaggttgcctaaagggcagatctgccctctccatgtcttcgtcctggcaaacagggtcgtcttaaaattatgcgctaattctgtatgggagcactcaaaaggcattacttagagattgaaatttcaaactatctctagtttttcaatggaaatatatcagctagggaaaaaccatcaagctcattattattttttgatcttcagttgtatttttgtgaatattttaatacatctttttcaatttctgaattgtgttgtgtgctcattttgaccagaatagaaaaagagatatgcctttcactcatatcattccagctacacctgccttcttttcttcaaaaatgccgtccgtgtgcctgcttctgggcctttgcacatgctgttccctgggcctgaagcatgccttctgccaatattcctgtggtttgctctctgacttcctttaagcctctgctcaaatgttacctcctcagggagaccttctgtgatatataaaagagcaagccccccaccccaccgcctcagccttcctggccccctcagttctgctctagttactctatttctctccctctttcccagtacacacttgtctgttctcccgcattagaacatagttaacaagagaccagaaccttgc

SEQ ID NO: 4423 - DNA, 6000 bp, Homo sapiens
ttgtattctgattataatatccctgttactgagctaagccagtgttgacagtgtgaatgatgctactcacgcagtgtgatccgtctcctttcagtcttctaaatagctgagtaatccattatttaaaagaagggaaatattgccagagactaaatattacgtgctgatcaagtactatgaagctttggtgtggggccatataccagctattccttttggtaaaatatcttttaatatgagtgaagaggtgagagatggttttcctggagatcttgcttaattcagatcatgcattaaatgcagaatagcgtactctcagaataggtaactatgacaaggaagacagtttctttttcttagaactgctaagggaattgctggtacaatataaaagttgtgtttttatttttagatgtgcccagtgaaccgaaagaacgaggagactttaatcatgaacgaggagagcgaaaggtctgcagattcaagcttgaatggctgggaaattgctctggattaaatgatgaaacttatggctacaaagagggcaaaccgtgcattattataaagctcaaccgagttctaggcttcaaacctaaggcaagtaatattttaaatgatagaatttagatgagtcatttacactaagtacttaattgatctgagaagacaatgtaagatagttttaaagtatactcagtgctgactttgaaacgtagccagtagagtaacaccaaaaacttctgtatccaccctgcaattcttgtagttaggacattaatctcattttctaaagttaaaggaattctgagaggcaaagctgcattctgaagtgagtctgtggcccttttcttaatactcctgctcagtatccagataacagtttctataacataaactctttaaaaaagtaaaaatggaaaaatatattttttccctggtggtctagtggttagagaaaaaaaaaagttttttattttttacttcataaagaatggattaaaaaaaaaattttaacccacttgcatgtatagtccagttttggtcctctggaagccacaggaacatttcaaaaaaattgataatctgaaaaaatattttttctgaattttattgcggaagtagaagtttaacatcatctaggctgaattttgctagccatgctgttggctttttgtattactgcaacttataatggataaacattactctggatcactgaaaaatgagcaaattgccattgctcaccatttggtgagattatattctccataagaatggaaaatttatcgttgttgtctgcttttgtaaagctggtcatttcatcctctcctccagatcatgaattaatgctgtcctttccccttaagcctggcttcttctggcaggtttccccctaatcacccgtatatgagcgttggcattatgagtgttgtttctaattttgatagaaattgactgcagtatattgagttatgtgaacaaactcatttcatttctgaaatctggcacttttgttcattaattttctattgaatgctattaatttatttctacaatgcttgttacccatgaataatattttcaaaagaaaatcaacacagagataaaaagttttgttaactgaaggatgcatcaaagttcctttattgccatcagaggcaaaaatgagtaggtggggatggatggttgcctggctggctagtttgatggactgctggcagaaattaatgtacctctcaaaaggattttaagcttctttccacatagacaggatataatggaagaaaaacggtgagaaccattatgccaaaatgtatttgatattcatattgctggggaatacttcactgagatcaatcagctatttagcagcaaaagaaattgttgtggcatggccaagagaagactcatcccatactttctgagtaccttgcttttgacattactcatcgtagacactgaatgacatttggaccccacagaggcagtctagtctattgtgattgatttcttcccacatctttagagttacttggttcagtgataaattcagctactctttcttttcagtcctttttttcttttttctttggtctctacttggttatccattgccactgcctaattcatcacctccacccaaatctccaactattttggagttatttttgtcagagatcagagtatcccagcatctcactatcctcaccattggaggatagattctggcaacttcttagtgagcattttctctacatatttttaaagacaaatacattgctggcagaaacgtcccaaagagtcaaatctagacgatcattttcttgcatccaaaacagagtagtagcaaaatagtagttccttcctgatgtggaactaatattttatctgactttgattagactatgtatgtgttacatctcacatcaagactcacttgctgtgctgatctgagtaagcaagtgactgtcttccagcgaagtatgttcatcacacttctgagatagatttgagccatgggtgtagaagaggaggctctggatatttcatgacagcagtaattttcagactgtcctctgggtcccttcagtggattcaccccttcaagaccacccttcctcttagggcagtgacacctctgccttttttacatattggactttcctaagaaaattgcaaagaaacgctccttaaatggcagtctccccgactggagattaaaacaacaaaaaaggaaagcctacttgaagtcatgcttgagggaaaaggatgacattatttattcatgactcaggaggaaagcccacgctttataaaaacagaaatgtcaatcatctttctcatgtaatctaatcttagcaaataacgagcattatattttgggttgacttagttttcagtgtctttaagcaaagcttataatgggctactattaaaagttccatttagtactggtttgcatcacagcttaattgtagtcgttataaacttgggcacttattttcatttcagcaaaatcacaaacatgaccttaaattggttaggggagtcattcattctgctgtcctgatgtcttttgttattttggttgacttactgtgaccagtgtgtacttgtttggactacggagtagttttatttttcagaaacttaagaaatcatttacaatctactgatcataatgggttttatttttagcctcccaagaatgagtccttggagacttacccagtgatgaagtataacccaaatgtccttcccgttcagtgcactggcaaggtaaagacaaatttagggttactggggtggtggaagggtaggcagaggaagaggggagaatgaagaagactgtttaagtgacaggtagaattttaatagaagaaataagaaacattgctttcaagtataagtctcagtgagatgaattgtagctatactaggtaaaactttttaaaagaacagaaagatgtaatcagaataagactgatgtcagtttctccactggcataagaaactcaaatatctgaatttaatacattgggatatttgcttatcagaactgagaggtgaattagcccacagaagtactttctggcccacagcatgtattaaaaatttggggccaacattaaaaaaaaattaatgtcacataaaaattagtggtttgggcttctcttttaaaaatattgaaatatcgcctggtgcagtggctcacgcctgtaatcctagcactttgggaggccgagatgggcagataatgaggtcaagagtttgagaccagcctggccaacatggtgaaaccctgtctctactacacatacaaaaattagctgggcgtggcggcgcgtgcctgtaatcccagctgaggacctgaggcaggagaatcgcttggacctgggaggcggaggttgcagtgagctgagatcacgccattgcactccagcctggggacagagcaagactatctcaaaaaaaaaaaaaaaaaaaaaaaaaaaattgaaagactaaggtaacaattagtgcatgtttcctttggatccaaaaactaatggaccgtttagagagaaaggcagaacaaagaaagggagttcccagacagtgctagcaccaagcaaggaagtggagattgatttctcaacaagaaaatgagaggcaagtagtaaactttggagataatatcactagacagattatttactgggccaacagcaaggtgtttctgcctttcaatgttggccttgtttctaggaggcttgaagaatgcttatttggcatttgactcagcttccccatccatttgcacattgagaatagtctcttcttatgaccatttctcaaggctgcaatggaatagactgagtagatgttctttcctctctcagtagtttgcaaactactgtgtagattgagtcttgtttttgagtacacatagtgatgcatgatgtgagccattaaaatttcatttcattctggatttcagcgagatgaagataaggataaagttggaaatgtggagtattttggactgggcaactcccctggttttcctctgcagtattatccgtactatggcaaactcctgcagcccaaatacctgcagcccctgctggccgtacagttcaccaatcttaccatggacactgaaattcgcatagagtgtaaggcgtacggtgagaacattgggtacagtgagaaagaccgttttcagggacgttttgatgtaaaaattgaagttaagagctgatcacaagcacaaatctttcccactagccatttaataagttaaaaaaagatacaaaaacaaaaacctactagtcttgaacaaactgtcatacgtatgggacctacacttaatctatatgctttacactagctttctgcatttaataggttagaatgtaaattaaagtgtagcaatagcaacaaaatatttattctactgtaaatgacaaaagaaaaagaaaaattgagccttgggacgtgcccatttttactgtaaattatgattccgtaactgacttgtagtaagcagtgtttctggcccctaagtattgctgccttgtgtattttatttagtgtacagtactacaggtgcatactctggtcatttttcaagccatgttttattgtatctgttttctactttatgtgagcaaggtttgctgtccaaggtgtaaatattcaacgggaataaaactggcatggtaattttttttttttttttttttttgttttttggctctttcaaaggtaatggcccatcgatgagcatttttaacatactccatagtcttttcctgtggtgttaggtctttatttttatttttttcctgggggctggggtgggggtttgtcatgggggaactgccctttaaattttaagtgacactacagaaaaacacaaaaaggtgatgggttgtgttatgcttgtattgaatgctgtcttgacatctcttgccttgtcctccggtatgttctaaagctgtgtctgagatctggatctgcccatcactttggctagtgacagggctaattaatttgctttatacattttcttttactttccttttttcctttctggaggcatcacatgctggtgctgtgtctttatgaatgttttaaccattttcatggtggaagaattttatatttatgcagttgtacaattttatttttttctgcaagaaaaagtgtaatgtatgaaataaaccaaagtcacttgtttgaaaataaatctttattttgaactttataaaaagcaatgcagtaccccatagactggtgttaaatgttgtctacagtgcaaaatccatgttctaacatatgtaataattgccaggagtacagtgctcttgttgatcttgtattcagtcaggttaaaacaacggacaataaaagaatgaacacattcctcgtgtgtgattcactcttgtctaaatgtcccaacctgtgacttctttactttccacaccactaattatccaagatcttgaagaagta

SEQ ID NO: 4424 - DNA, 6000 bp, Homo sapiens
tgtagcccagaagccagagttgaccagagcctcttattattccaggcaggtctgtctgcagtgctgcagcagcctgaagccctagccccgggcccctcctgtttcctttctcccatttttatgcatcacatcacattcaataggagcatttagtagcggggagactcagggggtgagttcctttcatattttcaaatataccctactctataacctatacaaggtatcactctttttcctcatagtttggggatgtatttcttctttagcagcctgggaaagctaaaagtaaaagattccttggacaaaattggaggaaagtgtgtctgactagtgtttacactttggtgacttaggttcttgtctctggcagctcctcatttctagaggcttttttttttttttttttttgaagtcagggtcccacttggtttgcccaggctgaaactaagtgatatgaacacagctcactgcacactgcagcttccacctcccaggctcaaatgaccctcccacctcagcctcccaacttgctaggaccacaggtgtgcgccatcatgcccagctaatttttgtattttttgtagagacagggtttcaccgtgttacctaggctggtatcgaactcctgagttcaagcgattctcccgcctcagccttccaaagtgctgggattacaggcaggagccacggcacctggcagatgcctgccttttaaagggcctcttagaagcttgccagaaaatgaggaggtttaggctcaagagaaggagcaaagtgtaacaaaaagagcaccaggcagtcaagaccactgacttgctaagaccaaaccacttttttatctccctgtacctttgtatcttcatctgtaaggtgggggtcacagctgtcctaactagaattgatatgaccaatgctttcacacgtcatctacaaattatagaacagatgttataggaatttaggaggaaaaaagtaaaatgtcttaatgatcatgtaaagcattatgatttcttgccctaggaggaagagatgagagagttagctcttctatcctatcatctcttaggcttgcaaaatattagaaaagaggagggagcacataccttaccgagaatgccccaagccgaatgactaacccttacctgaaaagaggtagtacctttcaggtgtctgagcagttcatttgatgctgaggtggtgtgagcaccttcagattattctttggcagttgcctaatcagattaggggccaggcaagctcagcagttgcagagaactcatactccggagagttcaaaactcagacagaagtggggacgtcatgatatgtttcctagtattatagcgatcccaccttaaacctcaggccccaactctgcactgcccttttgactttgtgccagcagcttagcgcttgacctactctgtgtttctctagataagcctgaggcaaacaaatcttttcattcttttccacatgtgttcttcagccccatgtgttctaatcttatgcgaccttttccatcagttgcctatggaagtggaagaatctctccgctttggtactgtgaaaagaggttcaaagtaaggaaggaattctgccaggcgcagtagttcacgcctctaatcctagcactttgggaggccgaggggggtggatcacaaggtcaagagatcgagaccatcctggccaacatggtgaaatcccatctctactaaaatacaaaaattagctgggcatggtggcatgcgactgtagtctcagctacttgggagactgaggcaggagaatcacttgaacccaggaggcagaggttgcaatgagctgagattgcgccactgcactccagcctggcaacagagcgaggctccatctcaaaaacaaacaaacaaaaaaaacacaaaatattagctgggcatggtggcaggtgcctatgatcccagttactcaggaagctgaggcgggagaatcacttgaacctgggaggcggaggttgcagtgagccaagatcgcacgactgcattccggcctgggtgacagagtgagactctttctcaaaaaaaaaaaaaaaaaaaaggaaggaattctgactcagactgtcttttctaattctcaagagacccaagaccctatatgctggtggttattgctaatggttataacctagctaatggttattgttaatgaagctgccttagaattttccattcttttggtggggtgggggttccctggcaaggaaagatggaagggcacatggagcttattgttcttcttctacttaaagggcttaataacaaaagttcattaagatcaaattaggcggctgggcgcggtggctcatgcctgaatcccagcactttgggaggccgaggcgtgcggatcacgaggtcaggagaccaagaccatcctggctaacacggtgaaaccccgtctccactaaaaatacaaaaaattagccgggtgtggtggtgggcgcctgtggtcccagccactcgggaggctgaggcaggagaatggcgtgaacccgggaggtggagcttgccgtgagctgagatcgcgccactgcactccagcctgggcgacagagtgagactccgtctcaaaaaaaaaagaaaaaaaagatcaaattaggctttctcccatcacttaagtgtcctattccagacactggatacctttcatctaagatttccaagcactatttctataattccattcctttatcactttcttagggtggtgcgaaaagacagggcccattctctacccaactaaaggtggaaggaactgagtcctgagaaggctaagtaacatccctgtcttcatgaagcaaacattgtagtgggtgaagacagaaaaggtaaaatcctctgattcctagttcaacactctatcagcattgttcccaacatcctcttgaaaggttaaggagttctacttaagggtcaagttgggtttcttgctactttagcccttcccacttcttccaggcttggaggagaagctgaactggggtgaaaactctgtggtcctgcctgtgcctataccagtctgaatgaagggagtttgacacattgcctcaggttctttgtggatcttcttgtttcccagataagaagggagtacgatattttaaaaacaaatagagccctgctttcttaactctttgtaagtcagagtagtgctaaaaatctatgtggcgaggaggacgcaaagggcaaattgggagagggaggagtataaatcaacctgcatccctgtggaagcttctgggaagaggattgtcaggaatcggcaaagactttggctacatgtgactttggaggagatcattgataaaagaatcaagtcccttatctgatggttcttgtgcttctttgttcaccttctagaagtaagtgtggcatctatttattacagagaggttggccagagctccttgccaccccctggtaactgaagtcgtcagtggggactacgtaaccggggctggggtcccatgttctggtgctgtgctaagagtcccttcacatttaaaaggctgatgtgtggcagtgacacctgtcagtggcatgacacacagcggccccactctgaaactgagaaggggcctcaggataagttctcttcccaccttcagccctccgttttgtcacctacaccacaccccctagttagcatgcgtgagaggtaatgcatctttctgaggggagaaatgctggcctctctctggtgcctttattgagctgatgtgagactctggtgctcactcacaggctagcttgtctcccttgctaaccttgctgtggccctatcctctatctgaattgagaggtatcttaccgctcccactccagagaaactttaatgctcaggcttcaaactccctatctttcctcctcagaggtccttctgtcccctttactagaaaaaaaaaaaagttcaccctgcgtcaccaactgccaaagcattttactctcctcttctccccaaaagcctcttggaggagggtggagcttagcctcagaacaaaacttggtgccggccaggttgacacctgcacgggctgcagaatttccgtacacctggaggctgagtactctaacgggctttggaggattttgacatcttctatcaagttgtcatttccatacacctggaggctgagtactctaaggggctttggaagattttgacatcttctatcaagttgtcttccttgtgtgtaaatgtgtgtgttgggagtgggaagagtgtgggttgtgggagaggaaggcagactgacaggccacccttcagatcacttagatctgaactcctttttctgacctcttctcatcttttatagataaggtcagactaaaggatcctgtcacaggtccctcaaatagacagggaaaacattagagccatcagaggtcgtaaccatttatttccaagtttctgaagctgtgggttttatgttgcttggttgggagaggtgagacgtgaagactcgggtattgaaattactcctctacattggagtttacaggctgcaggggcctcccaggaaggaacgggcctctcttgagtcagctctctaagctcaggcctagctatcagttcagctcagatctcaactgtcacttaaacccttgtgcttagactgggtacctcttgcccttgcagatgctggatacttatggctgctctaatggtttctttttgtctatctttgaacctttattccagagatccagttgtcatcggtatccaggaagctctcctcttcctcctcctgacgtctactactacagttgctggttgttgctaaggttgctgccatggtaacatgcacatcctgtttacaccttcatctgggcaagttggtctaagctaggaacctacctaccctggacaactactatcatcaccacctggggacaccaatcatcgtgacacggagtccaccttccactcagttcccccatcctcttcctcctctcgctgccagacttcatacggaagaaaggatctagacttcggacggctactcgggagcttattgcacaagatatattcaatctattccctcactgggcccccagagaagcaagaagtaggaagaagttgagacagggaggcaggagacactggtcagttgaagggaaacgctacatcttctctggttgaggggcttggtaacagcaggcaaaatgacgaacccatcagaccgtgtcttgcctgccaactcgatggccgagagccgtgaaggggactttggctgcacagtaatggaactgaggaagctcatggagctgcgttcaagggatgcactgacccagattaatgtccactatggaggtgtacagaatctctgcagtagactgaaaacctcccctgtggaaggtaaaggccatatcaggggtggggagttggaggaaggtggctagtgtttcaaaatattgttttcccagcttctagagaaggcacatttctggaggcccagctggtatatttttgtctggtgggaaaggtatggcatctgaagcactgaaaggagggcaggccatgaagaactgtatctttcccagagatgatgtttagaaagtgtgctattctctaaagattattcttttctcctttttcttttctttctttcttcttcttttgtttcttttttttttttttttttttttggtgagacagggtcctgctcttttacccaggctggagtgcagtggcgtgatcatggctcactgcagcctcaacctcctgggctgaagccatcttcctacctcagtctgctgggtagctaggaccacaggtgtgtgccatcacacccagctagctttttagatttttttgtagagttgaggtctcagtatcttgcctagactcatctcaaactcctggacttaagtgattcttccaccttggcctcccaaagtgttgggattacaggcacagtgagccactgctcctgacccctcttttctcctttttctgtat
